United States Patent Application Publication US 2019/0348154 A1 - sequence listing, part 37

SEQ ID NO: 136638 - DNA, 2259 bp, Enterobacter cloacae
atgagcgatatggcagagcgccttgcgctgcatgaatttacggaaaatgcttacctgaactactccatgtacgtgatcatggacagggcattaccgtttattggcgatggcttaaaaccggtccagcgtcgcatcgtctatgcgatgtccgagctggggctgaacgccagcgcgaaattcaaaaagtccgcccgcaccgtcggcgacgtgttgggtaaatatcacccgcacggcgacagcgcctgctatgaagcgatggtgctgatggcgcagccgttctcttaccgctatccgctggtggatggtcagggaaactggggggcgccggacgatcccaaatctttcgccgccatgcgttacaccgaatcccgcctgtcgaagtatgccgagctgctgctcagcgagctggggcaggggacggtcgactgggtgccaaactttgacggcacgctgcaggagccgaaaatgctgccagcgcgtttgccgaacatcctgctgaacggcaccaccggcatcgcggtaggcatggcgaccgatattcctccgcacaacctgcgggaagtggccaaagcggcgattacgctgattgagcagccgaaaaccaccctcgacgaactgctggatatcgtacaggggccggatttcccgaccgaggcggagatcatcacctcgcgggcggaaattcgcaaaatctaccagaacgggcgcggctcagtgcgcatgcgcgcggtgtggagtaaagaggacggcgcggtggtgatcagcgcgctgccgcatcaggtctccggcgccaaagtgctggagcagattgcggcgcagatgcgcaataaaaagctgccgatggttgacgatctgcgcgacgaatcggaccacgaaaacccgacccgtctggtgattgtcccgcgctccaaccgggtggatatggaacaggtgatgaaccacctgttcgccaccaccgatctggagaagagctaccgcatcaacctcaatatgatcggccttgacggccgcccggcggtgaaaaacctgctggagatcctcagcgagtggctggtgttccgtcgcgataccgtgcgtcgccgtctaaaccatcggttagagaaagtgctgaagcgcctgcatatcctcgaaggtttgctggtggcgtttcttaatatcgatgaagtgattgagatcatccgcactgaagatgaaccgaagccggccctgatgtcgcgttttggcatcagcgaaacccaggcggaagcgattctggaattaaaactgcgccacctcgccaaactggaagagatgaagatccgcggcgagcagagcgagctggaaaaagagcgcgaccagctgcaggcgattctggcgtctgaacgtaagatgaacaacctgctgaaaaaagagctgcaggccgatgccgatgccttcggcgacgaccgtcgctcgccgcttcacgagcgtgaagaagcgaaagcgatgagcgagcatgacatgctgccgtctgagccggtgactatcgttctgtcgcagatgggctgggtgcgcagcgccaaaggacacgacattgacgcccagggcttgagctataaggcgggcgacagctggaaagcctcggcgaagggcaagagcaaccagccggtggtgtttatcgataccaccggacgcagctatgccatcgatccgattactctgccttccgcgcgtggccagggtgaaccgcttaccggcaaactgaccctgccgccgggcgcgaccgtggagcatatgctaatggaaagcgacgatcagaaactgctgatggcttccgacgcgggctacggtttcgtctgtaccttcaacgatctggtggcgcgcaaccgtgccggtaaagcgctaatcaccctgcctgacaacgcgcacgtgatgccgccgctggtgattgaggatgagtccgatatgctgctggccatcaccgccgccgggcggatgctgatgttcccggtcagcgatctgccgcagctgtcgaaaggcaagggcaacaaaattatcagcattccggcggcggaagccgcagccggccaggacggtctggcacatctgtttgttctgccgccgcagagtacgctgaccattcacgtcggcaaacggaagatcaaactgcgtccggaagagctgcaaaaagtcaccggcgagcgcggccgccgcggttcgctgatgcgcgggctgcagaaaattgaccgcgtggaaattgactcgccgcgtcgtgccgcggcaggcgatagcgaagagtaa

SEQ ID NO: 136639 - DNA, 738 bp, Enterobacter cloacae
atgctattcatttttcgagtaattttcgtggtcatttattgcatcgtagtgtgcgtacttggctgtctgtactgcttgttcagcccacgtaatccaaaacacgttgccactttcggccatctgtttggccgtttatctccggtatttggcctcaaggtagagctacgcaaacccgccgacgcggaaagctatggcaacgcgatctacatcgctaaccaccagaacaactatgatatggtgacggcgtcgaatatcgtgcaggctccgacggtcaccgtaggtaaaaagagcctgctatggatcccgttctttggccaactgtactggctgacgggcaatttgctgattgaccgtaataaccgaaccaaagcgcacggcactattgccgaagtcgtcaacgcttttaaaaagcgtaaaatttcgttctggatgttcccggaagggacccgtagccgcggccgcggcctgctgccgtttaaaaccggggcttttcacgcggctattgccgccggggtgccgattattccggtgtgtgtctcgaatacatcgaataaaataaagctcaatcgctggaacaacggtctggtgattgtggaaatgctgccgccggtagataccacgcagtttggtaaagacaacgtgcgcgcgctggcgacgcattgccgcgagctgatggccgccaaaatcgctgatctggacaacgaagtggccgagcgcgaagcggctggaaagcaataa

SEQ ID NO: 136640 - DNA, 1413 bp, Enterobacter cloacae
atgtcactcagtcggcgtcagtttattaaggcttccggcgtagcgctgtgcgctggcgccgcgccgctgaaggcccatgccgccggccagcagcctgcgctgccggttccgccgctgctggaatctcgtcgcggccagccgctgtttctgacgctgcagcgttcccactggtcgtttacccccggcacccgcgcccccgtctgggggatcaatggccgctatatggggccgacgatccgcgtctggaacggagacgacgtcaagcttatctacagcaaccgcctgacggagaacgtggcgatgaccatccgcggtctgcaggtgcctggcccgctgattggcggcgcggcgcgcatgatgtcgccgaacgccgactgggcgccggtgctgcctatccgccagagcgcggcgacgctgtggtatcaggccaacacgccgaaccggatggcgaaacaggtttacaacggtctggcgggcatgtggctggtggaagacgaggtcagcaagaacctgccgatccctaaccactatggcgtcgatgacttcccggtgattattcaggataaacggctggataacttcggcacgccggaatatagcgaaccgggcagcggcggctttgtgggcgacacgctgctggttaacggcgtgcagagcccgtatgttgaagtgtcgcgcggctgggtgcgcctgcgcctgctgaacgcttccaactcccggcgctatcagctgcagatgagcgatggccgactgctgcatgtgatttccggcgatcagggattcctgccggcgccggtttcgctcaagcagctatcgctggccccgggggagcggcgtgaaattctggtcgatatgactaacggcgatgaagtgtccattacctgcggcgaagcggcgagcatcgtcgaccgtatccgcggtttttttgaaccgtcaagcatcctggtctccacgctggtgctgacgctgcgtccgaccgggctgctgccgctggtgaccgacagtctgccggtgcgcctgctgccgaccgagctgctctccggtacgccgatccgcagccgggatatcacccttggcgacgatccgggcatcaacggccagctgtgggatccgcagcgtatcgatatcacggcgcagcaggggacctgggagcgctggacggtgcgcgccgaccgcccgcagtcgttccatattgaaggggtgatgttccagatccgtaatgtcaacggctcgtctcctttcccggaagatcgcggctggaaggacaccgtgtgggtcgacgggcaggttgagctgctggtctattacgctcaaccgtcgtggccgcacttcccgttccagtatctgagtcagacgctggagcttgccgatcgcggctcgatcggccagatgctggtgaatcccgctccgtaa

SEQ ID NO: 136641 - DNA, 2184 bp, Enterobacter cloacae
atgagcgcaatatccctgatccaaccggatcgtgaccttttttcctggccgcaatactgggctgcctgttttggccctgcgccctttttaccgatgtcgcgtgaagagatggatcaacttggctgggatagctgcgacattattctggtcaccggcgacgcctatgtcgaccacccgagcttcgggatggctatctgcggccgcatgctggaagcgcagggtttccgggtagggatcatctcccagccggactggaacagcaaagacgactttatgcgtctgggcaaaccgaacctgttcttcggcgtgaccgccggcaacatggactcaatgatcaaccgttacaccgccgaccgtaaactacgtcatgacgatgcctatacggcgggtaacgtggcgggcaaacgtccggaccgcgctaccctcgtctacacccagcgctgtaaagaggcgtggaaagatgtgccggtgatcctcggcggcatcgaagccagcctgcgtcgtaccgcccactatgattactggtccgacaccgtgcgccgctcggtgctggtggactccaaggccgatatgctaatgttcggcaacggcgagcgtccgctggtggaagtggctcatcgcctggcgatgggcgaaaccatcgaccagatccgcgatgtgcgcaataccgccatcatggtgaaagaggcgctgcccggctggagcggcgtggactccacccgtctggatacgcccggtaaaattgaccccatcccgcatccgtacggtgaagatctgccgtgcgccgataacaaaccggtcgcgccgaaaaaacaggaagcgaaaagcattactgtgcaaccgccgcggcccaaaccgtgggaaaaaacctatgtgctgctgccttccttcgagaaggtgaaaggcgataaggtcctgtacgctcacgcctcgcgcattttgcaccacgaaaccaaccccggctgcgcccgggcgctgatgcaaaagcacggcgagcgctacatctggatcaacccgccggcaatcccgctctccactgaagagatggacagcgtcttcgcgctgccgtacaagcgggtgccgcatccttcctatggcgatgcgcgtattccggcgtatgagatgatccgcttctcaatcaacatcatgcgcggctgcttcggcggctgttcgttctgctcgatcaccgagcacgaaggacgcataatccagagccgttctgaggattcgatcattaatgagatcgaagccattcgcgacaccgtgcccggctttaccggggtgatctccgatctcggcgggccaacagccaacatgtatatgctgcgctgtaaatcgccgcgcgctgagcagacctgccgccgtctctcctgcgtctatccggatatttgcccgcacatggataccaaccatgagccgacgatcaatctttatcgccgcgctcgtgagctgaagggcatcaagaagatccttatcgcctccggggtacgctatgacatcgcggtcgaagatccgcgctatatcaaagagctggcgacccaccacgtcggcggctatctgaagatcgccccggagcataccgaagagggaccgctgtcgaagatgatgaagccgggaatgggcagctacgaccgctttaaagagctgttcgacacctattcgaagcaggcgggtaaagagcagtatctgatcccgtactttatctccgctcatccggggacccgtgatgaagatatggtgaacctggcgctgtggctgaagaagcatcgcttccgtctcgaccaggtgcagaacttctatccgtcgccgctggcgaactcgaccaccatgtattacaccggcaagaacccgctgggtaaaattggttataagagcgaagaggtggtggtgccgaagggcgataaacagcgccgtctgcacaaagcgctgctccgctaccacgatccggcaaactggccgctgatccgtcaggcgctggaggcgatgggcaagaagcacctgattggctcccgccgcgactgcctggtgccagcgccaaccctggacgaaatgcgtgaagcgcgtcgccagaaccgccatactcgtccggcgctgaccaagcacacgccgatcgcccatcaacgccagacgcctgccgctgcgggcgcgaaaaaacgcgttaagccgaaggccgtatcacgctaa

SEQ ID NO: 136642 - DNA, 528 bp, Enterobacter cloacae
atgacgccggtcatcctgtcgcgacaacaactggaccagctctgggagatagaccgcagcgaaattatcgatacgctctaccgtctcgataacggtcagctgcgggcttatcgggaatattatgacgtgcgtggctgggaccctcacgatcgtcaggtttatactccgattcacgaggcctgttacgatcgcggcggtatttttttcgccttttttgacgatgagcagatgattgccgcagcggcgctggatacgctgcctcgcggcatgaatggcgagctgcgccagctattattcttttatgtcggggcgggaacacgcggccagggctgggggcggcgactgtttcagtatgccctgcaccagctgccagaaatgggggcgtccggcctctatatctcgtcgatccccaacaaaaacaccgtcgatttttatctggctcagggatgtcgcttagcggataagcccgacccggcgctgtttgcgctggagccagaggatattcatctggtctgccatcgcctttaa

SEQ ID NO: 136643 - DNA, 828 bp, Enterobacter cloacae
atgacacatccaaccgttataaaactgcacgacggcaacctgatgccgcagctgggtctcggcgtgtggaaagctggcaacgaggaagtcgtctccgccattcataaggcgctggaagtcggttatcgctcttttgacaccgccgccgcgtaccaaaatgagaccggcgtcggcaatgcgctgcacagcgctggcgtcaaccgcgatgagctcttcatcaccactaagctgtggaacgacgatcaaaaacggccgcacgaggcgctgaaagagagcctcagcaaactgaagctggactatgtggatctctatttaatccactggccggtaccggctatcggccattacgtcgaggcctggcaggcgttgatcgagctgcagcagcaggggctgaccaaaagcattggcgtgtgtaatttccaggtaccgcatctgcagaagctgattgatgaaaccggcgtcgccccggtgatcaatcagatagaactccatccacttatgcagcagcgtcagctgcacgcgtggaacgccacccacaagatccagaccgaatcctggagcccgctggcccagggcggcgaaggcgtcttcgatcaaaaagtcatccaccagctcgccgataagtacggcaaaacgccggcgcaaatcgtcatccgctggcatctcgacagcggtctggtggtgatcccgaaatccgtcacgccgtcgcgtattgcggaaaactttgacgtctgggacttccgtctcgacaaagatgagctgggagcgatcgcgaagctggaccagggtaaacgtctcggtcctgacccggatcagtttggcgggtaa

SEQ ID NO: 136644 - DNA, 1164 bp, Enterobacter cloacae
atgaataatttcgacctgcataccccaacccgcattctgtttggcaaaggcgcgattgaaaagctgcgtgaacagatcccggcggaagcccgcgtactgatcacctacggcggcggcagcgtcaaaaaaacaggcgtcctggatcaggtcctcaccgctctgaatggcctggatgtccttgaatttggcggcatcgagccgaacccgtcttacgaaaccctgatgaatgcggtgaaactcgcccgggaagagaaagtgaccttcctgctggcggtcggcggcggttcggtgctggatggcaccaagtttatcgctgcagcagcccactacgacgcggatatcgatccgtgggaaattctggaaacctatggcagcaaaattgccagcgccattccaatgggctcggtactgactctgccggcgaccggttctgaatccaacaaaggcgcggtcatatcgcggaaaaccaccggcgacaaacgcgcgtttatgtcttcgcacgtccagccgcagttcgcgatcctcgatccggtttatacctataccctgccgccgcgccaggtcgcgaacggcgtggttgacgccttcgtccataccgtcgagcagtacgtgacctacccggtagacggcaaaatccaggaccgtttcgccgaaggcattctcctgaccctgatcgaggatggcccgaaagccctgcaggaaccggagaactataacgtgcgcgccaatattatgtgggcggcgacgcaggcgctgaacggcctgatcggcgcaggcgtgccacaggactgggcgacgcatatgctcggccacgagctgacggcgatgcacggcctggatcacgcccagacgctggctatcgtgctgccggcgctgtggaatgagaaacgcgatgccaagcgcgagaagctgctgcagtatgccgagcgcgtgtggaatattaccgaaggctctgacgaccaacgtatcgatgccgccatcgccgcaacgcgtcagttcttcgagcagatgggcgtgccgacccgcctttccgattacggtctcgacggtagctccatcccggcgctgctggcgaaactggaagagcacggcatgactaaactgggcgaacatcaggatatcaccctggacgtcagccgccgtatttacgaggctgcacgctaa

SEQ ID NO: 136645 - DNA, 900 bp, Enterobacter cloacae
atgcaacacgcagagatatgtcggacattaacggagaagattaacctgctgaaagataagcacgaaatgttaagttcgttgctgcctgacgtccgtttgctgtacggaacgcaaccggggccccggacgccggtgatgtatcagccggggatcgtttttctcttttcgggccataaaattggttatatcaatgaacggacttttcgctacgatacaaacgaatatttactgctgaccgtgccgctacctttcgagtgcgaaacctttgccaccccggaggtgcccctcgccgggatgcgcctgaacgtcgatatcctgcaactgcaagagctgctgatggatattggcgaagatccgctgtttcagcccgcggtcgcctccagcgggataaactccgcggtactctcggaggatattctgtgcgctgccgaacggctgcttgacgtgatggagcggccgctggacgcacggatccttggcaagcaaatcgtccgcgaaattctgtattatgtgctgacggggccctgcggcggcgcgctgttggcgctggtcagccggcagacccacttcagcctgataagtcgcgtgctcaagcatatcgaaagccagtacaccgaaaacctcagcgtcgatcggctggcggcggaagcgaatatgagtgtgtcagcgtttcaccataattttaaagcggtgaccagcacttctcctttgcagtatctgaaaaactaccgtttgcacaaagcacgaatgctgatgatccatgacggcatgaaggccagcgcggcggcgatgcgcgtgggatatgaaagcccttcgcagttcagccgcgagtttaagcgctacttcggtttgacgccgggagaagacgccgcgcgtattcgcacgatgcaggggatgtaa

SEQ ID NO: 136646 - DNA, 312 bp, Enterobacter cloacae
atgtttgaccgccacggcctgctggcgctgctcgcgggccgttttctggcgtttgtccgcaccctgctgccaaccatggccgggatttcaggcctgccgaaccgccgcttccagttcttcaactggctgagcgccctgctgtgggtctgtgtggtgacgggtcttggctatgcgctgagcatgatcccgtttgtgaagcgccatgaagatcaggtgatgacctgtctgatgatcctgccgattgccctgctgctggctggcctgctcggcacgctgttcgtggtcattaaaaagaaatattgcagcgcctga

SEQ ID NO: 136647 - DNA, 363 bp, Enterobacter cloacae
  misc_feature (339)..(348): n is a, c, g, or t
atggttgtcattcaagagattgtcgccgcgctgtggcaacatgattttgccgcattggcgaaccctcacgttgtgggcgttgtatatctggttatgttcgcgaccctgtttctggaaaacgggctgctgcccgcctcctttttaccgggagacagcctgctgctgctcgccggcgcgctgattgctaaaggcgtcatggactttgtgcccactatcgccattctgaccgccgccgccagcctcggctgctggctgagctatgtgcaagggcgctggctgggcaatacgcaaacggtgaaaggctggctggcgcatctgccgcatacgtaccatcagcgnnnnnnnnnncacctgcatgtttga

SEQ ID NO: 136648 - DNA, 1188 bp, Enterobacter cloacae
atggctgataaacatcttgataccgcgctggtcaacgccgggcggagcaaaaagtacacccagggctcagtgaacagcgttatccagcgcgcgtcatcgctggttttcgacaccgtcgaggccaaaaagcacgccacccgcaatcgggccaacggcgagctgttctacggtcgtcgcggcaccctgacccatttctcgctgcaggaagcgatgtgcgagctggaaggcggcgccggctgcgccctcttcccctgcggcgccgcggcggtggctaacactatcctggcgtttgtcgagcaaggcgaccatgtgctgatgaccaataccgcctatgagccaagccaggacttttgtaccaaaattctcgccaaactcggcgtcaccaccagctggttcgatcccttaatcggcgccgatatcgcccgtctggttcgccctgagacccgcgtggtgttcctcgaatcgcccggctcgatcaccatggaagtgcacgatgtgccggcgatagtcgccgccgtgcgtcaggtcgccccggaagcgattatcatgatcgataacacctgggcggcggggatcctgtttaaagccctggattttggcattgatatttccattcaggcaggcaccaaatacctgatcggccattccgacgccatggtgggcaccgcggtggcgaacgcgcgctgctggccgcagctgcgtgaaaatgcctacctgatggggcaaatgctggacgccgatactgcctatatgaccagccgcggcctgcgcaccctgggcgtgcgcctgcgtcagcatcatgaaagcagcctgcgcatcgccgagtggctggcgcagcacccgcaggtggcgcgggtaaaccaccccgccctgcccggcagtaaaggtcatgagttctggaaacgtgatttcaccggcagcagcgggctattctcgtttgtgctcagcaagcgcctcaatgatgccgaactggcggagtacctcgacaatttcagcctgttcagtatggcctattcgtggggcggctttgagtcgctgattctcgccaaccagccggagcaaatcgcccacattcgaccggatgctgaagtcgacttcagcggcacgctgatccgcctgcacattggtctcgaaaatgttgacgatctgcaggcggatttagcagcgggcttcgcgcgtatcgtgtaa

SEQ ID NO: 136649 - DNA, 216 bp, Enterobacter cloacae
atgaatctgcttttctgtaccagcgcaccgccgatacaggcgaaaattttacccggcccgcggttagccgcttttttactgcgtaagcgcaaggaaaataaacgtgatttgctgcacagtgtaaatactaatgagaaccactatcaattcgatgtcgttttgatattattgtgggcagattttgtgattatcgtcgtggagatagagcgtgggtaa

SEQ ID NO: 136650 - DNA, 732 bp, Enterobacter cloacae
gtgggtaataatttgatgcaggcggatctctccgtttggggtatgtatcatcatgccgatattgtcgttaaggtggtgatgattggcctgattctggcgtcggtcgtcacatgggccattttcttcggtaaaggggcggaaatcctcgccagcaagcgtcgcctcaaacgtgaacagcagcagctggcggaagcccgctctctcgatcaggccagcgatatcgccagcgcctttgaggcgaaaagcctcaccacccagcttatcaatgaagcgcagaacgaactcgaactctctgccggtgccgaagacaatgaaggcatcaaggaacgaaccggttttcgccttgagcgccgcgttgcggcggttggtcgccatatggggcgcggtaacggctatctggcgaccatcggcgccatttccccgtttgtgggtctgtttggtaccgtctggggcatcatgaacagctttatcggcatcgcccagacccagaccaccaatcttgcggtggtagcgccgggcatcgcagaagcgctgctggcgacggccatcggcctgttcgccgccatcccggcggtggtcatctataacatcttcgcccgcatgatcggcagctacaaggcctcgctcggcgatgtcgccgctcaggtactcctgctgcaaagccgcgatctggacctcagcgccagcggcgtgaagccggtgcgcagcgcgcagaaattacgggtaggttga

SEQ ID NO: 136651 - DNA, 1341 bp, Enterobacter cloacae
atggaattcgcgatacaactcattattatattaatttgtctgttttatggtgcccgaaaaggaggtattgcgctggggctgctgggcggcatcggtttggtgatcctcgtctttgtttttcatctccagccgggcaaaccgccggttgatgtgatgctggtgattattgcagtggtagccgcctcggcgactctgcaggcgtccggcgggttagacgtgatgctgcagattgccgagaagttgctgcggcgtaacccgaaatatgtttctatcgtggcgcctttcgtcacctgcacgctgaccatcctctgcggtaccggccacgtggtgtataccatcctgccgattatctacgatgtggcgattaagaataacattcgtccggagcgtccgatggcggccagctccattggcgctcagatggggatcatcgccagcccggtctcggtggcggtggtatcgctggtggcgatgctgggaaattttacctttaacgggaaacacctggagtttctcgatctgctggcgataaccattccgtccacgctgctgggtattttagccatcggtatcttcagctggttccgcggcaaagacctggatcaggacgaagccttccaggcgtttattgcgctcccggagaaccgccattacgtctatggcgatacggcgacgctgctggacaaaaagctgccgaccagcaactggatagcaatgtggatttttctggcctctatcgccgtggtggcgctgcttggcgctttttctgaactgcgcccggcctttgacggtaaaccactgtcgatggtgctggttatccagatgtttatgctgctctccggagcgctgatcatcatcattacaaaaactaacccggcatcgatttccaaaaatgaggtctttcgttcgggaatgatcgctatcgtcgcggtgtacggcatcgcgtggatggcggagaccatgtttggcgcgcacatgaccgagattaaaggcgtgcttggtgagatggtaaaagaatatccgtgggcttatgctatcgtgctgctactggtttcgaaatttgtgaactcccaggcggcagcgctggcggcgattgtgccagtagccctggccatcggcgtcgacccggcctatatcgtggcttctgcgccggcctgctatggctattatattctgccgacctacccaagcgatctggcggcgatccagtttgatcgctcagggaccacccatatcggccgctttgtgattaaccacagctttatcctgcccgggctcatcggcgtcggcgtctcctgcgtgtttggctggatattcgcggcgatgtacggctttctgtaa

SEQ ID NO: 136652 - DNA, 318 bp, Enterobacter cloacae
atggaagatttagaaacgatcatcatggagctgctggttaacgcgggttccgcacgtagcgcggcgctgacggcgctacagctggcgcgcaaaggcgattttgtcgccgcggagcaggccatggctgaatcccatgagttcgtcaaacatgcgcataaaattcagacccagcttatcggcatggatgaaggcagcggtaaattgccggtcaacctgatcaccgtgcattcccaggaccatctgatgaacgctatggtcattcaggatctggcgaccgacatgattgaactctatcgtcgtctgcccctcgcgcaataa

SEQ ID NO: 136653 - DNA, 306 bp, Enterobacter cloacae
atgaagaatatcgttttgtgctgtgccgccggtatgtctaccagcatgctagttcagcgtatgcaagatgccgcgcagaagaagggtgttgaggtctcgatcaaggccgtaccggtcgctgagtttaaagataatctggccgccgccgacattattttgctcggcccgcaggtgaaatatgagcaggcgaagctgcaggcgctggccgacccgttcggcaagaaggtcgccgtgatcgatatgatggactacggcatgatgaaaggtgatgccgttctggataaagcccttaagatgctggagtaa

SEQ ID NO: 136654 - DNA, 1533 bp, Enterobacter cloacae
atggctctacacaacagaaagctctcttttacgacgccgatcgtcgtggggtttgccggtattttgctcagttttatgctgatcgctatttttgtgacactggcgcaacagaaagattttctcgaagattatcacgatattaaccgcaattttacccataacctggcgatcaactatacggaaaccctgctgcgggaaaatgattttatcctcgggcgcgcagccgccttctttgcccgcaatgacgaactgaatcgcgcagtcaatgtggagccggagaaagggttaaccacgctgatgcagttacagaacatgatgccaagcgtctcatccatctcgctggcggataccgagggccactatctgcgcgccccggaggtgctggaaaacgaagacagccgggctttcgatcccagaacgcggccctggtttatcaaacaggcggaagccagcaccttcagccactacaccagtccgtatatggattatttcacccaccatccgacgattaccattttcaaacccatcattaccccggaagggaaactcaagggcagcctggcctttcatctcgatctcacctccatggggttcgcgctgcgccagatggtggcgcccgtacagggggaattttttgtggtgcaacgggatggcaaagtggtcctgcactccgacccgggcgcgctgtttaaacccttcgtcagggacgagctgatggataaaatgaccagcggagaggggcagctttacgatcccgggagcgacacctggtattactattactcctttaccaatcccgactggtttgtgattttccgtgtcgataacgccaccctggtcaatctgacacgtcatgagaccaatttagtgatcggcggtttcactctcgcagcgatcattattatcctgttcggtctttatctgcgtcatgcttcccgtaccgtgctgatgaatatcatcaatgcgattaaaaccggtgacgtcaaacgcgccccgcgccttgaggcgatgctgagtaaagcgattgaaactaataaacagcgcgaactgtcctacgtccgccaggcgaccatcgacgctctcaccggctgcaaaaaccgccgcgccttcgacagcgatattgccgccctgatgaacgatcaccagccgttcgccctcgcgctggtcgatatcgataactttaaatcgatcaacgacacctggggccatctcaatggcgatatcgtcctgcgtaacgtcgctcgcgaagggctacaggtcctccagccgctggagatatccctctatcgctacggcggcgaagagttcgcggtggtctttcctgccgaacatatcgataacgcccgcacgctgctggaaacatggcggataaacgtcgaacgacgcacctggcgcgaagatggcctgacggtcaccttcagcgccggacttggggaatggaatatggagccactggataagctggtggtgagcgtcgatgaagcgctgtacaaagccaaacagcagggtaaaaaccgtatcctgcgcgcgtaa

SEQ ID NO: 136655 - DNA, 1134 bp, Enterobacter cloacae
atgaaaacctttagcgatcgctggcggcagctggagtgggacgatatccgcctgcgcatcaacagcaaaaccgccgccgacgtcgaacgggcgctggcggccaaacagctcacccgcgacgatatgatggccctgctctcgcctgccgcggccaattaccttgaaccgctggcccagcgtgcgcagcgcctcacccgccagcgcttcggcaataccgtcagcttctacgtgccgctgtatctctccaacctgtgcgctaacgactgcacctactgcggcttctcgatgagcaaccgcattaagcgcaagacgctggatgccgccgagattgcccgcgagtgcgccgcgatccgcaacctgggctttgagcatctgctgctggtgaccggcgaacatcagggtaaggtgggaatggattatttccgtcggcacctaccggctatccgcagccagtttgcctcgctgcatatggaggtgcagccgctggcgactgaagagtatgccgagctgaaaaccctggggctcgacggggtgatggtctatcaggagacctatcatgaaagcatgtacgcccaacaccatctgaaaggaaaaaagcaggatttcttctggcggctggatacgccggatcgcttaggcgcggcggggatcgataagatcggccttggcgcgctcatcggcctttccgacagctggcgagtggactgctttatagtcgctgagcacctgctgtggctgcagcagcgctactggcgcagccgctattcggtctccttcccgcgcctgcgtccctgcgccggcggtattgaaccggcttcgctgatggatgagcgccagctagtgcaaactatctgcgccttccgcctgctggcgccagaggttgagctgtcgctatccacccgcgaatccccctggttccgcgaccgggtgatcccgctggcgatcaataacgtcagcgccttctctaaaacccagcccggcggctacgccgacgatcatccggagctcgagcaatttgccccgcacgacgatcgccgccctgaagaggtcgccagcgcgctggccgcccgcggcctgcagccggtatggaaagactgggatagctggctgggacgcgcttcgcaaacctcatga

SEQ ID NO: 136656 - DNA, 771 bp, Enterobacter cloacae
atgttacgtattgcagacaaaacgtttgaatcccatcttttcaccggtaccggcaaattcgccgccccggaggtgatggtcgaggcgattcgcgcctcgggcagccagctggtaaccctggcgatgaagcgcgtcgatttacgccagcgcaatgacgccatcctcgccccgctgctggcggcgggagtcagcctgctgccgaatacctcgggcgccaagacggcggaagaggcggtgtttgccgcccgtctggcgcgggaagccctgggtacccactggctgaagctggagatccacccggacgcccgctggctgctgcccgacccgattgaaaccctgaaagcggcggagctgctggtccgcgaagggttcgtggtgctgccctactgcggcgccgatccggtgctgtgtaaacgactggaagaggtgggctgcgcggcggtgatgccgctgggtgcgccgatcggctccaatcaggggctggaaaccaaagccatgctggagattattatcgagcaggcgacggtcccggtggtggtcgacgccgggatcggcgtcccgagccatgcggcgcaggcgctggagatgggcgcggacgcggtgctggtcaataccgccattgccgtcgccgacgaccccgtggccatggcccgcgccttccgtatggcgatcgatgccggattactggcgcgtcaggccggaccgggggcacgcagtacgcaggcgcaggccaccagcccgctcaccggattcctggaggcgctggcatga

SEQ ID NO: 136657 - DNA, 201 bp, Enterobacter cloacae
atgcagatctggtttaacgacgagccgctggcgtgcgccgacaatctcagcgtcagcgccctgctgacccagctcgaacagcagcagcctggcgttgcgctggcgctcaatcaacacatcctgccgcgcgaccggtgggaagatcatctcttgcaggaaggcgatcgggtcctgctttttcaggttatcgctggaggctga

SEQ ID NO: 136658 - DNA, 756 bp, Enterobacter cloacae
atgaatgatcacgactttatgcgctatagccgccagctgctgctggaggatattgccatcgaagggcagcagaagctgttagccagtcgagtgctgattatcggccttggcgggctgggctccccggcggcgctctatctggccggggctggcgtcgggacgctgaccctggccgatgacgacgcggtgcatctcagcaatctgcaacggcagatcttgttcaccagcgcggatatcgatcggccaaaagccgcagcggcacagacccggctcagccagctaaacccgcagatcaaactggtagcgctccagcagcgcttaagcggcgaggcgctccgcgccgaagtggcgaaagcggacgtggtgctggactgtaccgataatatggtcacccgccaggcgatcaatgccgcctgtgtggccctcgataccccgttagtaaccgccagcgccgtgggcttcggcggtcagctgatggtgctcaccccgccctggacgcagggctgctatcgctgcctgtggccggaaagcgatgaaccgcagcgcaactgccgcaccgcggggatcgtcggcccggtggtcggcatgatgggcaccctgcaggcgctggagacaattaagctgctcagcggcatggcgacgccgcgcaacaccctgcggctgttcgacgcccgcaccagcaactggcgcgcccttgcgctacagcgttcccggagctgcccggtgtgcggagggcggcatgcagatctggtttaa

SEQ ID NO: 136659 - DNA, 636 bp, Enterobacter cloacae
atgtatcaacctgattttccacccgtcccgtttcgtctcggactctacccggtggtggacagcgtggcgtggattgagcgcctgctcgaagctggggtacgtacccttcagttacgcatcaaagaccggcgcgacagcgaagttgaggatgacgtgatcgccgccatcgcccttggtcgccgctatcacgcccgactgttcattaacgattactggcaactggcgattaagcaccaggcctatggcgtgcatctcggacaagaagatctggaaaccaccgatctgagcgctatccgccaggccgggctgcgtcttggcgtctctactcacgatgatatggaaattgatgtcgcccttgcggcgcgcccctcttacatcgcgctaggtcacgtcttcccgacgcaaaccaaacagatgccttccgcgccgcagggcctcgagcagcttgccagacatattcaacgcctggcggattaccccaccgtggcgatcggcggaattagcctggaaaaggcgccgggggtactggcgaccggcgtcggcagcatcgcggtggtcagcgccatcacccaggcggcggactggcgggcagcgaccgaccaactgctggcgctggcgggagcgggcgatgaatga

SEQ ID NO: 136660 - DNA, 1896 bp, Enterobacter cloacae
atgtctactaccaaactaacccgtcgggaacaacgcgagcacgcgcagcaattcattgatacgctggcgggtaccgcttttcctaattcacgccgcatctatgttcacggctcacaagcggatatccgcgtcccgatgcgtgaaattcagctcagcccaactctcgtcggcggcgataaagataacccccggtacgaaaccaacgaaccgatcccggtgtatgacacctccgggccgtatggcgacccggatattagcattgatgtccgccaggggctggcaaagctgcgccagccgtggatcgacgcgcgtaacgactgcgcgccgctcagcgaacgcagctcggcctataccaaagcgcggctggccgacgacggtctcgatgagctgcgcttcagcggcctgctgacgcccaaacgcgccgtcgttggcaaatgcgttacccagctgcactacgcccgccaggggatagtcaccccggagatggagttcatcgccattcgcgaaaacatgggtcgcgaacgtatccgcagcgaggttctgcgccagcagcacgcaggtgaaggcttcggcgcccacctaccggaaaacatcacccccgagttcgttcgcgatgaagtggccgccggacgcgccatcatccccgccaacatcaaccacccggagtctgaaccgatgattatcggccgcaacttcctggtgaaagtgaatgccaatatcggcaactcggcggtgacctcttccatcgaagaagaggtcgagaaactggtttggtcaacccgctggggcgccgacacggtgatggacctctccaccggccgctatatccacgaaacccgcgagtggatcctgcgcaacagcccggtgccgattggtaccgtgccgatttaccaggcgctggagaaggtcaacggcatcgccgagaatctcacctggcaagtcttccgcgataccctgctggaacaggccgagcaaggcgtcgactacttcacgattcacgccggcgtactgttgcgctacgtcccgatgacggcgaagcgcctgaccggtatcgtctcgcgcggcggctcaatcatggctaagtggtgcctgtcgcatcatcaggaaaacttcctctaccagcatttccgcgaaatctgcgaaatctgcgccgcctatgacgtgtcgctgtcgctgggcgatggcctgcgccccggctccattcaggatgccaacgatgaggcgcagttttccgagctgcgcaccctcggcgaactgacgaaaatcgcctgggaatatgacgtgcaggtgatgattgaaggccctggccacgtgccgatgcagatgatccgccgcaatatgaccgaacagctggagcactgccacgaagcgccattctacaccctggggccgctcaccactgacatcgcgccgggctacgaccatttcacctccggtatcggcgcggcaatgatcggctggttcggctgcgccatgctgtgctatgtcacgccgaaagagcatctcggcctgcccaacaaagaggatgtcaaacaggggctgattacctacaaaatcgccgcccacgccgccgacctcgcgaaaggccaccccggggcgcagatccgcgacaacgcgatgtcaaaagcgcgttttgaattccgctgggaagaccagttcaacctcgcgctcgacccgttcaccgcgcgggcctatcacgatgaaaccctgccgcaggagtccggcaaagtcgcccacttctgctccatgtgcgggccgaaattctgttcgatgaaaatcactcaggaggtccgcgactacgccgcgaagcaaagtatcgaagccggcatggccgatatgtcgaataacttccgcgcccgcggcggcgaaatctacctgaaacaggaggaagcctga

SEQ ID NO: 136661 - DNA, 498 bp, Enterobacter cloacae
atgctaaaccagctggaaaatctgacggagcgcgttggcggtagtaatgaactggtcgatcgctggctacaagtgcgtaagcatctgctcgtggcttactacaacctggttggcctgaaaccgggcaaagagtcgtttatgcggctaaacgaaaaggcgctggatgacttttgccaaagtctggtggattacctctcatccggtcattttagtatttatgaacgcattattggcgaaatggaaggcgatacccctcttttagccgccacccggctttacccgcagctggaagccaatacccagcagatgatggactactacgatacctgcctcgaaaacgccatcgatcacgataactatcttgaatttcagcaggcgctgtcggatatcggcgagtcgctggaggcgcgtttcgcgctggaagataaactgatcgccctggctgtcgcccataacctgagcaatgacgtgcgcgataatattgcgccgaccgcttga

SEQ ID NO: 136662 - DNA, 774 bp, Enterobacter cloacae
atggatcgtattattgaaaaattagatcgcggctggtgggttgtcagtcacgaacaaaaattatggttgcctggtggagaattaccacatggcgaagcggttaatttcgatcttgtcggccagcatgcgctgcatattggcgagtggcagggcgagtccgtgtggatggtgcgccaggatcgtcgccatgacatgggatcgttgcgccaggtgctggatcaggatccgggactcttccagctggctgggcgggggatccagctcgccgaattttatcgctcgcataagttttgcggttactgcggccacccgatgcatgccagcaaaagcgaatgggcgatgctgtgcagccactgccgtgaacgttactacccgcaaattgccccctgcattatcgtggcaatccgtcgcgacgatgcgatcctgctggcgcaacatacgcggcatcgcaacggcgtgcacaccgtgctggccggctttgtcgaggtcggcgaaacccttgagcaggcggtggctcgcgaggtgatggaggagagcggtattcgggtaaaaaatctgcgttacgtgacctctcagccatggccgttcccgcagtcgctgatgaccgcctttatggcggattacgctgatggcgagatcgtggtcgacaaaaaagagttactgaccgcggactggtatcgctatgacgacctgccgcttctgccgccgccggggacagtggcgcggcggcttatcgaagataccgtcgcgatgtgtcgggcagagttcgagtga

SEQ ID NO: 136663 - DNA, 1065 bp, Enterobacter cloacae
atgaccgaactgaagaacgatcgttacctgcgcgcgctgctgcgtcagccggttgatgtcaccccggtgtggatgatgcgccaggcgggccgctatttaccggagtacaaagccacccgtgcgcaagcgggcgactttatgtcgctgtgtaaaaatgccgagctggcctgcgaagtgacgctccagccgctgcgccgttacccgctggacgcggcgatcctcttttcggacatcctgaccatcccggacgccatggggctggggctgtactttgaagctggcgaaggtccgcgcttcacctcgccggtaaaaagtaaagccgacgtcgacaagctgccgatcccggatccggagcaggagctgggctatgtaatgaacgccgtgcgcaccattcgccgcgaactgaaaggcgaagtgccgctgatcggtttttccggtagtccatggacgctggctacgtacatggtggagggcggcagcagcaaggctttcaccgtgattaaaaagatgatgtacgccgagccgcaggcgctgcatgcgctgctggataagctggcgaagagcgtcaccctgtatctcaacgcgcagatcaaagccggcgcgcagtcggtgatgatttttgacacctggggcggggtgctgaccggccgcgactatcagcagttctccctttactacatgcataagatcgtcgatggcctgctgcgggaaaacgaaggccgccgcgtgccggtgaccctgttcaccaaaggcggtggtcagtggctggaagcgatggcggagaccggctgcgatgcgttgggtctcgactggaccaccgatattgctgatgcccgccgtcgcgtgggtaacaaagtagcgctacagggcaatatggatccgtcgatgctctatgcgcccgccccgcgtattgaagaagaagtggcgaccattcttgccggctttggccagggggaaggccacgtctttaaccttgggcacggtattcatcaggacgttgaccccgagcatgcgggcgtctttgttgaggctgtgcaccgtctgtccgcaccctatcaccagtag

SEQ ID NO: 136664 - DNA, 672 bp, Enterobacter cloacae
atggatttagccgcactacgtacccaacagcaacagttagccgcgtcggtagagcgtgcggatcgactggatcgcgacccgccggcgttgatcggcggcgcggacgtcgggtttgagcaggaaggggagatcacccgggctgcgatggtgctgctgacctggcctgagcttgagctggtggagtatcaggtggcgcgggtcgccacctctatgccctatattcccggctttctctcgtttcgcgaaacgcctgcgctgctggcggcgtgggagcagctttcgcaaaaaccggacctgctcttcgttgacggacacggcatttctcatccccggagattgggcgtcgccagccattttggcctgatgattgatgtgccgactatcggagtggcgaaaaaacgcctgtgcggcaaaatcggcgacctgggtgatgagcctggcgcgctggccccgctgatggataaaaatgagcaactggcctgggtctggcgcagcaaagtgcgctgcaacccgctgtttattagcaccggccaccgggtaggcatggacagcgctttaatgtgggttgagcgctgcatgcgaggctaccgtctgcccgagccgacgcgctgggccgatgcggtggcgtcccgtcgtccgtcgtttgtgcgttggcaagcaaatcacagctga

SEQ ID NO: 136665 - DNA, 591 bp, Enterobacter cloacae
atgttacaaaacccgattcacctgcgcctggagaagctggaaagctggcagcatgtcacttttatggcctgcctgtgcgaacgtatgtatcccaactacgcgatgttctgcaagcaaaccgagtttggcgacggcctgctttatcgtcgtatcctggacctgatctgggaaacgctgacggttaaagatgcgaaggtgaatttcgacagccagctggagaagctggaagaggcgatcccggcggcagatgatttcgacatgtacggtgtctatccggccatagacgcttgcgtggcgttgagtgaactgattcattctcgtctgagcggcgaaacgctcgagcacgcgatcgaggtgagcaagacctccatcaccaccgtggcgatgctggaaatgacccaggaaggtcgcgaaatgaccgacgaagagttgaaagcgaatccggcggtagagcaggaatgggatattcagtgggaaattttccgcctgctggccgactgtgaagagcgtgatcttgagctgataaaaggcctgcgcgcggacctgcgcgaggctggcgagagcaatattggtataaattttcagcagtga

SEQ ID NO: 136666 - DNA, 273 bp, Enterobacter cloacae
atgaacaagactcaactgattgatgtaattgcggacaaagctaacctgtccaaagcacaggctaaagctgccctggaatctaccctggctgcaattactgagtctctgaaagaaggtgatgctgttcaactggttggtttcggtaccttcaaagtgaaccaccgcgctgagcgtactggccgcaacccgcagaccggtaaagagatcaaaatcgctgcagctaacgtgccggcatttgtttctggcaaagcactgaaagacgcagttaagtaa

SEQ ID NO: 136667 - DNA, 696 bp, Enterobacter cloacae
gtgaacagttttatcgaaggggctattaagccccttttgtctgtctggcgccggcctctggcgctggcgggcatcctgttgctgactgcctgcagccacgacacgtcgctaccgccgtttaccgccagcggatatgcggacaatcagggagcgatgcgcatctggcgtaaagattctggcgatgaagtccatcttctcgccgccttcagcccgtggcgtcacggggacacctcgaccagcgaatatcgctggcagggcgatcaactggcgcttatcgaactcaatgtctatggcaaaccgccggaacatattcgcgcccgtttcgacgcgcagggcgatctgagctttatgcaacgggaagtggacgggcagaagcagcagctctccagcgaccaggtcgcgctatatcgttatcgcgccgaacagatccgccagaccagcgacgccctccgccaggggcgggtcgtcctgcggcagggacgctggaacgctgccacgcataccgtgctgacctgcgaagggcagacggttacgcccgacctcgatagccgggccctggcgcacattgaacgccgccagagccacgcttccgccgcagtgagcattgcctggctggaggcgccggaaggctctcaactgctgctggtcgccaatgaaaacttctgcacctggcagccgacggaaaaaagcttctaa

SEQ ID NO: 136668 - DNA, 438 bp, Enterobacter cloacae
atgaaacggaaccgtaccttacctctcgccctcgttacctttgccgcgctgaccttcgccagcaacgcggcctgggccaaccaccactggggcaacaataacgggatgggcaaccagggctacagtcagctgacccaggagcagcaggctaccgtgcaaaagctgcataacgattactatgcgcaaaccagcgccctgcgccagcagctgcagtccaaacgctatgagtacaatgcgctgctcacggcgcaaaagccggacagcgggaagattgaagctgtcgctcaggagatggaaggcttacgccagaagctggatcagcagcgggtgaagtttgatatcgccttggctgaggcaggcgttccccgcggcgcaggaatgggatatggcggctgtcgcggtagcgccggcggtcatatgggcatgaaccactggtaa

SEQ ID NO: 136669 - DNA, 1395 bp, Enterobacter cloacae
atgaagatcaaatctctctcccgggacgccgccgctggcgcgctgagctggctgctgaccggcacggttgtgctgctggtcatgctgttctccgcgatgatcgtccgcgactacggtcgcgagacgaccgctgcccgacaaaccattgaagagaaagggagcgtgctgatccgcgcgctggagtccggcacgcgcgtcgggatggggatgcgtatgcatcatgcgcagctgcaggccctgctggaagagatggcctggcaaccgggcgtcctgtggttcgcggtgaccgatgaaaacggtaaaattatcgcccatagcgatccgcagcaggtgggtaaaacgctgtatagcccggcgcagatgcgtgcgttagcggttggcgaacaggcccgctggcgccggcttagcgaaccgcagccggcgctggagatctatcgccattttcgcccgcttaatccggcccgcggccaccatatgggaatgatgaaccgcggcaatagcgccctggctcaggccaccgtcccgcaggtgatttttatcgcctttgatagccgcgagctggatgccgcgcaggcccgcgggcagcggaatatggccatcatgctgggtgccgccgcgctggtgatagcggcgacgatcctcgctcagttctggttccgccgctatcgtcgctcgcggaaacagctgctggaggcgatggcccgcaaggaaaagctggtggcgcttggccatctggcggcgggggtcgcgcacgagatccgcaacccgctctcgtcgattaaagggctggcgaaatattttgccgagcgcacgtcgcctggcggcgagtcgcatcagttagcccaggtgatggccaaagaggctgatcgcctgaaccgggtggtcagcgagctgctggagctggtccggcccgcccatctaaactaccagacagtcgatatcaacgcgcttatccgccactcattgcagttggtaagccaggatgcgcagagccgcgggatcgcgctgcaatttactccgcgacctgagttaaccacgatcagcgccgaccccgatcgcctgaatcaggtgctgttgaatctgtacctgaatgcaatgcaggcgattggccgtgacggcgtcattcgcgtaacagcaagcgaagccgatcgtcagcgggtgaaaatcgtcgtcacggatagcggtaaggggatgagcgatgaagagttacaggctatcttcacgccgtatttcaccaccaaggcggacggcaccgggctggggctggccgtagtgcagaatattatcgaacaacatggcgggacgatccgcgccgaaagtcagccgggagctggagcgatatttacgctttggttaccggtggatgctcaacggagggaagatgagcagcgataa

SEQ ID NO: 136670 - DNA, 1332 bp, Enterobacter cloacae
atgagcagcgataaagtacagattctggtcgttgatgatgacatcagccactgcacgatcctgcaggcgctgctgcgcggctggggctatcaggtggggttggctcacaacggcctgcaggcgctggagcagatccatcagcaggtcttcgacctggtgctgtgcgatatccgtatggcggagatggacggtatcgcaacgttaaaagagattaaggcctataacccggcgataccggtgctgatcatgacggcgttttccagcgtcggtacggcggtagaagctattaagtccggggcgctggattatctggttaaaccgctggattttgacaccctgcagcagacgctggttcaggcattggcgcacacccggcagagcgagagcgaccccagcgttgcgacggattcacggtggggcatgattggcgacagcccggcgatgcaggcgcttcttaacgatattacgctggtggccccttcggacgcgacggtgctgatttatggggagtcgggaaccggtaaggagctggtggcgcgcgccatccacgcctacagcgagcgtcgtgacaagccgttggtcacgctcaactgcgcggcgctgaatgagtcactgctggagtcggaactcttcggccatgaaaaaggggcgtttaccggggcggatcggcgacgggaaggacgctttgtcgaagcggatggcggcacgctgtttcttgatgagataggcgatatctcgccagtgatgcaggtccgcttgctgcgggcgattcaggagcgggaggtgcagcgggtcggcagcaaccagacgcttgccgttgatgtgcggcttatcgccgccacccatcgcaaccttgcggaagaggtgagcgccgggcgctttcgccaggatctctattaccgactcaacgtcgtgaccatcgagataccgccgctgcgccggcgacgggaagatattccgcagctggcgcagcattttctcaaacgctataccgaacgcaatcgtaagacggtaaaggggttcacgccacaggcgatggacctgctgatccactacccctggccgggcaatattcgcgagctggaaaacgcggtggagcgggcggtggtgctactgaccggaaactatatctctgagcgagaactgcccctggcgatcgccggtacgccgctgccatcagtcgggagcgaggaggggggaattcagccgttagtggaagtggagaaagaggtgattctggcggcgctggaaaaaacgggcggcaacaaaaccgaagccgcccgtcagttaggcattacgcgcaaaacgctgctggcgaaacttagccgttag

SEQ ID NO: 136671 - DNA, 1296 bp, Enterobacter cloacae
atgaaagtattagtaatcggtaacggcgggcgcgagcacgcgctggcctggaaagcggctcagtcgccgctggttgataccgtctacgtcgcgccgggcaacgccggtaccgccctggagccgtcgctgcaaaacgtcgccatcggcgtcaccgatattccggcgctgcttcgcttcgcgcaggatgagaacatcgatctgaccatcgttggcccggaagcgccgttggtcattggcgtggtcgacgcgttccgtgccgccgggctgaacatcttcgggccaaccgaaggcgccgcgcagctggaaggctcaaaagccttcaccaaagattttctcgcccgtcatcatattccgacggcggaataccagaacttcaccgaagtggagcctgcgctggcttatctgcgcgagaaaggcgcgccgatcgtcatcaaagccgacggtctggcggcgggtaaaggcgttatcgtggcgatgaccctcgaggaagccgaagcggcggtcaaagatatgttggccggcaacgcctttggcgacgcaggccaccgcatcgtgattgaagagttcctcgatggcgaagaggctagctttattgtgatggtcgacggcgagcacgtcctgccgatggccaccagccaggatcacaagcgcgtcggcaacggcgataccggcccgaacaccggcgggatgggggcgtactccccggcgccggtggttactgacgaagtccaccagcgcaccatggagcggattatctggccaaccgtgaaaggcatggccgctgaaggcaacacctataccggtttcctctacgccggtctgatgatcgacaagcagggcaacccgaaggtgattgagttcaactgccgctttggcgacccggaaacccaaccgatcatgctgcgcatgaagtccgacctggtcgagctgtgcctcgccgcctgcgcgggcaagctggacgagaaaacctccgagtgggatgaccgcgcgtcgctgggcgtggtggttgccgccggcggctatccgggcagctacaatacgggcgatgagatctacggcctgccgcagcaggaagtcgcagacggtaaggtcttccacgccggcaccaaactgtctgacgaccagcgcgtggtcaccaacggcgggcgcgtgctgtgcgtcaccgcgctgggtgactccgtagcgcaggcgcagcagcgcgcctatcagctgctgaccgacattcgctgggacggtagttttagccgtagcgatatcggctggcgcgccatcgaacgtgaaaaggctaacggctaa

SEQ ID NO: 136672 - DNA, 1590 bp, Enterobacter cloacae
atgcaacaacgtcgtccagtccgccgcgctctgctcagtgtttctgacaaggccggtatcgtcgaattcgcgcaggcgctttccgctcgtggtgtcgagctgctgtccaccggcggcaccgctcgcctgctggcagataaaggcctgccggttaccgaagtctctgactacaccggtttcccggaaatgatggatggacgcgtgaagaccctgcatccgaaagtacacggcggcatcctcggtcgtcgcggtcaggatgacggtatcatgcagcaacacggtatcgcgcctatcgatatggttgtcgtgaacctttacccgttcgcccagaccgtcgctcgtgaagggtgctcgctggaagacgcggtggaaaacatcgatatcggcggcccgaccatggtgcgctctgcggcgaagaaccataaagatgtcgccatcgtggttaagagcagcgactacgacgccattattaatgagatggacgccaacgaaggttctctcacgctggccacccgcttcgacctcgccattaaagccttcgaacacaccgccgcttacgacagcatgatcgccaactacttcggcagcatggttccggcctatcacggcgaaagcaaagaagccgctggccgcttcccgcgtaccctgaatctgaacttcattaagaagcaggatatgcgctacggcgaaaacagccaccagcaggcggctttctatatagaagagaatgtaaaagaggcctccgtggcgaccgccactcagctgcagggcaaagcgctctcctataacaacattgccgataccgatgcggcgctggagtgtgtaaaagagttcaacgagccggcctgcgttatcgttaagcacgccaacccgtgcggcgttgccgtcagcgactcgattcttgacgcctacgatcgcgcttacaaaaccgacccaacctccgcgttcggcggcatcatcgcctttaaccgcgagctggatgctgaaaccgcgcaggcgatcatctctcgccagttcgtcgaagtgatcatcgcgccgtccgccagcgaagaagcgctgaaaatcaccgccgcgaagcagaacgtccgcgtactgacctgcggccagtgggatactcgcgttgccggcctcgatttcaaacgcgttaacggtggtctgctggttcaggaccgcgatctcggcatggtcaccgcaggtgaactgcgcgtggtcagcaaacgtcagccaaccgagcaggaactgcgcgatgcgctgttctgctggaaagtggcgaaattcgtcaaatccaacgccattgtgtatgccaaagataatatgaccatcggcataggcgccggtcagatgagccgcgtctactcggcgaaaatcgccggaattaaagccggtgatgaaggtctggaagtgaaaggttccgccatggcctctgacgctttcttcccgttccgcgacggcatcgatgccgcagccgcggtaggcatcacctgcgttattcagccgggcggctctatccgtgacgacgaagtgattgccgccgctgacgaacacggcatcgccatgatcttcaccgacatgcgccacttccgccattaa

SEQ ID NO: 136673 - DNA, 204 bp, Enterobacter cloacae
atgaccgctagccccatggatcgccagctatatagaaggagaatcaccggcctggagagaaacataaaaattcgcgagcgttgcgcaaacgttttcgttacaatgccgcgctatgacacggatgcccggttgggtgcgttaggtgagtttttaggcaaaaactcacctaacgctctctgtaatgttcaaatcctggggatttaa

SEQ ID NO: 136674 - DNA, 1233 bp, Enterobacter cloacae
atggaaataaacgctattccccgacgccttgccttcaccgcgggcggtcagcaactcatcaactgggggatctctttttatatgcccggcacctttgccggggctattgccgccgacaaaggatggtccttgccgcagatctatctcggcctgacgcttgcgatgctgatgatggccgctgtctccccgttcgttgccaggctgctggctcgctttggcggaagactggtggtcaccagcggtaccttactgatagccgccagctgcgccatgatggcctggcgcccttcgctggccggctggtacggcgcctggctgctgaccggcatcggcatgcggctctcactgtatgatgcgctgttcgccgcagtggtgaatctgtacggtcagcaggcgcggaaaactatctctcatatcactctcgctggcggtctggcctctgccctcttctggccgctgggcgaggcgttattaaccatcatgccctggcagaatgccctgcggatctatgcgctgtttggcctgctgagcgcatggctgagttatcaactgcctcgccagcggctcagttcagcggcgaaatcaccagcctcgccagcgacagcagagggcgaccggcgtaacggggcgcgttacgcgatctttattgcgctgatcaccttcatctctaacggtacctctacccatctgccggagtttatcagccactttggtctgccggttgccgtcggtatgctgtggggattcggccagaccggcgcccggctgggggaagtgctggccggtccccgggtcacctcactcacgctaacgcgttttactgcgctcgccatgccgctctgttttctccttggattgagcagcacgacctttgccggatgcgcagccgggtttgtgctgggctatggcgcgattaacgggctggtgacgattgtcaaagcgacgctgccgctggcgctgtttagcgcagaaagctacgccagccgcacgggtctcctgctgatccccgggcaactgatggcagctgtttcaccctttgcctacgcatggctgaaccaccggctgggcattatcggcggaatgtgggtgtccaccgggttaacgttgatcgttgccggactggcgctggcgatggtgcgcgaggcgggtaaggcgcaggatgaacgtaatgtagaatatccggcagcggccgttgaccaaccgatagccaaaaacaaccttgctgaagagtaa

SEQ ID NO: 136675 - DNA, 888 bp, Enterobacter cloacae
atgacaacactgaacctgggaaatctggcgaccttccggctggtcgtacagcgcggcagcttttctgccgccgccgacgcgctggggatctcccaacctgccgtcagcctgcaggtacgtcagctggagcagtttttacagaccaggctgctggagcgaaccggacgtgggatcaaggcgacggcggcaggaatggcattgctggcccacagcgagcagatcgatcgggcggtgaatagcgcggtgcagtcggtcagcgcattcagtcaggaggttaatggatcgttgacgctggggacaggcgcgacggcctgcattcatcttcttccaccgctgctgcagcatcttcgtcagcagcacccgctgctgacggtgggggtgaccaccggcaacacgctggatatcgtccgcgcggtggaagaaaaccggctcgatctcgggctggtcacgctgcccgtgcaggggcgcagtctggcggtgactgcgatgttagatgaggagttcgtgaccatctatgccagccgcgagacggagatgccggcggtttatactcccgccgagctgcaggcgcagccgctcattgccttcgaggcgggtagcggcacgcgggatctgattgaccgctggttccgctcggcgggactggcggtgacgccggtaatgcagttggggagcatcgaggcgattaagcgcatggtgcgggcagggctgggctacagcatcgtgccccgcatggcggtggagcgggtggaggatcgcgacggattacgcgtacactcgctggcgccgcggctataccgacagctggcggtagtcatgcgtcaggacaaaattgtgacaaaaggtatcgctgaaatgctgcgcctgctgcataccgtgcgcttataa

SEQ ID NO: 136676 - DNA, 174 bp, Enterobacter cloacae
atgcgtaaacgacatcgatttaaccgtcgcatgacccgtatcgtactgcttatcagctttctcttcttctttggacgctttgtctactcctccatcggcgcctggtaccatcatcaggataaaaaagcgtcgcaggagtcatcgctcaccgtcgagccctccccccgcgagtaa

SEQ ID NO: 136677 - DNA, 2229 bp, Enterobacter cloacae
atgaatttattaaaatactatcaacaatatcgcgacaagtggtgggctttaccgctcgttctgcctgcgctgttattaccggtcgccagatgggcgaatacctacaccatgctcaatggtcatatggtatttttgtattatcttcccctggcgctggtgctcagcctgatgatgttttttggttgggcggcgctccctggcattattattggcctgctgttaactctggcccacggcatgatgtttgagcagtccatcggtgtactgttccatttccttatcccctgcgtgctctgctggggcggctaccgcatttttgtcccccagcgtcagcaggtctcacacggcaacgtccgactgatgccgcatcgtctgttctggcaaatgctgctcccctcggtcatttttctgattttgtcacagattgccgaatatcttggactccatccgcgcacaacggaaatgaccggcgttacgccatttagtttacgttcattaatcacctttcaggcgctaatggtagggtgcctgaccggcatgccgctgtgttattttgtgttacgggtcattcgtaatccttttcatttacgcggctttatttctcaggttcgcttacaaattgatccaaaaataaaaaaaattgaaattatttgctgggcgacggtattaattctgctactgtggctattattgatgccgcttaatgatagcagcaccatatttagtacgaattatacgttgtcattgctgatgccggtgatgctctggggtgccatgcgttttggctatcgctttatctcactgatctggacgccggtgctgattgccgtgatccattttcattaccgttacttaccaatttacccaagctataacacccagttggcgatcacgtcatcaagctatctggtattctcgtttattgtcgcctatacggcgatgctggcgacacagcagcggctgatctacgctcgcgtccggcagatggccttcctcgacccggtggttcatatgccgaacttgcgggcgctgagccgggcgctcaacggcacgagctggtcgacgctctgttttctgcgcattcctgagcttgaattgctggggcgccactatggggtacttttgcgaatccagtataagcaaatgctggcgaaccacctgagaacgctgctgcagcccaacgaagcggtatatcatcttgccggtcacgatttagtgttccgtctcaatagcgaagggcaccaggcgcgcattcacttaattgaccgctccctgcgacagttccgtttccactgggacggggtccccctgcagccgcggatcggcatgagctattgcagcgttcgctcgccggtcaagcatctgtatttactgcttggcgagttgaacaccattgccgacatgtcgttagccagcggccatccggaaaatttacagcgccgcggcgcgggccatgttcagcaggatctgaaagataaagtcgtgatgatgaaccgcattctcaaagcgctggaacatgaccattttgtcctgatggcgcagcctatccagggcattcgcggcgatcgctatcatgaagtgctggtgaggatggaaggggagtcgggtgagctaacggggccaaacgagttcttgccggtggcgcacgagtttgggctgtccacccgggtggaccagtgggttattgagcatacgctggcctttatggacgccaaccggcgggcgctgcccggtctgcggctggcgatcaatctttctccggtgtcgctgagccgcagccagtttcctcaggaggtcgaagcgctgctgcaggcctacaacattgagccatggcagattattttcgagctgaccgagaactacgcgctcagcaatcccgagctagtctgccagactttagagcatctgcgggcgctgggctgccgggtggcgatcgatgattttggtaccggctacgccagctacgcccggttaaaaacaatgaacgtcgacattcttaaaatcgacggcagttttattcgcaatctgcttgccagcagtcttgattaccaggtcgtggactctatttgtcgtctggcgcgtatgaagaacatgcaggtggtggccgaatatgtggagtcgccggaaatacgtcaggcggtcatcacgctggggatcgattatatgcagggctatgatatcggggtaccggtacctctgacgcagttggcggaggagatgaccggctga

SEQ ID NO: 136678 - DNA, 1533 bp, Enterobacter cloacae
atgccaataaacgataacacccctcgaccgcaggagttcgctgcggttgaccttggttcgaacagttttcatatggtgatcgcccgtgtcgtcgacggcgccatgcagatcatcggacgcctgaaacagcgcgtacatctggccgatggcctcgatgaaaactcggtgttgagcgaagaagccatgacccgtgggctgaactgcctgtcgctgtttgccgaacgcctgcaggggttctccccctccagcgtctgtatcgtcgggacgcatacgctgcgtcaggcgaccaacgcggcggagtttcttaaacgcgcggaaaaagtgatcccctacccgatcgagatcatctccggtaatgaagaagcgcgcctgatttttatgggcgttgagcacacgcagccggagcgcggccgcaagctggtgattgatatcggcggcggttcaaccgagctggtcattggcgaagattttgagccccgcctggtggaaagccgccgcatgggctgcgtgagcttctcgcaggcctatttccctggcggcgttatcaataaagaaaacttccagcgcgcgcgcctggcggcggtgcagaagctggagacgctggcctggcagttccgtattcagggatggaccgtggcgctgggcgcctccggcaccattaaagccgcccaggaagtgctggtggcgatgggcgagaaggacggatttattacgccggagcgcctcgagatgctggtaaatgagctgttgaagcataaaaacttcgacgcgctcagtctgcccggtctctcagaagaccgtaaagcggtctttgcgcctgggctggcgatcctctgcggtgtgtttgacgcgctggccatcaaagaacttcgtctgtccgatggcgcgctgcgcgaaggtgtcctgtacgagatggaaggccgcttccgccaccaggatattcgtagccgcacggcacagagtctggcaaatcagtacaacatcgatcgcgaacaggcgcgccgggtactggaaactaccacccagatgctggagcagtggcaggagcagaatcccaagctggccaatccgcacctcgcggcgctgttgaaatgggcggtgatgctccatgaggtagggctgaatatcaaccacagcggcatgcatcgtcactcggcctacattctccaaaatagcgacctgccgggcttcaatcaggagcagcagatgctgatggccaccctcgtacgctatcatcgcaaagcgatcaagctcgacgatctgccgcgctttacgctattcaggaaaaagcagtttctgccgctaattcagctactgcgcctgggcgtactgctgaataatcagcgtcaggctaccactacgccgccgacgctgcgcctgcagacggaagctcaccactggacgctgacgtttccgcacaactggtttagccagaatgcgctggtgctgctggatctggaaaaagagcaacagtactgggaaggcgtgccggaatggatgctgaagattgctgaagaagagccagacgcctga

SEQ ID NO: 136679 - DNA, 2061 bp, Enterobacter cloacae
atgggccaggaaaagctatacatcgaaaaagaactcagctggttgtcttttaacgaacgcgtgctgcaggaagcggcggacaagagtaacccgctgattgagcgcatgcgcttcttagggatttactccaacaacctggatgagttttacaaagtgcgcttcgctgagctgaagcgccggattattatcagtgaagaacaaggcagtaccgcccattctcgccacctgttaggcaaaattcaggcccgcgttctgaaggccgatcaggaattcgatagtctgtataatgaactgttgctggagatggcgcgtaaccagatcttcctgatcaacgagcgccagctgtccgtcaatcagcaggcctggctgcgcaactacttcaagcagtatttacgccagcatatctcgccgatcctgatcaaccgcgaaacggacctcgtgcagttcctgaaagatgattacacctatctggcggtggagattatccgcggggaaaacatcaactatgctctgctggaaataccgtcggataaagtgccgcgcttcgtgaacctgccgccggaagcgccgcgtcgccgcaagccaatgatcctcctggataacatcctgcgctattgcctggacgatatttttaaaggcttctttgattacgatgcgctgaacgcctactcgatgaagatgacccgtgacgccgagtacgatctggtgcatgagatggagtcgagcctgatggagctgatgtcctccagcctcaagcagcgcctgaccgccgagccggttcgcttcgtctaccagcgcgatatgccggatgcgatggtcgaaatgctgcgcgataagctctccatttccaactatgactcaatgctgccgggcggccgctatcacaactttaaagactttatcggcttcccgaacgtcggtaaggccaatctggtcaataagcccatgccgcgcctgcgtcatctgtggtttgataaattccgcaacggcttcgacgccattcgcgaacgcgacgtgctgctctactatccctatcacacctttgagcacgtgctggagctgctgcgtcaggcctccttcgaccccagcgtattggcgatcaaaatcaacatttaccgcgtggccaaggattcgcgcattattgacgcgatgatccacgccgcccacaacggtaagaaagtcaccgtagtggtggagctgcaggcgcgcttcgatgaagaggctaacattcactgggcgaaacgcctgacggaagccggagtccacgttatcttctctgcgccaggtctgaagatccacgccaagctgttccttatctcgcgtaaagaaggcgatgaggtggtgcgctacgcccacatcggcaccggtaactttaacgagaagacggcgcggatctacaccgactattcgctgttaaccgccgatgcgcgcattaccaatgaagtccgccgggtgtttaactttatcgagaacccctatcgtccggttagcttcgactacctgttggtgtcgccgcagaactcgcgtcgtctgctgtatgagatgatcgatcgcgagatcgccaatgcgcaaaacgggcaaccgtccgggattacgctgaagctgaacaacctggtggataaaggtctggtggaccgactgtatgccgcctccagctccggcgtgccggttaatctgctgatccgcggcatgtgctcgctgatcccgggtctggaaggtatcagcgaaaatatccgcgtcatcagtattgtggaccgtttcctcgagcacgaccgggtctactgttttgaaaacggtggcgataaacaggtctggctctcctctgccgactggatgacgcgtaacatcgattatcgcatcgaagttgccgctccgctgctcgatccgcgtctgaagcagcgggtgctggatatttttgatatcctgttcaacgatacggtaaaagcgcgctatcttgataaagaactgagtaaccgctatgtgccgcgcggcaatcgccgtaaagtgcgcgcgcaaatggcgatttacgattatctcaaatcactcgaacaacccgactaa

SEQ ID NO: 136680 - DNA, 642 bp, Enterobacter cloacae
atgaaaaacatcgtggtgctgatttccggtagcggcagcaatttgcaggcgatcatcgacgcctgcggccggaaacagataaacggcaccctgcgtgcggtattcagtaacaaggctgatgcgttcggccttgagcgcgcgcgcctggccggcatcccggcccatgcgctggcgcaaagtcagtttgccgaccgggaagcattcgatcgtcagctgatgcatgaaatcgacgcctacgccccggatctggtggtgctggcaggctatatgcgtatccttagcccggcgttcgtcagccactatcagggacgtctgctgaacatccatccctcgctactgccgaagtatcctggcctgcatactcatcgtcaggtgctggagaacggtgacgaggagcacggcacctcggtgcacttcgtcaccgatgagctggacggtgggccggttatcctgcaggccaaggtgccggtcttcgctggcgacagcgaggaggaaatcacggcgcgggttcaggcccaggaacatgccatttatccgctggtcatcagctggttcgtcgatggacgtctgcgcatggcaggcaaccacgcctggctggatgagcgacagcttcccccgcagggctatgccgccgacgaatga

SEQ ID NO: 136681 - DNA, 1023 bp, Enterobacter cloacae
  misc_feature (918)..(927): n is a, c, g, or t
gtgaccgataaaacctctctcagctataaagatgccggcgtggatattgatgcaggcaacgctctcgtcgaccgtattaagggcgtggtgaagaaaacccgtcgcccggaagtgatggggggactgggcggattcggcgcgctgtgcgcactgccgcagaaataccgcgagccggtactggtctccggcaccgacggcgtcggtaccaagctgcgtctggcaatggatctgaagcgtcacgacaccatcggtatcgacctggtcgccatgtgcgtgaacgacctggtggttcagggtgctgagccgctgtttttcctggattattacgccaccggtaaactggacgtcgataccgcagccagcgtcatcaacggcatcgccgaaggctgcctgcagtccggttgcgcgctggtcggtggtgaaaccgcagagatgcccgggatgtaccacggcgaagattacgacgtggcgggtttctgcgtcggggtagtggaaaaatcagaaatcatcgacggcagcaaagtgaccgatggcgacgtgctggtggcgctggcgtccagcggcccgcactctaacggctattcgctggtgcgtaagatcattgaggttagcggcgttgacccacaaactaccgaccttgacggtaaaccgctggccgaccatctgctggcgccaacccgcatctatgtgaaatcggtgcttgatctgatcgccagcgttgacgtccacgctattgcccacctgaccggcggcggcttctgggaaaacattccgcgcgtactgccggataacacccaggcgatcatcgatgagtcctcctggcagtggccatccgtcttcaactggctgcaaaccgccggtaacgtcagccagcatgaaatgtaccgtacctttaactgcggcgtagggatgattatnnnnnnnnnnaaagcgattgccctgctgaatgacaaaggtgaaaacgcgtggaaaatcgggtatatcaaagcctccgattccgaacagcgtgtggtcattgcatga

SEQ ID NO: 136682 - DNA, 894 bp, Enterobacter cloacae
atgaagattgcggcatttgatatcggtggcaccgcgttaaagatgggcgtgatggcccgcgacggcaggctgctggaaaccgccaggcagtcaatcaatgacagcgatggcgatcggatcttacaggcaatgctgtcgtggctggcggcccatccgtcgtgtgaaggaatagccatcagcgcgccgggctatatcgatccgcacagtggtcttatcaccatgggcggcgctatccgtcgatttgataacttcgccatgaaatcgtggctcgagacgcgaaccgggctgccggtctcggtggaaaacgacgccaactgtgtgctgctggccgagcgctggcagggcaaagcggcggagatggccaattttctggtgctcactatcggtactggcatcggtggggcgattttctgccaacaccagctgatcaacggggcgcgttttcgtgccggcgaattcggctatatgcttaccgaccgtcccggcggacgcgatcctcgtcgctattcaatgaatgagaactgcactctgcgggtgctgcgccatcgctatgcgcaacatattggcgcgccgctggatagcgtgacaggcgaactgattttcgaccgctatgacgccggcgacccggtttgtcagcgtctggtcgccgagttcttcaatggcctgggccatggcctttataacctcgtccatatcttcgatccgcagaccatttttatcggtggcggcgttgtggaacgcccaggatttctgacgctactgcgccagcatctggcctggttcggcattgccgactatctcgataccgtcagtcacggtaacgatgccggcctgattggcgcggtttaccattttaatcagctgtatcgttcgccagacgacgatcgacattag

SEQ ID NO: 136683 - DNA, 1434 bp, Enterobacter cloacae
atgtccggatttaaagcaggttttctgtggggcggcgcggtcgcagcgcatcagttagagggcggctggcaggagggcggcaaggggatcagcgtggcggatgtgatgaccgccggcgcccacggcgtgccgcgggaaattaccgacggcgtggtggccgggaaaaactacccgaaccatgaggcgatcgatttttatcatcgttatccacaagacctggcgctgtttgccgagatgggcttcaaatgttttcgcacctcgattgcctggacgcgtattttcccgcagggcgatgagctggagcccaacgaggctggcctgcagttttatgatgatctgttcgacgaatgcctgaaacacggcattgagccagtcattacgctgtcgcattttgaaatgccttatcacctggtcaccgagtacggcggctggcgcaaccgcaagctaatcgactttttcgtgcgctttgccagggtcgtcttcacccgctatcaacataaagtgaagtactggatgacctttaacgagatcaacaaccaggccaacttccatgaggactttgcccccttcaccaactccggtttgaaatatttgccggatgaagaccgggaaccggtgatgtaccaggccgcgcactatgagctggtggccagcgccctggcggtgaaagcggcgcgcgagatcaacccggcgctgcagattggctgcatgatcgctatgtgccccatctatccgctgacctgcgccccggacgatatgatgatggcgatgaacgccatgcaccgccgttactggtttaccgacgtccacgtgcgcggtcgctatccgcagcatctgctcaactattttgcccgccgcggctttactctggatatcaccgaagccgatcgtcaggcgttaaccgagggctgtgtcgactacattggctttagctactatatgtcgttcgctaccaaagccaccgaagacaaccccttgcttgattatgatgaaaccaccagcctggtctccaacccgtacgtcaaaaagtcggactggggctggcagattgacccggtcggcctgcgctattcgctgaactggttctgggatcactaccagctgccgctgtttattgtcgaaaacggctttggcgcgattgatgtccgcgaagcggacggcagcgtcaatgaccagtatcgtatcgattatctctccgctcatatcgcggagatgaaaaaggcggtggtcgaggatggcgtcgatctgatgggctacaccccctggggctgtatcgatctggtttccgccggcacgggggaaatgaaaaaacgctacggctttatttatgtcgataaagataatgaaggcaatggcacgttggcacgcagccggaaaaagtcgtttgcctggtatcagcaggtaattgccagcaacggggagaacctgtcgtag

SEQ ID NO: 136684 - DNA, 627 bp, Enterobacter cloacae
atgaagattgtggaagtcaaacacccactcgtcaaacacaagctgggcctgatgcgcgagcacgacatcagcaccaaacgcttccgtgaactcgcctcagaagtgggcagcttactgacttatgaagccaccgccgatctggagactgagaaagtcactattgaaggctggaacggtccggtggaagtcgagcagatcaagggcaagaaaattaccgttgtgcctatcctgcgcgctggcctcggcatgatggaaggggtgctggagcacgtgccaagcgcgcgtatcagcgtggtcggtatctatcgcaatgaagaaaccctcgagccggtgccttacttccagaaactggtgtctaacatcgatgaacgtatggcgctggtcgttgacccgatgctggccaccggtgggtcgatgatcgccactatcgatctgctgaaaaacgccggctgcaccagcatcaaggtgctggtgctggtggcggcgccggaaggtattgccgcgctggagaaagcccacccggacgttgagctgtacaccgcctctgtcgataagggactgaacgagcacgggtatatcattcccggtctcggcgatgccggcgacaagatttttggaacgaaataa

SEQ ID NO: 136685 - DNA, 1287 bp, Enterobacter cloacae
atgacgcgccgtgccatcggggtgagtgaaagaccgccgcttttacagacaatcccgcttagtttgcaacatctgttcgccatgtttggcgcaacggtactggtgcctattctgttccacattaacccggccaccgtcctgctgttcaatggcatcggtacgctgttgtacctctttatctgtaaaggcaaaattcccgcttatctgggatcaagcttcgcttttatctccccggtgctgctgctgttgccgctgggctacgaagtggcgctgggcggctttattatgtgcggcgtgctgttctgcctcgtctcctttattgtcaaaaaagccggtaccggctggctggatgtgatgttcccgccggcggcgatgggcgccatcgtggcggttatcggcctcgaactggcgggcgtggcggctaatatggccgggctgctgccggccgacggccagtcaccggacagtaaaaccattattatctcgatggtgaccctggcggtgacggtgttcggatccgtgctgttccgcggcttcctggcgattatcccgatcctgatcggcgtgctggtgggctatgcgctgtcgtttgtgatgggcgtggtcgataccaccccgatcgccgaggcgcattggttcgcgctgccgactttctacactccgcgctttgagtggtttgctatcttcaccatactgcccgccgcgctggtggtgattgccgagcacgtggggcatctggtggtgaccgccaatatcgttaagcgcgatctgatccgcgacccgggcctgcatcgttcgatgtttgccaacggcctgtcgacgatcgtttccggcttcttcggttcgacgcccaacactacctacggtgaaaatatcggcgtgatggcgattacccgggtctacagcacctgggtaatcggcggcgcggcgatcattgcgattctgctctcctgcgtcggcaaactggcggcggctatccagatcatcccggtgccggtgatgggcggcgtttccctgctgctgtacggggtgatcggcgcctcggggatccgcgtactgattgaatcgaaggtggattacagtaaagcgcagaatctgatcctcacctccgtgatcctgatcatcggcgttagcggcgctaaagtgcacattggcgccgccgagctgaaagggatggcgctggcgactatcgtgggcatcgccctcagcctgattttcaagcttatcagcgtcctgcgtccggaagaggtggtcctcgacgcggcggatagcgaagagtttaaataa

SEQ ID NO: 136686 - DNA, 912 bp, Enterobacter cloacae
atgaaaaagccgacctccacgccccatgacgccgtgtttaagacctacctctcccatcccgataccgcccgtgatttcctgcaactgtatctgcccgagacgctgcttaaagtgtgcgatctgcgtacgctgcatctcgagtccgggcattttgtcgaagacgatctgcgtcccttttacgccgacattttgtattccctgaaaaccacggcgggcgacggttatatttatgcgcttatcgaacaccagagcacgcccgaccggcatatggcctttcgtctgatgcgctacgccatcgccgccatgcagcgccatctcgatgccggccacgatcgcctgccgctggtgatccctgttctcttctaccacggtctggtgagcccctatccgttctctctgcgctggctcgatgaattcgtcgctccggagctggccggtcacctttatcacggggcgtttccgctggcggacataaccgtcattccggatgacgagattgccacccaccagcgcatggcaacgctggagttactgcaaaaacatattcgacaacgcgatctggcgcagctcctcgacaagctgagcgaattattattgactggactggcgacggaatcgcaggtacaagccctgatgcactatctggtgcaggcaggcaacacgcgcgagccgattaaattcattcgcgagctggcgttacgtacgccgcagcataaggagacgttgatgacgattgcggaatatctggaacaacaggggctggagcggggcctggcgcaaggccgtcaggaaggacggaaagaagaggcgcagcgcatcgctgtcgctatgctgcacagcggccttccgcgcgacctggtcgcccggttgaccgggctgacggagcaggagctgactcccctggcggactaa

SEQ ID NO: 136687 - DNA, 369 bp, Enterobacter cloacae
  misc_feature (308)..(317): n is a, c, g, or t
atgaccgacgcggtaaaaatttaccataacccacgctgctccaagagccgcgaaacgctgagcctgctgcagagccgcggcatcgatcctgaggtggtgctttatcttgagacgccaccggatgccgggacactgcgccagctgctgcagctgctgggtatggagagcccccgcgagctcatgcgccagaaagaggagctgtataaatcgctcaatctggccgacccggctctcagcaacgcggcgctgatacaggcgatggtcgacaatccgaaactcatcgagcgccctatcgtcgtcagccgcgnnnnnnnnnnccaggcgcgtattggccgcccgccggaacaggttcttgagatcgtaagctaa

SEQ ID NO: 136688 - DNA, 1464 bp, Enterobacter cloacae
atgttcaggcagttgaagaaaacgctggtggcgaccgcgatcgcgtcgctgacgctgggttcgataggtcctgcttttgctgactccgcagataccctgccggacatgggaacctccgcaggaagcacgctgtcaatcggtcaggaaatgcagatgggggattactacgtccgccaactgcgcggtagcgcgccgctgatcaacgaccctctgctggtgcaatatatcaacgggctgggtatgcgtctggtggctcacgccaactcggtgcgtaccccgttccacttctatttgattaataacgaccagatcaacgccttcgccttcttcggcggcaatgtggtcctccactccgccctgttccgctactctgataacgagagcgaactggcctctgtcatggcgcacgaaatctcccacgtgacgcagcggcatctcgcccgcgcgatggaagatcagaagcgcaatgcgccgctgacctgggtcggtgccctgggttcgattctgctggcgatggccagcccgcaggccggaatggcggccctgaccgggacgctggccggtactcagcagggtatgatcagcttcacccgccagaacgaagaagaggccgaccggattggcattcaggttctgcagcgctcgggtttcgacccacaggccatgccgatgtttatgggtaaactgcttgacgagtcgcgctactcgacgcgaccgccggaaatgttgctcacccaccccctgccggaaagccgactggccgatgcccgtaaccgcgccaaccagatgcgcccggtggtggtacagtcctcggcggacttctatctggcgaaggcgcgtaccctcgggatgtacaccaacggcgacaacaagctgggcaccgatctgctgaacgcctgggataaaggcaatatccgccaacagcatgccgcccagtatggtcgcgctctgctggcgatggaaagcaataactttgaccaggcacgcaaaacgctgcagccgctgctcaacgccgacccgcaaaatgcctggtatctcgatctggccaccgatatcgacctcggacagaagaaaaccagcgacgccatcaatcgccttaaaaacgcccgcgagctgcgtactaatccggtgctgcagctgaacctggccaacgccctgctgcagggcgggcagcccggggaagcggcgaccattctgaaccggtatacctttacctataaagaggatggcaacggctgggacctgctggcccaggcggaaggcgcgctgggcaatcgcgatcaggagctggcggcgcgggctgaaagcatggcgctggtcggccagctggagcaggcgatttccctgctcagcagcgccagctcgcaggtgaaactgggtagcctgcagcaggcacgttacgatgcccgtatcgatcagctacgcgatctgcaggctcgcttccgtccctatcaaaaaatgtaa

SEQ ID NO: 136689 - DNA, 1062 bp, Enterobacter cloacae
atgcttgagatgttaatgcagtggtaccgccgtcgattcagcgaccctgaggcgatagcgctgctggttattttgcttgccggtttcggcattatgttctttttcagcggcctgctggccccgttgctggtggctatcgtgctggcgtatctgctggagtggccgaccgttcgtctggagcgcatcggtctgtcgcgcacctgggccacctcgctggtgctgatcctctttgtgggcatcctgctgttgctggcctttgtggtgctgccggtagcctggcagcaggggatctacctcatccgcgatatgccgggcatgctaaataagctctctgatttcgccgccacgctgccgcggcgctatccggcgttaatggatgccggcattatcgatgcgatggcggaaaatatgcgcacccggatgctgacggtgggcgactcggtggttaagtactctctggcttcgctggtggggttactcaccctggcggtctatctggtgctggtgccgctgatggtcttcttcctgctgaaggataaagagcagatgctcaacgcggtgcgccgcgttctgccgcgcaatcgcgggcttgccgggcaggtgtggaaagagatgaaccagcagatcaccaactacattcgcggcaaggtgctggagatgattgtcgtcagcgtcgccacctggataggctttatcctctttggcctcaactactcgttgctgctggcggtgctggtgggcttctcggtgctgatcccctatatcggcgcgtttgtggtgaccattccggtggtgggggtggcgctgtttcagtttggcgctggcaccgagttctggagcctgtttgcggtctatctgattattcaggggctggacggtaacctgctggttccggtgctgttctcggaagcggtcaatttacacccgctggtgattatcctgtcggtggtgatctttggcggactgtggggattctggggcgtcttcttcgccattccgctggccacgctgattaaagcagtggtgcatgcctggccggatggtttggcggtcgacgactaa

SEQ ID NO: 136690 - DNA, 471 bp, Enterobacter cloacae
atgaccccactgaaagccggtgatatcgcaccgaaatttagcttaccggaccaggacggcgaggaagtaaatttaaccgacttccagggacaacgtgtcctggtttatttttacccgaaagccatgaccccgggctgcaccgtacaggcgtgcggcttgcgcgataatatggacgacctgaaaaaagccggcgttgaagtgctgggcatcagcaccgataaaccggaaaaactctcccgtttcgccgaaaaagagctgctgaactttacgctgctgtctgatgaaaaccatcaggtttgcgagcagtttggcgtctggggcgaaaaatcctttatggggaaaacctacgacgggatccaccggattagtttcctcatcgatgccgatggcaaaatcgaacacgtctttgatgatttcaaaaccagcaatcaccacgacgtggtgctgaactggctgaaagaaaacgcctga

SEQ ID NO: 136691 - DNA, 567 bp, Enterobacter cloacae
ttgacagcctcattacaacactatctggttattaccgccctgggggctgaccgtcccggcatcgtgaatacgatcactcgccacgtcagcagctgcggttgtaatatcgaagacagccggctggccatgctcggtgatgagtttacgtttatcatgctgctttccgggtcgtggaatgcgattaacctgatcgaatcaactctgccgctgaaaggcgcggagctggagctgttgatcgtgatgaaacgcaccactgcgcgcccgccgcaggccatgccaaacaccgtttgggtccaggttgaggtgccggactcaccgcatatcatcgagcgctttactgccctgtgcgatacatggaatatgaatattgcggagctggtgtcccgcacgcagccaggagacggcgattccgcgcagctttttatccagataactgcccacagtcctgcgacgcaaaatgcagcaaatatcgaacaagcgttcaaagccctatgtacagaactgaacgcacaaggcagtattaacatcgttaattattcacagcatgatgaacaggatggagtttaa

SEQ ID NO: 136692 - DNA, 513 bp, Enterobacter cloacae; identical to SEQ ID NO: 129740

SEQ ID NO: 136693 - DNA, 1422 bp, Enterobacter cloacae
atggtaaacctggttattgtttctcatagcgcccggctgggcgaaggtgtcggagaactggcccggcagatgttaatcaacgatggctgcaaactggcgatcgccgccgggatcgacgatcccgacagcccgatcggcaccgatccgcttaaagtcatggaggcgatcgaatccgtggccgataccgatcacgtgctggtgatgatggatatcggcagcgcgttgctcagcgccgaaaccgccctcgatctgctcgatccggcgattgccgcgaaggtgcgactgtgcgccgcgccgctggtggaagggacgctggcggccaccgtcagcgctgcctccggcgccgggatcgacaaggtgatcgccgacgccatgagcgccctggaggccaagcgggttcagctgggtttaccttcgccaacttctgacgccgcgccggcgccgatgcttgccgacgacggcgacacaaaatcggtgtcagtcattattaacaatcacaacggcctgcacgtgcgtccggcgtcgaagctggtcgccgcgctggcgggctttaacgccgatctgctgctggagaaaaacgggaagtgcgtcaaaccggacagcctcaaccaaatcgcgctattgcaggtccgccgcaacgataagctgcgcctgctggcccgcggtccggatgccgacgcggcgctggcggcgtttcaggcgctggccgccgataacttcggtgaatcgcctgcggcgcaaccggcagcggctccggcaacgcccgagcgcgtcgaaggcgctgccctgcgctatccgctggccctgatccagccgctccgcccggctgccgccgatgccgcccgcgagcagcagcgcctgcgccaggccattgaccagacgctggcggatcttatcgccctgaccgagctggcggaaaataaatttcacgccgatatcgcggcgatcttcgccgggcaccacaccctgctcgacgatgacgatctgtttgatgccgccaacgatcgcctgctcaccgaacaatgcacggcggaatgggcatggcatcaggtgttgatggagctcagccagcagtatcgccagctggatgacccctacctgcaggcgcgctatatcgatatcgaagatattttgcagcgcaccctgcgccatctgcagggcgttcaggagagagtgccgacgcccggcgagccaacaattattattgccgacaacatttatccctcaaccgtcttacagctggatgccagcttcgttaaaggcctgtgcctgcgcgatggcagcgaacaggctcacggcgcgattatcgcccgcgcggcggggatcgcctggctgagccagcagggcgaggcgctgaacagcgtgcagcccggcgagactatcgtgctcgatatgcgccaccagcgccttatccgtgactaa

SEQ ID NO: 136694 - DNA, 555 bp, Enterobacter cloacae
atgcgacatcatcatgaagaagggcgtggaccacgcgggcgccacggtgatcccagcgaacacggcgaccatggccgccgcggcggcggacgtcgccagcgtttctttggccacggcgaactgcggctgatcattctggatatcctcagccgcagcgccagccatggctatgagctgatcaaagagatcgaaacgcttacccaggggaactacagccccagcccgggggtgatctatccgacgctggatctgctccaggaccagggccttatcagcgtggaagacgacaacggacgcaagaaaatccttatcagcgaggaaggaaaacagctgcacgccgagaaccaggagcacctggcccatatccaggagcgcctgcaggcgcggatggtcggctgcgagctgcgccgcgatccgcagatgaagcgcgcgctggaaaacttcaaagcggtcctcgacctgaaagtgaaccagcaggccagcagtgccgcccagctcaagcagatcatcggcattattgaccgggcggcgatggagatctctcagctcgactaa

SEQ ID NO: 136695 - DNA, 1380 bp, Enterobacter cloacae
ttgaacaggttaccttccagcgcatcggctctggcctgcagcgcacacgcactgaatctcattgaaaagcgcacgcttgatcatgaggaaatgaaagcacttaaccaggaggtgagagaatactttaaagagcatgtgaatccggggtttttagagtatcgaaaatcggtcacagccggcggggattacggagccgtagagtggcaagcgggagggttaaatacgcttgtcgacacccagggacaggagtttatcgactgccttggtgggtttggcatcttcaatgtagggcaccgtaatccagttgtggtatccgccgtcgagaatcaactcgcgaaacaaccgcttcacagtcaggagctgctggacccgctacgcgcgatgctggcgaaaaccctggcagccttaacgcccgggaaactaaagtacagtttcttctgcaacagcggtaccgaatcggtagaggcggccatcaagctggcgaaagcctatcagtcgccgcgcggtaaatttaccttcatcgccaccagcggcgccttccacggtaaatcgctgggcgcgctgtcggccaccgccaagtcgaccttccgcaaaccctttatgccgctgctgccgggcttccgccacgtgccgttcggcgatatcaacgccatgcgcaccatgctgagcgagtgcaagaaaaccggcgacgacgtcgcggcggtgatcctcgagccgattcagggcgaagggggcgtgatcctcccgccaacggggtatttgccggcggtgcgtaaactgtgcgacgagtttggcgcattgctgatcctcgacgaagtgcagaccggcatgggccgcaccggcaagatgttcgcctgcgagcatgagaacgtccagccggacattctgtgtctggcgaaagcgctcggcggcggtgtgatgccgatcggcgcgacggtggcgacggaagaggtcttctcggtgctcttcgataacccgttcctgcacaccaccaccttcggcggcaacccgttggcctgtgcggcggcgctggcgacgatcaacgtgctgctgacgcaaaacctgccggcgcaggcggcgcagaaaggcgatatgctgctggacggtttccgcctgctggcgcaggagtatccggacctggtgaatgaagtgcgcgggaaaggcatgctgatggctatcgagtttgttgataacgagattggctacgactttgccagcgagatgttcagacagcgggtgctggtcgccgggacgttaaacaacgccaagacgatccgcattgaaccgccgctgacgctcacccttgagcagtgcgaacaggtgctgaaggcggcgcgcaaggcgctggcggccctgcgcgtttcggtcgaagaagcgtaa

SEQ ID NO: 136696 - DNA, 297 bp, Enterobacter cloacae
atgaacgtcacgctggtagagatcaatattaaacccgagcgggtggatgagtttctcgaagtgtttcgcgccaaccacgagggcgcgctgcgggaaccaggcaacctgcgctttgatgtcctgcaggatcccgatgtgaaaacccgcttttttatctacgaagcctataaagacgatgaggcggtgctggcgcataagaagacgccgcactatttagcctgcgtcgaaaagctggaggagatgatgtcgcagccgcggcagaagcgcagctttatcggcctgttaccgcaggtgtga

SEQ ID NO: 136697 - DNA, 633 bp, Enterobacter cloacae
atgtgcacccgcggcgtactgcgcagccaggtaccggcggccaccaataagccggtggtgctccgcgcctccggcggcaattcgattttgagcgaactctccaacgaatgcgtggcggtggcgatggaagacgcgctgcggctcaacgtatgcgcggtggcggcgcaggtctatatcggcagcgaatacgaacatcagtcgatcaataacatcatcaaactggtggatgccggtaatcgctacggtatgccggtcctggcggttaccggcgtcggcaaagagatgacccgcgacgcgcgctacttctcgctggccagccggattgccgccgaaatgggggcgcagtttgtgaagacctatttcgttgaggaaggctttgaaaaagtgaccgccagctgtccggtgccgatcgtcatcgccggcggtaaaaaactgccggagcatgaggcgctggagatgtgctggcgggcgatcgaccagggggcttccggggtggatatggggcgcaatatcttccagtccagcgccccgcgcgcgatgctgaaggcggtgaaaaaggtggtgcatgagaatctgaacgcgcgcgaagcgtatcagttctggcaggaagagaaacagggagagctgaaatga

SEQ ID NO: 136698 - DNA, 273 bp, Enterobacter cloacae
  misc_feature (259)..(268): n is a, c, g, or t
atggcagatttagacgatatcaaagaggggaaggacttcggtattgaccgcccgcagcagaatacgctgtataccctgaaaggctgcggctcgctggactggggcatgcagtcgcggctggcgcgcatttttaatccgcacagcaaccgcacggtgatgctggccttcgatcacggctacttccaggggccaacgaccgggctggagcgtatcgacctgtcgattgcgccgctgtttgccgacaccgacgtgctgatgnnnnnnnnnngctga

SEQ ID NO: 136699 - DNA, 1002 bp, Enterobacter cloacae
atgaaattaaaactgatcgtgctggcgctggcgatgagcgtggttaccgcgcaggcggcggaccgcatcgcctttattcctaagctggtcggcgtcggcttctttaccagcggcggcaacggcgcgaaagaggcggggaaagcgctgggcgtggatgtcacctatgacggcccaaccgagcccagcgtctccggccaggtgcagcttatcaacaacttcgtcaaccagggctacaacgcgattatcgtttccgctgtctcgccggacggcctgtgtccggcgctgaagcgggcgatgcagcgcggggtgaaagtcctgacctgggattccgataccaagccggagtgccgcagcatctatatcaatcagggcacgccgcagcagcttggcggcctgctggtcgagatggcggaaaagcaggtgacgaagcctactgccaaggtagcgtttttctactccagcccgacggtgaccgaccagaaccagtgggtgaaggaagccaaagccaaaatcgaaaaagaacatccgcagtggcaaatcgtcaccacccagtttggctataacgatgccaccaaatcgctacaaaccgccgaggggatcttaaaagcctatccggatctcgacgccattatcgcgccggatgccaatgcgctgccggcggcggcgcaggcggcagagaacctcaagcgtcagggcgtggcgattgtcggctttagtacgccgaacgtgatgcgtccgtacgttgagcgcggcacggtgaaagcgttcggcctgtgggatgtggttcagcagggcaaaattgcggttaacgtcgccgatcgattgttgaaaaagggcgatcttaacgtaggcgacagcgttgaggtgaaagatatcggctcgctgaaggtcgaaccgaatagcgtgcagggctaccagtatgaggcgaagggcaacggtatcgtgctgctgccggagcgcgtggtgttcagcaaagagaacatcaacaactacgacttctga

SEQ ID NO: 136700 - DNA, 999 bp, Enterobacter cloacae
atgaagctgaagcttaactgggaaagcgcgctgctggcgttgctgatcgtggagatcctgctgttcggcgcgctgaatccgcgcatgctggatctcaatatgctgctctttagcaccagcgactttatctgcatcggcatcgtcgcgctgccgctgacgctggtgatcatcagcggcgggatcgatatttcgctgggctcgaccatcggcctgtgcgccatcgccctcggggtgatgacccaggcgggctggccgctgtggctcgcggtatcgctgacgttgctcttgggactgctatgcgggttattcaacgccgcgctgatccactacaccggcatcagcccgctggtgatcacgcttggtacgctgtatctgtacggcggcggcgcgctgctgctttccgggatggccggcgcgaccggttacgaggggattggcggttttcccgatagcttcaccgccttcgccaatttaaccctcgccggactgccgctgccgctggtgctgttcgcgattatcacctttttcttctggctgctgacccatcgcgggcgctttggccgccacctctttttactcgggcaaaacccgcgcgccgcgcgctatgccgcgctgtcggtgaacggcatcccgtacgtgctgtatggcctggtgggcgtcgcctcggcggtcgcggcgctggtgatggtctcctatttcggctcggcacgttcggatttaggccgcgacctgctgatgcctgcgctgaccgcggcggtgctcggcggggccaatatttacggcggctcgggatcgatactgggtaccgcgctggcggcattgctggtggggtatctgcaacagggtttacagatggtcggcatccccaaccaggtgtcgagcgcgctgtcaggggcgctgttggttgtggtggtgatggggcgttcgctgagcctgcaccgtgaatgggtgcgcgcgacctggcggcgtcttttctcgcataaaacaatcggagcataa

SEQ ID NO: 136701 - DNA, 294 bp, Enterobacter cloacae
gtgctgggcgggatctcgctgctcggcggtaccggcacgctgcttggcgcgtttctcggcgcctttttcctcacccaaattgacaccgtactggtactgttccgccttcccgcctggtggaacgactttatcgccggcctggtgctgctcggggtgctggtgctcgatggccgtctgcgtcaggcgctggcccgccatcagcgggcgctgaagtacagccgtttccagcccggtaacaaaggggggaaacaggttgcccgctttcctgaacgcaaaagcaaagaggtggcttaa

SEQ ID NO: 136702 - DNA, 567 bp, Enterobacter cloacae
atgaatttatccgctaccattcttctcgctttcggcatgtccatggacgccttcgcagcctccatcggcaaaggcgccaccctgcataaacccaaattttcagaggcagtacgcaccgggctgatttttggcgccattgaaaccctgacgccgctggtcggctgggggcttggcatgctggccagccagtttatcctcgagtggaatcactggattgcctttattttactggtgtttctcggcgggcgaatgatcgtcgaaggttttcgcggcgacagcgacgaggcgtgcgaggcgcctcaccgacatggtttctggcttctggtcaccaccgccttcgccaccagccttgacgcgatggccgtcggcgtcggtctggccttcctgcaggtcagcattgtgaccaccgcgctggcgatcggctgcgccacctttatcatgtcgacgctggggatgatggtcggtcgctttatcggcccgctgctgggcaaacgagccgaaattctcggcggtatcgtgctgattggcatcggcagcgaaatcctctggagccatttcgccggttaa

SEQ ID NO: 136703 - DNA, 795 bp, Enterobacter cloacae
atgtcatacagttgccccctttgtcacgcgccgctcagccgtagcgacaaccactattcctgcccgcagcggcaccagttcgatctggcgaaagaggggtacgtcaatctgctaccggtgcagttcaagcggtcgcgcgatcccggcgatagcgccgaaatgatgcaggcccggcgggcgttcctcgacgccggacattatcagccgctacgggatgctatcgctgagcggctgcgacattacgcccctacggatttactggatatcggctgtggcgaggggtattacacccacgcgtttgccgccatcgccagccgcagctgggggctggacgtgtcgaagccggcgatccgcgcggcggcaaaacgctacccgcaggtgaatttttgcgtggcctccagccagcgcctgccattttccgacgctagcttcgacgcggtagtgcgcatttacgcgccctgcaacgccgaagagctggcgcgggtggtgcgtcccggtggttgggtgatcaccgccacgccgggtccccgtcacttactggagctgaaagggcttatttacgatgaagttcgcctgcatgagctgaagacggaagcgatgccggggttccgcctggaggctcagcagcagctggcttatccgatgatcctgacgggaagtgaagcgcaggccctgctgcagatgacgccgttcgcatggcgggctaaagccgaagtgcacgccgcgctgcgtcagcagccgacctttggttgccagaccgattttatgatccactgctggcagcgcgaagcgtaa

SEQ ID NO: 136704 - DNA, 1746 bp, Enterobacter cloacae
gtgctaaagaaaaaaacgaagtccgccgccagtttcaccccgattcgcttcgggttactgtgtgtggccattctcggttgtctggggctgctgctggtccgcgtgggctggctacaaattatctcccccgataacctggtaaaacaagaagatatgcgctccctgcgcgaagaacccgtagcggtagagcgggggatgatcagcgaccgggaaggacggccgctggcggtgagcgttccggtcagtgctatctggatcgacccgcagaccactatggagaagggcggtgtgggctatggaccccgctggcaggcgatggccgaagcgctgcacctcaacctcggagagctggcccagcgggtacagagtcatccccacgctcgctttctctatctggcgcgtcagatcaatcccgagcaggcagagtggattgataaactgcatctgccgggcgtttacctgcgcgatgaatcgcgacggttctacccggcgggccacgtggctgccaatctgctgggctttaccaatgttgataatcagggcatcgaaggggtggagaaaagctttaacgcccagttgaccggtaaacccgggcgacgtctggtgcgtaaagataaacatggcaatgtcattgagaacattaccgaagtgccgccggttccggcgcataatctgcagctgagtattgatgaacgcctgcagacggtgacggaagacgccctcgacaacgccgtccgctggaacaaagcagagtccggggcggcggtattgatcaaaattgataccggcgagatcctggcgatggccagctatccggacttcaatccgaacaatcgcgatagcgcgacgctggatgattttcgcaaccgggccatcagcgacaccttcgagcccgggtcgacggtcaaaccgctggtgatcatgactgcgctacagcaggggattgtccagccagacagcgtggtggatacccatccgttcgtcctcgatggccatcgtattcgcgatgtgggctattatccggagctgagcctgaccgggatcctgcagaaatccagcgataccggcgtgtcccacctctcgctcgccatgccggtgcagcatctgatcgatacctataaagctttcggctttggcgaaccgacggggctggggttgaccggcgaaagcgccgggctgatgccgcatcgccgctactgggggcaactggatcgcgccaccttcgccttcggctatggtttgatggtcaccccgctccagctcgcccacgtctacgccaccatcggcggcttcggcattgcgcgaccactgtcgattacccgcatcgatccgccggtgatgggcacgcgggtgatgccggagagtattgtgcatagcgtggaacatatgatggagagcgtggcgctcccgggcgggggcggtaccaaagcggcggtacgcgactaccgggtggcggtaaaaaccggcacggcgaagaaaatcggcccggacggcaaatatatcgataagtatgtggcctataccgccggcgtggcgcccgctagtcgaccacagttcgcgctggtggtggtgatgaacgatccgagcaatggttcctattacggcggcgctgtgtccgcgccggtcttcagccagatcatgggcgatgtcctgcggctggagaacgtcatgccggacggcatgccgcaaggggcggagaatctgatcgtaatgcacgatagccacccacaggggccggcgctgtaa

SEQ ID NO: 136705 - DNA, 210 bp, Enterobacter cloacae
atggcaaagattaaaggtcaagttaagtggttcaacgagtctaaaggttttggtttcattactccggctgatggcagcaaagacgtgttcgtacacttctccgctatccagggtaacggcttcaaaactctggctgaaggccagaacgttgagttcgaaattcaggacggccagaaaggtccggctgcagttaacgtaactgctatctga

SEQ ID NO: 136706 - DNA, 291 bp, Enterobacter cloacae
atgagtgagttactaaatcctgggattttaaatctggcatcgctggctgtgtccgtggcgctgctgcttgtcggtctgttgttatggttcttcgtcaaccgcgccagttcgcgggcgaatgagcagatagagctgctgcaagcgctgctggatcagcaaaagcggcagaatgcgctgttacgtcgcctgtgcgaagctaatgcgccagagaaagaggatgtggctgagccgaccgtcgccggcaaggcgaaaggggaggatgagtttatccgcctggtagctgaacgttaa

SEQ ID NO: 136707 - DNA, 240 bp, Enterobacter cloacae
atgcgattaatcattcgtactattatcttggtggctatcttatggattggcgtattattgagcggttatggggtgttattccacagtgaggaaaacgtcggcggtctgggtcttaagtgccaatacctcaccgcccgcggagtcagcaccgcactttatgttcattccgacagcggagtgatcggcgtcagcagttgccctctgctgcgtaaaagcacaaccgtggttgataacggctaa

SEQ ID NO: 136708 - DNA, 792 bp, Enterobacter cloacae
atggcaggtgcagatttggataaacagccagattctgtctcttcggtattgaaggttttcggcatcctacaggcgctgggtgaagagcgtgaaattggcattaccgaactgtcccagcgcgtcatgatgtcgaaaagcaccgtttatcgctttttacagaccatgaaatcactgggctatgtggcacaggaaggagagtctgagaaatactctctcaccctcaagctgttcgaactgggcgcgcgcgcgctgcagaacgtcgacctggtgcgcagcgccgatattcagatgcgcgaactttcgcgactgacgaaagagaccatccatcttggggcgctggatgaagacagtatcgtctacatccataaaattgactcgatgtataacctgcggatgtactcgcgtattggccgccgcaacccgctgtacagtaccgcgattggcaaggtgctgctggcatggcgcgatcgcagcgaagtggagcagatcctcgacggcgtggagtataagcgcagcaccgagcggaccattaccagcaccgaggagttgctaaaagtgctggatggcgttcgcgagcagggctatggcgaggataatgaggaacaggaagaggggctgcgctgcattggcgtgccggtgtttgaccgtttcggcgtggtcatcgccgggctgagcatctctttcccaacgctacgtttctctgaagaacgcttgcatgaatacgtggcgatgctccatcaggcggcgcgtaagatttctgaacaaatgggatacaacgactatccgttctga

SEQ ID NO: 136709 - DNA, 1371 bp, Enterobacter cloacae
atggataaaaattcttctgatggcgtgccgttgccgcaacgctatggcgccattctgaccatcgtgcttgggctgaccatggccgtgctcgacggggctatcgccaacgtcgcgctgccgactatcgccagcgatctcaacgcctcaccggcggcttcaatctggatcgttaacgcctaccaaatcgccattgtcatcgccctgctgccgctctccttcctcggcgacatggtcggctatcggcgtatctataagataggcctggtggtgtttagctttacctcgctggcctgcgcgctgtcgcgtagcctcgaaatgctaaccttcgcccgcgtcgcgcagggattgggcggcgccgcgctgatgagcgtcaacaccgcgctgatccgtctgatttatccgcagcgctttcttggtcgcggcatgggcattaactcctttgtcgttgccgtctcttcggcggcaggcccgactatcgccgcagcgatcctctccctcgcctcatggcaatggctgtttttaattaacgtgcctctcggcatcgtcgcctttgttctggccatgcgctttctgccgcccaacagcgcgcgcagcaaaatcatccgcttcgatctgccgagcgccattatgaacgcccttaccttcgggctgctaatcaccgccctgagcggtttcgcccaggggcagtccactcagctggtgctggcggaggtcgccgctatgctggtggtggggttcttcttcgttcgccgccagctcacgatgcccgtccccctgctgccggtcgacctgctgcgtatcccactcttctctctctctatctgcacttccatctgctccttctgcgcgcagatgctggcgatggtctctctgcccttttttctgcagtcgatgatggggcgcagcgaagtggagaccggtctactgctaacgccgtggccgttagcgaccatggtgatggcgccgctggccggctatttgatcgagaaatgtcatgccgggctgctgggggctatcggtttgctgattatggcctgcggcctgttcggcctggcgctgctgccctcgtcgccctccgatctggatatcatctggcgcatggcgctgtgcggcgccggcttcgggctgtttcagtcgccgaacaaccataccatcgtcgcctcggctccgagccatcgtagcggcggcgccagcggcatgctgggcaccgctcgcctgctcggacagagcaccggcgcggcgctggtggcgctgctattcaatttgctcggtaacaacggcacccacaccgccctgctgctggccggcaccctggctatcgtcgccgcgctaattagcggtctgcgggtcactcagccgcgcgcagcctga

SEQ ID NO: 136710 - DNA, 504 bp, Enterobacter cloacae
atgagccgtgatgaagcggaagcggtcattgcccatgaaatcagccacatcgccaatggcgatatggttaccatgaccctgatccagggggtggtgaacaccttcgttatctttatctcccgcgttatcgcgcagattgcggccggtttcctcggcggcaaccgggaagatgaaggggagagcagcaatggcaacccgctgatctacttcgccgtcgccacggtgcttgagctggtgttcggtattctggccagcataatcaccatgtggttctcgcgttaccgtgagttccatgctgacgccggctcggcgcgtctggtaggccgcgagaagatgattgcagccctgcagcgtctgaaaaccagctatgagccgcaggaagccagcagcatgatggcgttctgcattaacggtaaagcgaaatccatgagcgaactgtttatgactcacccgccgctggataagcgtattgaagccctgcgtagcggtgaatatctgaaataa

SEQ ID NO: 136711 - DNA, 384 bp, Enterobacter cloacae
atgatgcgaatcgcgcttttcctgctgacgaacctggcagtgatggtcgtgttcgggctggtgttaagcctcacggggatccaatccagcagcatgaccggtcttctgattatggccctgctgttcggcttcggtggttctatcgtttcgctgatgatgtcgaagtggatggcgctgaagtcagtgggtggggaagtgatcgagcagccgcgcaacgaaacggaacgctggctgatgaataccgttgcgcagcaggcgcagcaggtaggtattgccatgccgcaggtagctatctatcacgcgcctgacattaacgccttcgccaccggcgcgcgtcgtgacgcctcgctggtcgcgtcagcaccgggcttttgcaaaacatga

SEQ ID NO: 136712 - DNA, 2049 bp, Enterobacter cloacae
atgaacacattttttaaaatcaccgcgcttgcgggcctgctggcaatagcaggccatgcattcgctgttgatgacataacccgcgcagatcaaatccccgtgctgaaagaagagccgcagcacgcgacggtaagcgagcgcgtgacgtcgcgctttacccgctctcattaccgtcagtttgatctcgacaacgccttctcggcaaagatttttgaccgttacctgaacctgctggactacagccacaatgtgctgctggccagcgatgtggcgaagtttgcggctaaaaaagaccaaattggcgatgagctgcgcagcgggaaactggacgtcttttacgacctctacaacctggggcagcagcgccgcttcgagcgctatcagtatgcgctgaaggtgcttgaacgtccgatggactttaccggcaatgataatttcaatcttgaccgctccaaagcgccgtggccaaaagacgaggccgagctgaacaagctgtgggacgctaaggttaagtttgaccagttaagcctgaagctggcgggtaaagacgataaagagatccgcgacaccttaacccgtcgctataagtttgctatccgtcgcctggcgcaaaccaacagcgaagatgtcttctcgctggcgatgaccgccttcgctcgcgaaatcgatccgcacacaaattatctgtcgccgcgtaataccgagcagttcaacaccgaaatgagcctctcactcgaggggatcggcgccgtgctgcagatggatgatgactataccgtcattaattcgctggtggcgggcggtccagccgcgaaaagcaaagcgatcagcgtcggcgatcgcatcgttggcgttggccagaccgggaagtcgatggttgatgtcatcggctggcgtctggatgacgtcgtggcgctgattaaagggccgaagggcagcaaggttcgtcttgaaatcctgccggccggtaaaggagccaagacgcgtattgtaacgctgacccgcgagcgcattcgtctggaagaccgtgcggtgaagatgtcggtgaaaaccgtcgggaaagaaaaagtcggcgtgctggatattccaggcttttacgttggcctgaccgatgacgtgaaagtgcagctgcagaagctggaaaaacagaacgtcagcagcatcatcattgacctgcgcagcaacggcggcggagcgctgacagaggcggtatcgctctcgggtctgtttattccgtccggcccggtagtgcaggtgcgggataataatggcaaagtgcgcgaagacagcgacaacgatggcgtggtttattacaaagggccgctggtggtgctggttgaccgctttagcgcctcggcgtctgaaatcttcgccgcagcgatgcaggactatggccgcgcgctgatcgttggcgaaccgaccttcggtaaagggacggtacagcagtatcgctcgttgaatcgtatttacgatcaaatgctgcgtccggagtggccggcgttgggttccgtccagtacaccatccagaagttctatcgtattaacggcggcagtacgcagcgcaaaggcgtgacgccggatatcatgatgccaaccggcaatgaagatcgcgaaaccggcgagcagtatgaagacaacgcgctgccgtgggatagcatcaacgcggccacctatgtgaagtccggggatctgaccccgtttggaccggagctgctcaagcgccacgacgagcgtattgcgcaggatcctgaattccagtacatcatgaaggatattgcccgttataacgcgatgaaggacaaacgtaacatcgtctctctgaactacgcccagcgtgagaaagagaacgaagaagatgatgcgattcgtctggcgcggattaacgatcgcctgaaacgcgaaggcaagccgccgctgaaaaaactggacgatctgccgaagtattaccaggagccggatccgtatcttgatgaaacggtccatatcgcggtagacctggcgcatctggagaaagcgcgcccggcggtggaaccgccggccagcaaataa

SEQ ID NO: 136713 - DNA, 678 bp, Enterobacter cloacae
atggaaaatcaacctaagttgaatagcagtaaagaagttatcgcctttctggccgaacgtttcccgcagtgctttagcgctgaaggtgaagcgcgccccctgaaaatcggaatttttcaggatctcgttgagcgagtgggtggtgagatgaatctcagcaagacccagcttcgcgctgcattacgtctctacacgtccagctggcgttatctgtacggcgtaaaagccggcgctattcgcgttgacctggatggcaatccgtgcggcgaactggaagagcagcacattgcccatgcgcgtcagcagctggaagaagcgaaaggtcgcgttcaggcgcagcgcgcagcccagcaggcgaaaaaacgcgaagccgctgcggccgcaggccagcaggatgaaggcgttcgccgcgagcgtaaaccgcgtcctcagcagccgcgtcgtaaagaaggcgctgaacagcgtaaaccgcgtcctgttgcggccaaagccccgcgtgaagagcgtcttactccggtatcggatgtttccgttctgaccgtcggccaggcgctgaaggtaaaagcaggcaataacgccatggacgccaccgttctggaaatcaccaaagatggcgttcgtgtacagctgacttctggtatgtcaatgattgtacgcgcagaacacctggtgttctga

SEQ ID NO: 136714 - DNA, 555 bp, Enterobacter cloacae
atgcttattttagtaggctgtacgtatcaggcagtaagacaacaaagtgaagatataatgagcaaaacagaattttacgcggatctgaaccgcgatttccaggcattaatggcaggtgaaaccagttttctggcgatgatcgccaataccagcgcgctgctgttcgagcggctgagcgaggtcaactgggccggtttctaccttctggaaggcgataccctggtgttgggaccgttccagggcaaactggcctgcgtgcggatcccggtcgggcgaggcgtatgcggcgcggcggtggcgcaggctcaggtccagcgcgtcgaggacgtccacgcctttgacggccacattgcctgcgatgccgccagtaattcggaaattgtcttccctctgcgcgtgaatggccagattatcggcgtgctggatatcgatagtccggcttacgggcgcttcaccgctgaagatgagcaggggttgcgcacgctggtcgagcatctggaaaaactcattgcggccacggattatcaaaaaatctttacccgtgtcgtgggataa

SEQ ID NO: 136715 - DNA, 1284 bp, Enterobacter cloacae
atgccgataaaaacacctaccctcaaacctgcgaaaaagatggtcgtgcataccgtcagcacgccgcttccctatgcgcattatcagcgctgtacgcagtgtgacatgctcttccgcttaccggtgctcaaacgcaaccaaagcgcctggtgtccgcgctgtaacgcgaaggtgcgcgatggtcgcgactggtcgctgacccgcctgggcagcatggccctcgcgatgctattgctcatgcctttcgcctggtctgaacctctgctgcgcctgcatctgttgggcgtacgcatcgacgccaacgtcctgcaggggatctggcagatgaccgcgcagggcgatccgattaccgccgccatggtgctgttttgcgcggtggtcgccccggtgctgctggtggtctccatcagctatctctggctgggcaatgtgctggggatgaacctgcggccggtgctgctgatgctcggcaagcttaaagagtgggtgatgctggatatctatctggtgggcatcggcgtcgcctccatcaaggtgcaggattacgccttcctgcagccgggcatcggtctggtggcgtttatctccctgacgttgttgagcatcctgacgcttattcatatgaacgtcgaagagctatgggagcgtttctatcccgagcgtccggcgacccgcgccgataataatctgcaggtgtgcaccggctgccattacaccggctatcgcgacgcgcgcggccgctgccgacgctgccacacgccgctgcatcatcgccgaccgcagagcctgcagcgcagctgggcggcgctgattgcctcgctggttttcctctttccggccaacctgttgccaatctccatcatctacgtcaacggcgcgcgccaggacgacacgatcctctcggggatcatctccctggccagcagcaatatcgccattgccggggtcgtgtttatcgccagtattttggtgccattcaccaaagttatagtgttatttaccctgctgctcagcatacaattcaagtgcgagcagggattgcgcacccgcatcctgctgctgcggctaatcacctggattggccgttggtcgatgctggatctgtttgttatctcactcaccatgtcgctaataaatcgcgatcagctcctcgccttcaccatggggccggctgcggtttactttggcggcgcggtaattttaactattcttgcagttgaatggctggacagccgcttactttgggacgcacatgagtcaggaaacgcccgcttcgcagactga

SEQ ID NO: 136716 - DNA, 2634 bp, Enterobacter cloacae
atgagtcaggaaacgcccgcttcgcagactgaagccagaataaaaaccaaacgccgtatttcgccattctggctgctgccggtcatcgcgttgctgattgccgcctggctaatctggaccagctttgacgaccgcggatcgacgattacgattgatttccagtccgcgaacggcatcgtgccgggacggacgccgatccgctatcagggggttgaagtcggcaccgtccaggatattagcctcagtaaagatctgagtaagattgaggtttcggccagcatcaaacgcgatatgaaagatgcgctgcgcaaagagacccagttctggctggtcacgccgaaagcctctctggccggcgtatcgggcctcgatgcgctggtgggcgggaactacatcggcatgatgccgggcaagggtgaacccgaagatcattttgtcgccctcgacacccaacctaaataccgcatcaacaacggcgagctaatgatccacctgcaggcgccggatcttggctctctgaacagcggctcgctggtctacttccgaaaaatcccggtcgggcgggtgtatgactattccctgaatgccaataatcagggggtgaccatcgatgtgctaattgagcgccggtttaccaatctggtgaaaaaaggcagccgcttctggaacgtctcaggcgtcaaggccgacgtcggcctgagcggggccaaagtgcaactggagaacctgtccgcgctggtgaacggcgccatcgcctttgactcccccgccgattcgcatgtcgcctcgcaaaacgatgaatatcacctgtatgaagatctggcgcatagccagcgcggcgtggtagtgaccctcgatctgcctgatggcgacggactgaaagcgggctcgacgccgctcatgtatcaggggctggaggtgggccagttaagcaaactgaatctaaaccccggcggcaaagttactggcgagatgaccgtcgacccgagcgtggtgacgctgctgcgggagaaaacgctgattcagatgaagaagccgaagctctccctcgataaccccagcattagcaccctactcaccggcaatacctttgagctggtgcccggcgaaggcgagccacgcaatcacttctcggtaatgccggcggataaagcgctgctggatgagcccaacgtcgccaccgttaccctctcggcgccggagagctacggcatcgacggcggtcagccgctggtgctgcacggagtaaaagtcggccaggtgctggagcgtaaactgacggccaaaggggtaacctttcaggttgccattgatcctgaataccgcgatttaattcacggcgacagcaaatttgtggttaacagtcgtctggacgtcaaagtggggctcgacggcgtgcaggtgctgggcgccagcgccagcgaatgggtgaacggcgggatcagggtgatccccggcgaaaaaggcaaaatgcaaagcagctatccgctgtacgctaaccttgaaaaggcgcaggaaaatagcctgagcgaagtgccgaccactaccctgagcctgtctgctgagacgctgcctgacgttcaggccggctcggtggtgctgtatcgtaaattcgccgtcggcgagatcatcgccgtcaaaccgcgcaaggatgcattcgatatcgatctgcatatcaagccggagtaccgctacctgctgaccaacaacagcgtcttctgggcggaaggcggtgcgaaggtcaagcttgacggtaacggactcaccgtgcaggcctcgccgctggcgcgcgcgatcaaaggggcgatcagtttcgataacctcaatggcagcagcgccggagcacggctgaataacaaacgtatcctttatgcatctgaaacggcggcgcgcgccgtgggcggccaaatcaccctgcacgcgtacgacgccgggaagatggcggccggaatgccgattcgttatctcggcatcgacatcggtcaaatccagtcgctggagctaatcaccgccaaaaacgaagtgcaggcgaaagcggtgctctatccggaatacgtcggcaccttcgcccgcgccgggacccgcttctcggtgatcactccgcaaatctccgccgcgggcgtggaacatctcgacaccctgttccaggcctacatcaacgttgagcccggccgcggcccggcacgacgcgattttgagatccaggatacgacgatcagcgattcgcgttatatcgacggccttaacatcgtggtggaagcgccggaggcggggtcgcttggcatcggtacgccggtcctgttccgcggactggaagtcgggacggttaccggactgtcgctggggtcgatgtctgaccgggtgatggttaagctgcgcatcagtaagcgctaccagtacctggtacgtaataactcggtgttctggctggcctcgggttacagcctcgacttcggcctgattggcggggtggtgaaaaccggtaccttcaatcagtttatccgcggcgggatcgcctttgccacgccgccgggcacgccgctggcgccgaaggcccaggatggcaagcacttcctgctgcaggagagcgagccgaaagagtggcgggagtggggcaccgctctgccgcagtaa

SEQ ID NO: 136717 - DNA, 1389 bp, Enterobacter cloacae
atgcgcgcggcgatgccagcgcatctctctttcgacgactttatcgccgcctgtcagcgcccgctacgccgcagtattcgcgtcaatacgctgaagattagcgtcgatgatttcctctctctggttgccccctacggctggcagctcgcgccggtgccctggtgcgcagagggattctggatcgagcgagaggatgacgacgcgctgccgctgggcagtaccgccgaacatctcagcgggctgttctatattcaggaagccagttcgatgctgccggtcgccgccctgttcgccgataaccggcagcccgaacgggtgatggacgttgccgccgccccgggatcgaaaaccacccaaattgcagcccgaatgggcaacgcgggcggcattctcgccaatgaattctccgccagccgggtgaaggtgctgcatgccaacatcagccgctgcggcatcaacaacgtcgctctgacccacttcgacggccgggtttttggcgcggccttgcccgaaaccttcgatgccatcctgcttgacgccccctgctccggcgaaggggttgtacgtaaagacgccgacgcgctgaaaaactggtcgccggagagcaacctcgacatcgccgccactcagcgcgagcttatcgacagcgccttccatgctctgcgccctggcgggacgctggtgtattccacctgcaccctgaatcgtgaagaaaatcaatcggtcattgagtggctgctgtcccgctatccgcaggcggtggagatcctgccgctgggagagttgtttcccggcgcagccgacgccttaaccgcggaaggttttctgcacgtttttccgcaaatttacgattgcgaaggcttctttgtcgcgaggttgcgcaaaactgcggcgatcgatccgctcccggcgccaggctataaggtcggtaaattcccgtttacgccgctgaaggaccgggaggccgccgcggtaactgccgccgccaaggctgttggcctggagtgggacgcaggccatacgctgtggcagcgggataaagagctgtggctgtttccgctggctttggagcccctgttcggcaaggtgcgcttttctcgcatcggcgtgcgcctggcggagctgcacaataaggggtaccgctggcagcatgaggcggttatcgcctttgccgcgccgcagcgcgccttcgagctgtcgcaggaggaagcggaggaatggtatcgcgggcgcgacgtctatccgcaaaccgcgcctgggcaggatgaaaccattgtgaccttccagggcgtcccgctgggcctggcgaagcgcgtcggctcccgactgaagaacagctatccgcgcgaactggtgcgcgatggaaaactttttgccggcaaggtgtga

SEQ ID NO: 136718 - DNA, 240 bp, Enterobacter cloacae
atgagtaaaaccaatgtccgcatcggcgcgttcgaaatagacgatgccgaactgcacggtgagcatcagggtgagcgaacgttaagcataccctgcaaatccgatccagacttatgtatgcagcttgacgcctgggatgccgacaccagcgtgcccgcgattctcaatggcgaacattccgttctctaccgtaaacattacgaccgccagtccgatgcctgggtcatgcgccttgcctga

SEQ ID NO: 136719 - DNA, 192 bp, Enterobacter cloacae
atgtttgccttagtgttgtttatttgctatctggatggcggctgcgaggacattgtggttgacgtctaccgcgaggaaacgcagtgcttagtggcgatggaggatcagcggatccgccacggtggctgctacccgatagaagattttattgatggcttctggcaacccgccagcgaatacagcgacttttag

SEQ ID NO: 136720 - DNA, 654 bp, Enterobacter cloacae
atgtatcaacgtattaacggcagcgactggcgtaatatctggctgatgggcgatctgcatggctgctttgcgctgctgatgaatcgcctgcgtcagctgcgttttgatccctgggccgatctgctgatctcggtgggcgatctgatcgatcgcgggccgcagagcgccgattgtcttggcctgttgcgctgtcgctggttcagggccgttcgggggaatcatgagcagatggcgctggaggcgctggagagcggagatatgcggctctggcagatgaacggtggcgactggtacgtcaagggcgatgcgcggcagcgggccgacgtcgatcggctgctggcgcactgtcggcggctaccgttgattattgaagtgcaatgcgagaaagcgcggcatgtgatcgcccacgccgattacccggcgccggtctatcgctggcagcagccggtggatccccaacgggtactatggagccgccatcgtctgagtgaacacctggcggggcgccatggcgctattggcggcgcagaccatttctggtttggccatacgccgcttcaggcgcgttatgaccacgataatcaacactatattgatacgggcgctgtgtttggtgggacgctgacgctggtggcgctgcagtcggcaggctaa

SEQ ID NO: 136721 - DNA, 1011 bp, Enterobacter cloacae
ttgtcagtggctcgctttaaaatagggggaaatcacaacgaggtgtttatcgtgacagacaatagcctgcattcatccggcgtgctagcgccgcgctcgcatcttattgccgatctggtgatgggcagattgacacctgcccccatctggcggcaaaaaaattaccgctttaagtttttgctgcgcacggccttattttataacgccaccagagcgatgctggaagcgctcagcgctcgggatgattttaatcagctgctggccgcgcaggctacgctgccgggcaaagtacaccgtcaatatctgacccgcgatctcaacgcctggcagcgggcggtggcggtaatcaaccattatcgctatatcgacaccctacgcggatcgcggctggcgcacgctatgaccgcggtgtctgaggtcccgctgctgacgttaaacggaaaagaggaccgccggtttactctttatgcctcctcggcaggcaaagccgaacgtgagggtgaaaccactctgtggctgcgcgacagcgaccacaccctgctggccagcgccaccttcagcgtaacccgtgatcacgatgcctggcagctggttatcggcggtctgcaggggccacgacgtcacgtttctcatgaggtgattaagcaggcgactcgcgcctgctacggcctgtttccgaagcgcctgctgctggagtttatctggcagctggccgcgcgcagccaaatcgcggctatttacggcgtcagcgataatggtcacgtgttccgcgccctgcgctatcgcctgagcaaaggccgccatttccacgccagctacgacgagttctggcagtctatcgacggccagccggaaagcccctggcgctggcggctaccgctatgtctggaaagaaaatcgctggagagtatcgccagtaaaaaacgggctgaatatcggcggcgattccagctgctggatcagctgacggagcaggtggcaatattgacgcagcggcatgccggtgactaa

SEQ ID NO: 136722 - DNA, 192 bp, Enterobacter cloacae
atgttggcccgccagttaacctgcacgccgggcctgtttaggtgcaggttttttcttttctccgccctcgtttacggttccacctttgccacctccccttccacaggatgcgatttatgtgtaaatgaattgtgtatgctaaaaacggtgtgctataacgggacatccagaggccagcgggtgtttgactga

SEQ ID NO: 136723 - DNA, 1542 bp, Enterobacter cloacae
atggcactccacagtaaaaagctctcttttacccggccaattatggtcagcttcgcggggatcctgttcagtttcgcgctgatcgccatcctggtcattctttcacagagaaaggattttcttgaggattatcataagattaatggtaacttcacccataatctggcggtgaactataccgaatccatcctgcgagaaaatgactatatacttggtcgcgccgcgatgtacttcgcccgtaatgacagagtgaatcagacaattaatatcgacccgacacacggtttacagatgttgatgcatttgcagaacctgatgccgacggtgtcgtctatctctctggcggacacagaagggcgccatctgcgcgcgccggaagtgctgccaacggagaagggtaagtcattcgacgcccggacccgcccatggtttatcgggcaagcggaagccagcaactttcctcactacacccgcccctatctggactatttcacccaacatcctacggtcaccctctataagccggtcatttcaccggaaggccgtctgaagggcacgctcgctttccatcttgatttaacgtccatgggatataccctgcgccagatggtggcgccggttcagggtgagttttttgtggtggagcgtgacggcgccgttgtgctgcatccggacacgggggcgctctttaagcagtacgtaagcgaagcgctgatggacaaaatgaccagcggcgaaggccatcttttcgaccccaaaagtaaaacctggtattactactactctttcaccaatccggactggtttgtgatttatcgggtctccgatgccacgctgaccgtcatcacccggcatgaaaccaccgtcgtcggctggggatttgcgctggcggcaatcatcatcattctgttcgggctttaccttcgtcatgcctcgcgttctgtgctgatgaacattatcaacgccatcaaaaccggcgacgtcaaccaggcgccacgccttgaagcgatgctcagccataccattcgaaccaataaagaacgcgagctggcctatgtccgtcaggccacccatgatgcgctgacaggctgcaaaaaccgccgtgcgttcgacaacgatgtggatgagctgctgaccgcccatcaacccttcgttctggcgctgatcgacatcgataacttcaaatccattaacgatacctggggccacctgagcggggatattgtgctgcgcaacgtggcacgcgaaggtattcagatcatgcagccacaccacgtttccgtttaccgctacggtggagaagagttcggcgtgatattcccggccgagctgatgaactccgcgcacgcgctactggaagcctggcgtaccgccgttgagaagaggacctggcgggaagagaacctgcgagtgaccttcagcgccgggatgggggagtggcacttcgaaccgctggagcagtttatcggtagcgtagatgaagcgttgtataccgctaaacaacagggtaaaaaccgcatcgtaagcacggccagccgataa

SEQ ID NO: 136724 - DNA, 813 bp, Enterobacter cloacae
  misc_feature (772)..(781): n is a, c, g, or t
atgaattctctgtttgccagtacggctcgtgggctggaagagctgttaaaaactgaactggaagggcttggcgcgacggactgccaggtagtccagggcggggtccattttcagggggatacgcgcctgctgtatcaaagcctgatgtggagccggctggcttcgcgcatcatgctgccgctgggcgaatgtcgcgtatacagcgatctggatctgtacctcggcgtacaggccattccgtggacggagatgttcaaccctggcgccaccttcgcggtgcattttagcggcctcaatgacgagatccgtaacagccagtacggcgcgctgaaggttaaagacgccattgtcgacagcttcacccgtaagaatctgccgcgcccgaacgtcgatcgtgagtcgcccgatctgcggatcaacgtctggctgaacaaagagacggcgcacatctcgctggatctgagcggcgaaggcctgcacctgcgcggctatcgcgatggtaccggaatggcgccgatcaaagaaaatctcgcggcggcgatcgtcatgcgctctggctgggtaccgggtacgccgctgctcgatccgatgtgcggctccggtaccctgctgattgaagcggcgatgctggcgaccgaccgcgcgccgggcctgcaccgcggccactggggctttggcggctgggcgcagcacgatgacggcatctggaaagaggtgaaggcggaagcgcaaacccgcgctcgtcagggattggcagcgtatgagtcacgcnnnnnnnnnncttctacggctcagacgtcgacgcgcgcgtaa

SEQ ID NO: 136725 - DNA, 1125 bp, Enterobacter cloacae
  misc_feature (606)..(615): n is a, c, g, or t
atggtaacgctatcgcgactttttattcatcctgttaaatccatgcgcggcatgggcctgacccacgcctttgctgatatcagcggcctggccttcgatcgcctgtttatggtcaccgaaaccgacgggacctttattaccgctcgccagtttccgcaaatggtgaaatttattccggcgccgctgcatgatggccttcacctgaccgcaccggacggcagcagcgccgtggtgcgttttagcgatttcgccacgcaggccgagccgaccgaagtctggggcaaccattttaccgccctcatcgcgcccgccgccgttaaccagtggctcagcggctttttcaagcgcgatgtccagctgcgctggctggggccgcagctaacccgccgggtaaagcgccatgatgcggtgccgctctccttcgccgacggctacccttacctgctggctaacgaggcctccctgcgcgatctgcaacagcgctgcccggccagcgtaagcatagaacagtttcgccctaaccttgtggtcaccggcgcggcggcctgggatgaagatagctggaaagtgatccgcatcggcgaggtggtgtttgatgtcgctaannnnnnnnnngctaagccgtgcagccgctgcatttttaccaccgtcagcccggagcgcggtcagaagcatcccgccggggagccgctggaaaccttaaagcgttttcgtaccgcgctggacaatggcgatgtcgattttggccagaacctgattgcccgcaacagcggggtgatccgggtgggagatgaagtggaaatccttacccgcggcccggcgaaagcctacggggcaggtgaaagcgacgataccccggctcccgaggcgcagcagcaggctacggttgccatcgaatggcagggtcaacagtttaccggcaataaccagcaggtgctgctggagcaactggaacaacagggcattcgcgtaccctattcgtgtcgggcggggatctgcggcagctgccgcatccggctggaagagggagaagtgagtccgttaaagaaaaacgcggttgccggggatggcactattctcgcctgcagctgtgtaccgaaaacagcgctacgcctggcgccttaa

SEQ ID NO: 136726 - DNA, 543 bp, Enterobacter cloacae
atgcggattaaacctgacgataactggcgttggtattacgatgaagagcacgaccgcatgatgctcgatctggccaatggcatgttatttcgctcgcgcttcgcccggcgcatgctgactccggatgcctttgccccttcgggattttgcgttgatgacgccgcgctctatttctcttttgaagaaaaatgtcgcgatctcgagctatcgaaagagcagcgggcggaattagtccttaacgcgctcaccgccatccgttttctcaaaccgcagatgccgaaaagctggcactttatcgcccatacccatcactggcagccgagcggcggcgacgccgcctgcgtttggctgagcgataccggcgagcaggtgaatttactggtggtggagccgggcgataacgccgcgctctgtctgttggctcagccgggtctcacccttgccggccgcgtcatgcagctgggcgatgtcattaaaatcatgaatgacagactgcagccggcgcagagcgcggtcagctacagtctggggcaggcggtttaa

SEQ ID NO: 136727 - DNA, 1011 bp, Enterobacter cloacae
atgtactaccccttcgttcgtaaagccctttttcagctcgatcctgagcgcgctcatgaagttacctttcaacaattacgccgtgtcaccgggacgccgctggaaatgctggttcgccagaaggtaccggccaggcctgtcacctgcatggggctaacctttaaaaacccgctgggtctggcggccgggctggataaaaatggggaatgcattgacgcgctgggcgcgatggggtttggttcgattgagatcggcaccgtgacgccgcgtccgcagccgggcaacgataagccaaggatcttccgtctggttgatgccgagggattgatcaaccgcatgggctttaataaccatggcgtcgataacctggttgagaatgtgaaaaaggcgcattttgacggcgtgctgggtatcaatatcggcaaaaataaagatacgccggttgagcacgggaaagatgattacctgatttgtatggaaaaagtctatccgtacgccgggtatatcgccattaatatctcctcgccgaataccccagggctgcgcacgctgcaatacggcgaagcgctggatgatttactctccggtattaaaaataagcagctcgagctgcagcagaagcatcaaaaatatgtcccggtcgccgtaaagatcgcgccggatcttttgcctgaggaattgatccaggttgccgatagcctcgtgcgtcataatattgatggcgtgattgcaaccaataccaccctcgatcgttccctggttcagggaatgaaacattgcgatgagaccggcgggcttagcggtcgtccattacaattaaaaagcactgaaattatccgtatgctctccgctgagctgaatggccgtttgcctatcatcggcgtgggcggcattgattcggtgattgccgcgcgggaaaagattgccgccggggcatcgctggtgcagatctattctggatttatttttaaaggtccgccgctgattaaagaaattgttacccacatctaa

SEQ ID NO: 136728 - DNA, 576 bp, Enterobacter cloacae
atgcgcgtcattacgcttgcgggcagcccgcgttacccttcccgttccagcgctttgctggaatacgccagagagacgctcaccgccgccgatatcgaagtctgccactggcatctgcagaactttgccccggaagacctcctgtacgctcgttttgacaacccggcgctgcagacgctcaatgaacagctggccggggctgatggcctgatcatcgccacgccggtgtataaagcctcgttctccggcgcgctgaaaacgctgctcgacctgctgcctgagcgagcgctggagggcaaaattgtgctgccgctggccaccggcggcaccatcgctcacatgctggcggtggactacgcgctgaagccagtgctgaatgccctcaaggcccaggagatcctccatggcgtcttcgctgatgacagccaggtgaccgattaccagcataagccgcagtttaccgcgaatctgcagcggcgccttgatgacgccctggagaccttctggcaggcgctgcatcgccccagcagccgtgcgccgtcgttaacatctctgcgtggggtggagcatgcttaa

SEQ ID NO: 136729 - DNA, 963 bp, Enterobacter cloacae
atgcttaatcctctccgcgccctgactctgggcggactgctgctattctctacgctgggtcacgccgccccggcggcgcctgacgctctgcgcatcggctaccagaaaggcagcgtcagcatggtgctggcgaagagccatcagctgctggagcagcgctatccgcaaacccatatctcgtggattgagttcccggccggtccgcagatgctggaggcgctgaacgtcggcagcattgatatcggcagtaccggcgatattccgcctatctttgcccaggcggcaggcgccgatttggtctatatcggcgcggagccgcccaagcccaaggcggaggtgatcctggtggcgcagggcagcccgattcataacgttgctgagttaaaagggaaaaaggtcgcttttcagaaaggctccagctcccacaatctgctgctgcgcgccctacagctcgcaggtctgaaatttagcgatattcagccggtttaccttgcccccgccgatgcgcgcgccgcctttcagcagggcaatgtcgacgcatgggccatctgggatccgtactactccgccgcgctgctgcagggcggcgcccgggtactcactgacggaaccgatctgaaacagacgggatccttctatcttgcttcccggccctacgctgaacgcaatggcgctttcattgaaggcgtactcgacacctttactcaggccgatgccctgacccacagccaacgcgcgcaaagcattacgctgctggcgaaaacgatgggcttaccggaggcggtgatcgccagctatctggaccatcgtccccccaccgcggttaccccgatgagcgccgaaaccgccgctcgccagcagcagacggcagacctgttctacgagaacaagctggtgccaaaaaaagttgatatccgggcccgcatctggcagcccaccgccacacaaggagcgaaatcatga

SEQ ID NO: 136730 - DNA, 957 bp, Enterobacter cloacae
  misc_feature (869)..(878): n is a, c, g, or t
atgagtctgaatatgttctggtttttaccgacccatggtgatggtcgttatctgggtaccgaagagggtgcccgtccggtcgattatggctatctgcagcaaatcgcgcagacggcggatcggctgggcttcaccggcgtgctgatcccgaccggacgctcttgtgaggatgcgtggctggtcgcggcctcaatgatcccggtgacgcagcggctgaagttccttgtcgccctcaggccaagcgtggtatcgccgacggtggccgcgcgtcaggcggcgaccctggaccggctgtcaaacggccgggcgctgttcaatctggtcaccggcagcgatcctgccgaactggcaggcgacggcgtcttcctcgaccacaccgagcgctatgaggcctcggctgaatttacccacatctggcgcaagctgatggagggagaaaccgtcacctttaacggcaagcatcagcgcgttcgcgacgccaaactgctgtttccgccactgcagcagccgcgtccaccgctctatttcggcggctcgtctgaggtggcgcaggagctggccgctgagcaggtcgatctttatcttacctggggagaaccgccggcccaggtggcagagaaaatagctcaggtgcgagagaaagccgcccggcatggtcgccaggtgcgttttggcatccgtctgcacgtgatcgtcagggaaaccaacgaggaagcgtggcaggcggcggacagccttatctcccatcttgacgaccagacgatcgcccgcgcccaggcggctttcgccagaaccgactccgtcggccagcaaaggatggcggccctgcacaacgggcgacgcgataagctggaaatcagccccaaccnnnnnnnnnnctggcgtgggtttagcgcgcggcggcgccgggaccgcgctggtgggcgatgccgccaccgttgccgaacggatcaatga

SEQ ID NO: 136731 - DNA, 231 bp, Enterobacter cloacae
gtgggcgatgccgccaccgttgccgaacggatcaatgaatacgccgcgctgggtatcgatagctttatcttttccggctatccgcatctggaagaggcgtaccgggtcggagagctgctgttccccctgcttgacgtcgcggtgccgtccatcccgcagccgcaaaacctgcgcctgcagggggaagcggtcgccaacgagtttattccgcgtaaagtagcgcaaagctga

SEQ ID NO: 136732 - DNA, 792 bp, Enterobacter cloacae
atggcaaaatcaacccatcccttgttgttacgcctcgccccctggctgctgccggtagggacggtcattgtctggcagctggcctcgtccgtcggctggctgtcgacgcgggtgctgccctcgccggagggggtattgaaagcgttctggaccctctcggccagcggtgagctgtggcagcatctggccatcagctcatggcgggcgctggtcggcttcgccatcggcggctcgatcgggctaatactcggcctgatcagcggcctgtctcgctggggcgagcgtctgctggatacctcgatccagatgctgcgcaatgtcccgcatctggcgctgatcccgctggtgatcttgtggttcggcatcgatgagaccgccaagatcttccttgtctcgctgggcaccctgttcccgatctatatcaacacctggcacgggatacgcaatattgaccgtgggctggttgagatggcgcgcagctatggcttatccggcttcgccctgttccgtcacgtgatattacccggcgccctgccctcagttatggtcggcgtgcgttttgcccttggtctgatgtggctgacgcttattgtcgccgaaactatctcggcgaatgccggcatcggttatctggcgatgaacgcgcgtgaatttctgcaaaccgacgtggtggtagtggcgatcattctttacgccatccttggcaaactggccgacgtctgcgcccagctgctggaacggctctggctgcgctggaatccggcgtatcatcttcaggaggctaacgcatga

SEQ ID NO: 136733 - DNA, 774 bp, Enterobacter cloacae
atgaacactgcccgtctcaacccaggtatcccgctgctgctgaacggggtgacgaaacgctatggcgacaacaccattcttaacgagctggatctgcatattcccagcggccagtttgtggcggtggtgggtcgcagcggcggcggcaaaagtaccctgctgcgcctgctggcaggtctggaaaaaccaaacgccggcgaactgctggctggcgcgacgcccctggcggcgatccaggacgacacccggatgatgtttcaggatgcgcgcctgctgccgtggaaaacagtgattgataacgtggggctggggctaaaaggcgcctggcgcgacgccgccctgcaggcgttggccagcgtcggacttgaaagccgcgcacaggagtggccggccgcgctgtcgggtgggcagaagcagcgcgttgcgctggcccgcgcgctgatccatcgcccgcgcctgctgctgctggacgaaccgctgggggcgctggatgccctcacccgtctggagatgcaggagctgatcgtctccctgtggcaggagcatggctttacggtcctgctggtcacgcacgacgtcagtgaagcggtggccatggccgatcgggtactgttaattgaagagaagaagattggcctcgatttaagcgtggatatcccgcgaccgcggcgcaccggttcggcgaagctggccgagctggaggctgaagtactggatcgggtgatgaaacgcggcgacagcgagcgtgcgccgcgtttgtttagtcatggctga

SEQ ID NO: 136734 - DNA, 2616 bp, Enterobacter cloacae
atgacacaacagccccaagccaaataccgccacgactatcgtgcgccggagtatctgattagcgatatcgatttgacctttgacctggatgccgcaaaaaccgttgttacggccgagagcaaggtctcccgccacgcggctgcgtctgatgtgccattgcgcctggacggcgaagatctgaccctgatcgctctgcaggtgaacggccagccgtggagtgactataaagaagaaaacaatcagctggtgatcggcggcctgccggagcatttcaccctgaccatcgtcaatgagatcagcccggcggcgaacaccgcgctggaaggcctgtatcagtcaggcgaagcgctgtgcacccagtgcgaagcggaaggtttccgccatatcacctggtatctggaccgtccggatgtgctggcgcgctttaccaccaaaattatcgccgataaagcgaaatacccgttcctgctttccaacggcaaccgtatggcggaaggggagctggagaacggtcgtcactgggtacagtggcaggatccgttcccgaagccgtgctatctgtttgcgctggtggccggtgattttgacgtcctgcgcgattcattccgcacccgctctggccgcgaagtggcgctggagctgtacgtcgatcgcggcaacctcgatcgcgcgccctgggcgatgacctcgctgaaaaactctatgaagtgggatgaggagcgctttggcctcgagtacgacctcgatatctatatgattgtcgccgtcgacttctttaatatgggtgccatggagaacaaaggactcaacgtctttaactccaaatatgttctggcccgtaccgataccgccaccgataaagactacctcgatattgagcgcgtgattggtcatgaatatttccataactggaccggcaaccgcgtcacctgtcgtgactggttccagctcagcctgaaagaggggctgaccgtgttccgcgatcaggagttcagttccgacctcggctcacgggcggtgaaccgcatcaacaacgtgcgcaccatgcgcgggctgcagtttgccgaagacgccagcccgatggcgcacccgatccgtccggatatggttatcgagatgaacaacttctacaccctgacggtctatgaaaagggtgccgaagtgatccgcatgttgcacaccctgctgggtgaagaaaacttccagaaagggatgcagctgtactttgaacgccatgacggcagcgccgccacctgcgacgatttcgtgcaggcgatggaagatgcctctaacgtcgacctgtcgcacttccgcctctggtacagccagtccggtacgccaatcgtcaccgtgcatgacgactataatccggagaccgagcagtatacgttgaccattagccagcgtacgccgccgaccgccgagcaggccgagaagcagccgctgcatatcccgtttgccattgagctgtacgataacgagggcaaggtgatccccctgcagaagggcggtcacccggtacacccggtgcttaatgtgacccaggccgagcagacgtttgtcttcgataacgtttatttccagccggtgccggcgctgctgtgcgaattttcagcgcctgtgaaactggaatacaagtggagcgatcagcagctgaccttcctgatgcgtcacgcgcggaatgatttttcgcgctgggatgcggcgcagagcctgctggcgacttacatcaagctgaacgtcaaccgccatcagcaggggcagccgctgtcgctgccggtgcacgtagcggatgccttccgcgccatcctgctggatgagaagattgatccggcgctggccgctgagatcttaaccctgccgtcagccaacgaaatcgccgagatgttcgcgattatcgatccgatcgccatcgccgccgtgcgcgaagcgctcacccgcaccctggcgaacgaactggcggacgaattcctcgcggtttataacgccaataagctcgacagctatcgggtggagcacgccgatattggtaaacgtgctctgcgcaatacctgcctgcgctatctggcgtttgcggaaccgacgctgggcgataagctggtggcgacgcagtatcaccaggcagataacatgaccgacgcgctggccgccctgtcggcggcggttgccgctgagttgccgtgccgcgatgcgctgatgcaggagtacgatgacaaatggcatcaggacggtctggtgatggataagtggtttatcctgcagtccaccagcccggcagccaacgtggtggaaaccgtgcgcggtctgctgaaccaccgttcgttcagcatgagcaacccgaaccgtgtgcgctcgttaatcggcgctttcgccagcagcaacccggcggcgttccatgctgaagatggcagcggctatcagttcctggtggagatgctgaccgagcttaaccagcgtaacccgcaggtggcgtcgcgcctgattgagccgttgattcgtctgaagcgttatgatgagaagcgacaggcgctgatgcgcgccgcgctggagcagctgaaggggctggagaatctctctggcgacctgttcgagaaaatcagtaaggcgctggcgtaa

SEQ ID NO: 136735 - DNA, 1239 bp, Enterobacter cloacae
atggaacgctccagtgagaggatgctactgcgcaccatgacacaattcacttctcctgtactgcactcgctgcttgatacggatgcctataagctgcacatgcagcaggctgtcttccaccgctacggcgatgtgcatgtggcggcggagtttcgctgccgcggagacgacctgctcggcatctatgccgacgcgatccgcgagcaggtggagtccatgcgcgacctgaggctgcgggatgatgaatatcgctggctgtccacccttcccttttttcgccaggattacctcaactggctgcgcgattttcgctatgacccgagccaggtcacggtcagcaatgacaatggtaagctgaacattcgccttaccggcccatggcgggaagccatcatgtgggaagtcccgctgctggcggtgataagcgagttggtccatcgctatcgttcaccagagatgggcgtcgatcaggcgctcaacacgctggaacataagctaggcgacttcgccaccatgaccgctgacctcgacatgagcgccttccgtctgatggacttcggcacccgccgtcgtttctcacgcgaggtgcaggaaggtattgtgcggcgtctgcagcaggaaccatggtttgtcggcaccagcaattacgatctggcgcgccgtctgaatttaaccccgatgggtacccaggcccatgagtggttccaggcccaccagcagatcagccccagccttgccagcagccagcgggcggcccttgccgcctggctggaagagtatcccgaccagctgggtatcgcgctgaccgactgcatcactatggatgcgttcctgcgcgatttcggtccggaattcgccacccgctatcaggggttgcgccacgattccggcgacccggtggaatggggagaaaaagctatcgcccattatcagaagctgggtatcgatccgctgagcaaagtgctggtcttctccgataatctcgacctggcgaaagccgtcgatctgtatcgccacttcgcctcgcgggtgaagctcagctttgggatcggcacccgtttaacctgcgatctgccgcaggttaaaccgctcaatatcgtgattaagctggtggaatgtaacggcaagccggtggcgaaactctccgacagcccggggaaaaccatctgccacgataaggccttcgtccgcgccctgcgcgaggctttcgacctgccgccgattaaacaggcaagctaa

SEQ ID NO: 136736 - DNA, 1167 bp, Enterobacter cloacae
atgaatcagcaacagctaaagcagcagcttatcgcctggcgtcactatttgcatgcccatccggaaagcgccttcgaggagcagaatacttcacggtttattgccgaaaagctcgaagctatgggcattgaggtgcaccgcgatattggcaaaaccggggtggtggggagattgaaatgcggcgacgggaagggcgttatcgctattcgtgccgatatcgatgccattcaattgaccgaacagggagactggtcttaccgctccatgaccgccgagcggatgcacggctgcggacatgatggtcatacctgcattgcgctgggcgcggcgcagttgctattgcagcggcagaattttaacggcacggtctgctttgtttttcagcctgctgaggaacctggctatggcgccagagcgatgatggacgatggcgttattgaacgctttggcatagaggaaatctacggtctgcataatatgccgggtatgaaagccgggactatcgccacgcgagtcggtggcattatggccagtgaagataactttattattcgtattaaagggcagggagcgcatgcggcccggccgcatatggcgaaagatccgctggtcattgcggcggaaatcatcctggctttgcagacaattgtttcgcgaaatgttgatccgaacgtgccagcggtcatttcctgtactgaactgcacaccgatggcatccgcaatgcgattccgacgcacgtcgaaatcaaaggggatacgcgcagctttgcaccggaggtgcagatgctgctcgaagaacgaatgcgtaccattagcgaagcgatttgcgcgatgcacggtgcgacgtgccagttcagctatacccatgaatttgcgccaacggtgaactggcaccaatgcgttgatgtagcggtcaccgctgcgattaacgtggtaggggctgagaaggtggacggcaacgtcgcacagatgatgatttcggaggattttggcgcttttctgcaaaaaatccccggctgtttcatctttttaggcaacggcgatagttcagatgctcagggcaatacaccgttgcataatgcctgctacgactttaatgatgagatattgctaactggcgcggagtattttgccgaggtcgtcagaacccgtctgccgcaggagtga

SEQ ID NO: 136737 - DNA, 1239 bp, Enterobacter cloacae
atgagtcattatctgcagattaacggccaacggcttatcgattccctgtatgcacttggcgaacatggtgcgctgccaggcggcggcgtatgccgcctggcagcgactgccgaagataaagccggcagggactttgttgtagcccgcatgaaggcgctgggcctgagcgtgtcaattgatgctatcggcaatgtcaccggcgtttatcacggcgaggagacgttgccgatggtgatgatggggtcacatatcgataccgtcgccacaggtgggttatacgatggcaactacggcgttatggccggccttgaggtgattgccaccctccaggatgccgggatccgcacccgacgaccgttggcggtaaccttctttactaacgaggagggggtgcgatttcagcccgatatgatgggcagcgtggtgtatgccggcgagtatccgttggcgcaggcgctcgcggcaaaagatctcgacggtatcacgctcgatgaagcgctgcgtaacattggttataaaggcgaacgtcagccgggagatatggcggtagatagctacgttgagctgcatatcgaacagggaccaattcttgataaagagcagattgatattggcgtggttaccggcgtacagggtatttcgtggcaggaatttaccctgagaggcgtatcgaatcatgcgggtactaccccaatgtccatgagacgtgatgccgggctggcggctgcgaaaatcgctgtttttgcccgtgagctggcgctaagccttggtggtaatcaggtagctaccgttggacatttcagcgtgaagcctaatctaatcaacgtcattcccaaccatgtcgtcatgtcagtggatctccgcaataccgataatgcgatcttatgtctggcggagcagcaattggccgaatttgtcgcgaaaacgtcgcaggaagagggcgtggagataaccagccgctcactggtgcgctttaatccggtcatttttgccgatgagatcgtcaatgcggtggaagccgaggcggagcgtcaggcgctcagttaccgacgtttgccaagcggcgccggacacgatgcacaatttatggcgtcggtatgtcccgccgggatgatttttgtcccctgcgtcgatggcattagccataacgtcaaagaacatagcgcagccaaagatctgattgctggcgccaatgtgctgctgcaggtggttttacagcgcgcccagcgtatggactaa

SEQ ID NO: 136738 - DNA, 1290 bp, Enterobacter cloacae
atgaatactgaaaatataattatcaataaaggatattccgatcccgcaaagtggcatagcgaagataccgtttgggtccttggcctgttcggtaccgccattggcgctggggtgctgtttctgccgattaatgccggaattggcggcttctggccgctgctgattgtttttgtcctcgcttttcctattacttatctggctcaccgcggtctggcgagattcatttactcttccaatacgccggaaagcagtattaccgatgttattggcgagcattttggcgcgctggcgggaaaagtatttaccgtcatctatttcttcgccgtctataccattctgattatgtatgcggtggctatcaccaacaccgcgcagagctttatcacccaccagttggcaatggccgagcctccccggtcgctggtggccatcgttctgatcctcgggctgatgtttatcgtccgtttcggacagcgtttgataatgcgggtgatgagcaccctggtttatcccttcatcatctcgcttatttttatggcactttttctgattccgcactggaacggcgcaattttgcaaaccgtaagcttcagcgccacgggcgatgggcaggggatcatgttatccctgtggatgaccttcccggtactggtgatgtcgtttaaccactatcccatcatttcgccgatggtggtgcgccagaagcagcgttacggtctggcgctcgctgagggtaaatgtgcgcagatccagcgctacggtatcctgctcatgacggtggtggtgctgttttttgttctcagctgcgtgttaagcctgtcgccgcagcaactggcggaagccaaagcccagaatctgtcgattttgtcctatctggccaatcagtacgatacaccgattattgcctggctatcgccgattatcgcctttgtcgctattactaaatcatttcttggccactacatcggcgcctatgaatcgctgcgcgacctgattctggaggccgccgccgcacgcggtaaaaaaccaggtattcgcctcgtcgacgcggtcatcctggtgtttatggtgcttacctgctggttcgccgcgtacaagaaccccagtatcctcggtattatcgaatgcatcagcggtcccaccggggcggcaattctgctgctgttgcctatgtacgccattcataaattaccggtgcttgccccctggcgcggtaaagcgagcaacgttttcgtcaccctgatcggtcttatcaccgtatctgccattttttacggcatgttccaataa

SEQ ID NO: 136739 - DNA, 1212 bp, Enterobacter cloacae
gtggacacaattaaatttcaacttaacgcccggcggcagccctatggccagggagcagacttgagtctgctgaatgaaagcgtggggaacgaagtgctggcattccatcaaaaatttcctgattaccgggtcacgccgctgcgtaagctggaatttttaagccagcggctggggctgggatcgatccatataaaagatgaagcgcagcgattcggtttgaatgcgtttaaaggattaggcggatcttatgcgatggggaaatatctcgccgctctgcttgagcgagatattaatacgttgagctttgccgagcttaattcaccagtgattaaggcgcgtatcaaggacatcgtatttgtgactgctaccgacggtaaccacggacgtggcgtggcgtgggcggctgagcagcttgggctgcgtgcggtggtgtatatgccaaagggctcgtcgccggtacgcgcgcagaatattcgccggcatggcgccgaatgcacgattactgaactgaactacgacgacacagttcggctggcggccaaaaccgcgcgcgagcagggatgggttctactccaggataccgcctggcagggctacgagcagatccccacatggatcatgcaaggctatatgaccctcgctgttgaaatctggcagcagctggcagaaagcggagcgccgatgccgacgcatctgtttttacaagccggggtcgggtcgtttgccggtagcatcatgggatatttcatcgaaaagatgcagcagcaggctcccaccatcatcatcgttgagccgcacaaggcgaactgcctgtatcgctcggcaaccattaatgacggactgccgcacagcgtcggcggggatatgtcaactctgatggccgggcttgcctgtggtgaacctaacatcaccagctggccaatgctccgcgaccatgccacctgttttatttccgccgacgattgtctggcggccaacggcatgcgcctgttggccgctccgcgtccaggtactgacgaaccttttgtctccggggaatccggcgctattggcacaggagtgctttatgcgctgatgactcaaccggcgtatcgcgagcttgccgaatcgctgcgcctgaatgccgatgcacaggttctgttaatcagcacggaaggagatacatcacccgatgtctatgaagacatcgtctggtttggccgtaatggttga

SEQ ID NO: 136740 - DNA, 465 bp, Enterobacter cloacae
atgatgaaacttgacgcatgggataaaaaaattcttacgctcttgcagcgtaataatcgcttgtcgcaacgggagatcgccgatcggatcagcctgtctccttcggcagtcaatcggcgtatcgctgcactggaggatgcaggggtgattaaaggcagtgttagcttagtggacgccagtaaagtgggaagaccaatcaccattatggtgcaggtgaccattgagaatgaacgtctcgatctgcttgaggaggataaacagcgtttcgtaacctgtccgcaagtgcagcaggtctactatgtcactggcgacttcgatttcctgctcgtgatcaacgtccgtgatatggcggaatacgaagcgctaacccgtgaactcttttttgcctcgggaaatatcaagtctttccggaccatcgtgtcgatgcaaaatgcgaagcaggaaatgacggtcattatcgagtaa

SEQ ID NO: 136741 - DNA, 1401 bp, Enterobacter cloacae
atgagcgttgtgcctgtagccgacgtactccagggccgcgttgccgttgacagcgaagtcacggtccgcggatgggtgcgtacccgccgagattctaaagctggcttttctttcctcgccgtctatgacggttcctgctttgatcctgtacaggccgttattaataattctctgcccaattacaatcaggaagtgctgcgtctgaccaccggctgctcggtaattgtcaccggtaaagtcgtggcttctcagggtcagggtcaaagctttgagatccaggcgaccagcgtggaagtgaccggctgggtggaagacccggacacctacccgatggcggccaagcgccacagcatcgagtatctgcgtgaagtagcgcacctgcgtccgcgcaccaacctgattggcgcggtagcccgcgtgcgtcacaccctggcgcaggcgctgcaccgcttcttcaacgaacagggcttcttctgggtttccaccccgctgatcaccgcctccgataccgaaggcgccggcgaaatgttccgcgtgtcgacgctggatctggaaaacctgccgcgtaacgatcagggcaaagtcgatttcgacaaagacttcttcggtaaagagtcgttcctgaccgtttccggccagctgaacggcgaaacctacgcctgtgcgctgtcgaagatttataccttcggcccgaccttccgtgccgagaactccaacaccagccgccacctggcggaattctggatgctggagccggaagtggccttcgccaacctgaacgacgttgccggcctggcggaagcgatgctcaagtacgtcttcaaagcggtactggaagagcgtgcggacgacatgcagttcttcgccgagcgcgtggataaagacgctatcgaccgtctgcagcgctttatcaccgctgattttgcccaggtggattacaccgacgccgtcaccattctggaaaactgcggcaaacagttcgagaacccggtgtactggggcgtggatctctcctctgagcacgaacgttacctggccgaagagcacttcaaagcgccggtggtggtgaaaaactacccgaaagacattaaagcgttctatatgcgccttaacgaagacggtaaaaccgtcgcggcaatggacgttctggcgccgggcatcggcgagattatcggcggttcccagcgtgaagagcgtctcgacgtgcttgacgcgcgtatggctgagatggggcttaacaaagaagactactggtggtatcgcgacctgcgtcgctacggcaccgtgccgcattccggcttcggtctgggcttcgaacgcctcatcgcttacgtcaccggcgtgcagaacgtccgcgatgttattccgttcccgcggacgccgcgcaacgcgacattctaa

SEQ ID NO: 136742 - DNA, 282 bp, Enterobacter cloacae
atggctaaaaccgcggcagcactgcatatcctggtaaaagaagagaaactggcgctcgatctgctcgagcagctcaaaaacggcgccgatttcggcaagctggcaaagaaacactccatttgtccgtcaggcaaacgcggcggcgatctgggtgagttccgccagggccagatggtaccggccttcgataaagtggtcttctcctgccctgaactggagccaaccggcccgctgcatacccagttcggctaccacatcatcaaagtgctgtaccggaaataa

SEQ ID NO: 136743 - DNA, 2022 bp, Enterobacter cloacae
atgcgtttaaaccctggccaacaacaagccgtcgaattcgtcaccggaccgtgcctggtgctggcgggcgccggttccggtaagacccgcgttattacgaataaaatcgcccacctgatccgcggctgcggctatcaggcgcgccatatcgcggccgtgacctttaccaacaaagccgcgcgcgagatgaaagagcgcgttgggcaaacgctggggcgcaaagaggcgcgtggcctgatgatttccaccttccacactttggggctggatatcattaagcgcgaatacgctgcgctgggtatgaagtctaacttttccttattcgacgataccgaccaggtggcgctgcttaaggaactgaccgaagggttgatcgaagatgacaaagtggtgcttcagcagctgatctcgacgatctccaactggaaaaacgatctaaaaaccccggcgcaggccgccgctggcgcgaaaggcgaacgggatcgtattttcgcccactgctatgggctatacgacgcgcacatgaaggcctgcaatgttctcgattttgacgatctgatcctgctgccaacgctgctgctgcagcgcaacgaggaggtgcgcgagcgctggcaaaataagatccgctacctgctggtagatgagtatcaggataccaataccagccagtatgagctggtgaaactgctggtgggtcagcgggcgcgctttaccgtggtgggcgatgacgaccagtcgatctactcgtggcgcggcgcgcggccgcagaacctggtgctgctcagccaggacttcccggcgctgcaggtgatcaagcttgagcagaactaccgctcatccgggcgtattctgaaagccgccaacattttgatcgccaataaccctcacgtctttgaaaagcggctgttctccgaactgggatatggcgcggagctgaaagtgctctccgccaacaatgaagatcatgaagcggagcgcgtggccggggagctgatcgcccaccacttcattaataaaaccaattacaaagactacgcgatcctttatcgcggcaatcaccagtcgcgggtctttgaaaagatgctgatgcagaaccgcatcccgtacaaaatctccggcggcacgtcgttcttttcgcgtccggaaattaaagatctgctggcctatctgcgcgtgctgaccaacccggacgacgacagcgccttcctgcgtatcgtcaacacgccgaagcgcgagatcggcccggcgacgctgcaaaagctcggtgagtgggcgatgggccgcaacaaaggattgttcaccgccagctttgatatgggtctcagccagacgctgaccgggcgcggctatgaatctctcacccgcttcacccactggctacgcgagatccagcagctggccgaacgcgagccggtcaacgccgtgcgcgatttgattcgcgggatcgactacgaatcctggctgtatgaaacctcgcccagcccgaaagccgcggaaatgcgcatgaaaaacgtcaaccagctgtttacctggatgaccgagatgctggaaggcagcgaaatcgatgagccgatgaccctgacccaggtggtcacccgctttaccctgcgcgacatgatggagcgcggcgaatcggatgaagagctggatcaggtgcagctgatgactctccatgcgtcaaaggggctggagttcccctacgtttatctggtgggaatggaagagggattgctgccgcaccaaagcagcattgatgaagataacgtcgatgaagagcgacggttagcctacgttggcatcacccgtgcgcagaaagagctgacctttacgctctgtaaggagcgccggcaatatggcgaactggtgcgtcctgaaccgagtcgttttctgctggagctacctcaggacgaccttatctgggagcaggcacgcaaaaccattacgcctgaagagcggatgcaaaaaggccaggccaacgtcgctaatattcgggcgatgctggcaaaggcgaaaaaagcttag

SEQ ID NO: 136744 - DNA, 723 bp, Enterobacter cloacae
atggctataggtatatttgtctgtagcggctcgcttctcgttggtgcgctggcgggcgcttcactgaatcgttttattccggaacatttcaaaaaaaccttaccgttgatcgccggactgatctcaatcagtatgggcatattctttgtcaataaattacataacctgccgccgattgccctggctattattgtcggcacgattatcggcggcctgttgaatattgaaaaatggattgaacgagccggaacaacgctgcgcagccccattgaacgtatctttccggcgcagtccagcgccagcgtcggtgcggaagattttatgaatcagtttatcgccgtgctgatcctgttctgcgccagcggtaccggcatcttcggcgccttaaccgaagggatgaccggcgacccgaccattctgctgaccaagtcgatcctcgacttttttactgccgcgattttcgcctccacgctggggtatatcatcaccgtgatctttattccccagctgattgttttcgttatcctgtttttcgcggcaacctttatcatggcgttaatcaatccgtcgatgatcgccgacttcaccgcctgcggcggcatcattatgctggcgaccggtttccgtctgtgcgggatccgtgccttccctaccgccaatatgctgccctcgctaatactggtgatgcccttctccgccgcctggcagcagtttatcgcctga

SEQ ID NO: 136745 - DNA, 999 bp, Enterobacter cloacae
atgcgcggaaaaattgctttagaagaacacgtatccactcctgaaaataaccgtctgtgggattcatctggtgaagcaggtcgtaacggcacagaatatatgaaagatgttgaacgccgcctgctggatcgcagcattcagctggaagaaatggcgcagcgtcatattgatcatgtaattctttctctgacttcacctggcgcccagtctattttagataaagccaaagccgtctcttttgcccgcgataccaacgattttatcgttgagaattatgttaagccaaatccggacaaattcagcgccttcgccaccctggcattgcagaacccggaagccgcggcggaagagctggagcgcgccgtgaaaaagttaggcatgaaaggtgcgctgatcaacggctacaccaacgttaaagatagcgagcatggcctgtatcttgatgacgaatccatgctggtattctgggataaggtcaacgagctgaacgtgcctgtctatctgcatcctcgtgaaccgctggaaggcccggcgcgtggcatctataccggttacgaaagcctgatcggctctgcctggggcttcgctcaggaaacggcagtgcatgctattcgtctgatgatgagcggtctgttcgatcgttatcctaacctcaatctggtgctgggtcacctcggcgaagggctggtacatatgctgccgcgcactcaacatcgtctctatcgtcagcgtttcggctgcggtctgggtaaagcggaaaaaccgttaatgcactacctgcagaataacttcatcgttaccaccagcggccatttcaatacccattcactgaataatgctattgaagtcatgggcgccgatcgcgtgatgttctctgtcgattatccgtatgaagatattcatcaggcctgcaactggtttgatcctttagaacttgaagcaggcctgaaagagaaaatcgcctggggtaatgccagccgcgtatttaacattaaataa

SEQ ID NO: 136746 - DNA, 927 bp, Enterobacter cloacae
atgcgggaagaactggatttcaaatcgctacgctttttctctgcgctctaccgcttgggcaatgtttccccagcagcggacgcgctcgatatcagccagcccaccggcagccttttgctgaaaaaactacgagatcattttgctgacccgctgtttgtccgggtcgggcagcggatgatcccgacgccgcgagcggacgcgatcgcccccaccatctcgactcttctccagcttgccgataacgatttagcggtcaaacctgaatttcttccccagcagagccagcgtaattttacgatcggtatgaccgatatcagccaaatgacgctgctgcctttattgcaaattgcgctccagcagcaggcggcggacgggatcacctttacggtacagaatctggatgagcagaccctcaacgccctcgaatccgggaaatgcgatctcgcgatcggctatctgacgcagcttccggaaagcgtctaccagcaacatctcttcgatcaatcatatgtctgcctggctgcggaaaaccatcctcgcattcgcgcacagctccgcgccgaagactggcgccaggaaaagcatctggcgatccgcgtggagggaactgcccatggcgatatggataagctgcttgatgagcaccacatgccccggcgcattgcgctaacgttaccaagctttttaggtaccggtgagctggtggccgaaagcgatatgattgccgtcgtcccggaacaggtggcgcggcatatcacccggcactatccctgccgcagctggccgctgccttttcccctcgccaaaatcgccatccgtcaggtctggcatcagcggctgcaccgcgatcccggacatatctggctacgctcgctgatcgctacgcttgccgatcccgcacagcagagtacttctattaaaatctaa

SEQ ID NO: 136747 - DNA, 1509 bp, Enterobacter cloacae
atgaagagtatgagctccacctcgctatatgccgccattgatttgggctccaatagtttccatatgttggtggtgcgcgaggtggcgggcagcatccagacgctgagccgcattaagcgtaaggttcgactggccgccggcctgaatagcgacaacaccctctccgcagaagcgatggaacggggctggcagtgcttacgcctgtttgccgagcgcctgcaggatattccgccgacgcaaatccgcgtcgtggccaccgccacgctgcgtcttgccgtcaatgcgggggagtttctggcgaaagcgcaggagatcctcggcactccagtgcaagtgatcagcggcgaagaagaagcgcgcctgatttaccagggtgtcgcccacaccaccggcggcgccgatcagcgcctggtggtcgatatcggcggcgccagcaccgagctggtgaccgggaccggcgcacaaacaacctcgctgtttagcctgtcgatgggctgtgtgacctggcttgaacgctattttgccgaccgtagtctgacgaaagagaatttcgatctcgccgaagcggctgcgcgcgaggtgctactgcccgtcgccgatgtgctgcgctatcacggatggaaagtgtgcgttggcgcctccggcaccgttcaggctctgcaggaaattatgatggcgcaggggatggatgaacgaatcaccctcgccaaactccagcagcttaaacagcgcgctatccagtgcggacgtctggaagagctggagatcgaaggcttaacccttgagcgggcgctggtgtttcctagcgggctggcgatcctgatcgctatcttcagcgaactgaatattcagtgtatgaccctcgcgggcggcgcgttacgcgaaggcctggtgtacggcatgctgcatctctccgttgagcaggacatccgcagccgcacgctgcgtaatattcagcgtcgttttatgatcgacaccgaacaggcccagcgcgtcggcggccttgccagccatctgctcagtcagttggatggcagctgggagctggatccgctaagccgtgatttactccttagcgcctgtgcgctgcatgagattgggctgagcgtggattttaagcgcgcgccgcagcacgccgcctatctggtcaataacctcgacctgccggggtttaccccggcgcagaagaagctgattgccacgctgctccttaaccagactaacgctatcgacctctcttcgcttcatcaacagaatgccgtcccgccgcgggtggctgagcatctgtgtcgtctgctgcgactggcaatcctgtttgccagccggcggcgcgacgatctgttgcccgccattcagctgaccgctcaagacgaacaactgacgctgatattgccgggaaactggctggatgaacatccgctgggtcgggagatggtcgatcaggagtgtcagtggcaaagctacgtccactggatacttcgggtcgccagcggcgatacgctgaaataa

SEQ ID NO: 136748 - DNA, 1266 bp, Enterobacter cloacae
atgagcaaaacacatttaacagaacagaagttttccgacttcgccctgcacccggcagtcattgaagcccttgaaaagaaagggtttcataattgcacacccattcaggccctcgcccttccgctgacgctggaaggccgcgatgtcgccgggcaggcgcaaaccggtaccggtaaaacgatggcgttcctgacgtcaacgtttcattatcttctctctcacccggctatcgccgatcgccaggttaaccaaccgcgcgcgctgattatggcgccgacgcgtgaactggcggtacagatccacgccgacgctgagccactggcgcaagccaccggtctgaagctgggtctagcttacggcggcgacggctacgataagcagttgaaagtgctggaaagcggcgtcgatattctgatcggcaccactggtcgtctgatcgattacgcgaagcagaaccacattaacctcggcgccattcaggttgtcgtgctggacgaagccgatcgcatgtacgatctcggctttattaaagatatccgctggctgttccgccgcatgccgccggccactcagcgcctgaacatgctgttctccgcgaccctttcttatcgcgtccgcgaactggcgttcgaacaaatgaataacgccgagtacgttgaagtcgagccggaacagaaaacgggccaccgtattaaagaagagctcttctacccgtccaacgaagaaaaaatgcgcctgctgcagacgctgctggaagaagagtggcccgatcgcgccatcgtcttcgccaataccaagcatcgttgtgaagatatctgggggcatctcgccgccgacggccatcgcgtaggtctgctgaccggcgacgtggcgcagaaaaaacgtctgcgtattctcgaagaatttacccgcggcgacctcgatatcctggtcgcgaccgatgttgccgctcgtggtttgcacattccggccgtgacccacgtctttaactacgatctgccggacgactgcgaagattacgttcaccgcatcggccgtaccggtcgcgctggcgccagcggtcactccattagcctcgcctgcgaagagtatgcgctgaatctgccggcgatcgaaacctatattggtcactcaattccggtcagtaagtacaacccggacgcgctgatgaccgacctgcctaaaccgctgcgtctgacccgtgcgcgcccaggcaacggcccgcgccgtaacggtccaccgcgcaatcgtcgtcgttcaggttaa

SEQ ID NO: 136749 - DNA, 330 bp, Enterobacter cloacae
atgagcgataaaattattcacctgactgacgacagttttgacacggacgtactcaaggctgacgggctgaccctcgtcgatttctgggcagagtggtgtggtccgtgcaaaatgatcgccccgattctggatgagatcgctgaagagtatcagggcaaactgaccgtagctaagctgaacattgaccagaacccgggcactgcgccgaaatacggcattcgcggtatcccaaccctgctgctgtttaaaaacggcgaagtggcggccactaaagttggcgccctgtccaagggtcagctgaaagagttcctcgacgctaacctggcgtaa

SEQ ID NO: 136750 - DNA, 1260 bp, Enterobacter cloacae
atgaatcttaccgaattaaagaatacgccggtttctgagctgattactctcggcgaaaatatggggctggaaaacctggctcgtatgcgtaagcaggatattatttttgccatcctcaagcagcattcgaagagtggcgaagatatctttggcgacggcgtactggagatactgcaggatggatttggattcctccgctccgcagacagctcctacctcgccggccctgacgacatctacgtatcccccagccaaatccgccgtttcaacctccgcactggtgacaccatttccggtaagattcgtcctccgaaagagggtgaacgttactttgcgctgctgaaagttaacgaagttaactacgacaagccggaaaacgcgcgtaacaagatcctgttcgagaacttaacgccgctgcacgcgaactctcgcctgcgtatggagcgtggtaacggttctaccgaagacttaaccgctcgcgtactggatctggcctccccgattggccgcggccagcgtggtctgatcgtcgcgccgccgaaggccggtaaaaccatgctgctgcagaacatcgcgcagagcatcgcatacaaccacccggactgtgtcctgatggtactgctgatcgacgaacgtccggaagaagtgaccgagatgcagcgtctggtgaaaggtgaagtggttgcttccacctttgacgagccggcatcccgtcacgtgcaggttgccgagatggttattgagaaagcgaaacgtctggttgaacacaagaaagacgttatcatcctgctcgactccattacccgtctggcgcgtgcctacaacaccgtggttccggcttccggtaaagtgttgaccggtggtgtggacgccaacgccctgcaccgtccgaagcgtttctttggtgcggcacgtaacgtcgaggagggcggtagcctgaccatcatcgccacggcgctgatcgacaccggttccaaaatggacgaagttatctacgaagagtttaaaggcaccggtaacatggaactgcacctctctcgtaagattgctgaaaaacgcgtcttcccggctatcgactacaaccgttccggtacccgtaaagaagagctgcttaccactcaggaagagctgcagaaaatgtggatcctgcgcaaaattatccatccgatgggtgagattgatgcgatggaattcctcatcaataagctggcaatgaccaagacgaatgatgacttcttcgatatgatgaagcgctcgtaa

SEQ ID NO: 136751 - DNA, 1104 bp, Enterobacter cloacae
gtgaatttactcactgctattactgaattaatcagtattttcttattcacgaccctctttatttttgtcgcgcggaaagtggcaaaaaagatcgggttagtggataaacccaactatcgcaaacggcatcaggggttgattccgttggtcggtggtatctcagtttatgcaggtatctgtttcactttcgccatcgccgattattatattcctcacgcctcgctgtatctggcctgcgcgggggtattggtgctggttggcgcgcttgacgatcgcttcgacatcagcgtgaaaattcgcgcggtcattcaggccgcgatcgccgtgattatgatgatggcagggaatctgcatctgagtagtttgggctttatttttggctcgtgggaactggtgctggggcccttcggcttcttcctgacgctgtttgccgtctgggccgctatcaatgcgttcaacatggtcgatggtatcgacggcctgctcggcggactgtcttcggtctcttttgcggcgaccgggattatcctttggtttgatggtcagtacagcctggcgatgtggtgtttcgcgatgatcgccgccattctaccctatattcttctcaatcttggcgccctcggccgccgctataaagtctttatgggtgacgccggcagcacgatgattggcttcaccatcatctggatcctgctggaaaccacgcaaggtaaaacgcatcccattagcccggtgaccgcgctgtggattatcgctatcccgctgatggacatggtggcgattatgtatcgccgcctgcgcaaaggcatgagtcctttctcaccggaccgtcagcatattcatcatttgatcatgcgcgccgggtttacttcccgccaggcgtttgtcctgattaccctggccgccgccctgctggcgctggttggcgtcgtggcggaatacacccgcattgtgccggaatgggtgatgttaattctctttttggtagccttctttctttatggctactgtattaagcgcgcctggaaagtggcgcgcctggttaagcgcatcagacgcagaattcggcgacacagcggcaataatccgaaactaaccaagtag

SEQ ID NO: 136752 - DNA, 1017 bp, Enterobacter cloacae
gtgaacgttgagaacgagctggatattcgcgggctgtttcgcgctttatgggcaggaaaaggctggatagtcggcggcgccgtactcttcgccgccatcgtgctggtgtacaccttctttgctcgccaggagtggagcgccacggcgatcaccgatcggcctactgtcaatatgttggggggatactattcccaacagcagttcttacgcaatctggacattaaagccgacctcgcctcggtcgaccagccttccgccatggatgaagcgtataaagagttcatcatgcagctggcctcctgggatacccggcgcgatttctggctgcaaacggactactacaagcagcgtcagtcgggtaatgcccgcgctgatgcggcgatgctggatgacctgattaacaatatccagtttatgccaggcgatgcggccaagagcattaacgacagcgtcaaactgaccgccgagaccgggcaggatgccaataatctgttgcgtcagtatgtggccttcgccagccagcgggcggcaggccatcttaacgacgaacttaaaggcgcctgggcggcgcggacggtgcagatgaaggcgcaggtgaagcgccaggaagaggtggccgaggccatcttcaaccgccggacgcacagcgtggagcaggcgctgaaggtggctcagcagcacaatatttcacgtagcgaaacggatgttcctgccgatcagttgccggattcagagctatttttattgggcagaccgatgctgcaggccaggctggaaaacctgcaggccgtcgggccggaatacgacctcgattacgaccagaaccgcgccatgctgagcacgttgaacgtcggtccaacgttagatccgcgttttcagacttaccggtatttgcggacgccggaagaacctgtaaaacgcgatagcccgcgccgtgtatttctgatggtgatgtgggggattgtgggtgcgctcatcggcgcaggcgtggcgttatcgcgtcgtcgtgtcctgtga

SEQ ID NO: 136753 - DNA, 1086 bp, Enterobacter cloacae
atggcgcctctggtccatgcgctggcaaaggatcctcattttgaggcgaaagtatgcgtgaccgcgcagcatcgggagatgctcgatcaggtgttgaaacttttctctattgtcccggactacgatctcaacatcatgaagccggggcaggggctgaccgagatcacctgtcgcatccttgaagggctgaagccggtgctggagtcgtttaaacccgacgtggtgctggtgcatggcgataccaccaccaccatggcggcgagcctggcggcgttttaccagcggataccggtgggtcacgtagaggccggcctgcgcaccggcgatttaagttcgccgtggccggaagaaggcaaccgtacgttgaccggccatctggcgacataccatttcgcccccacggaaacctcgcggcagaacctgctgcgggaaaatattgccgacagtcgcatcacggttaccgggaatacggtcattgacgccctgttctgggtgcgggatcgggtgctgggtgatgaagcgctacgggagaccctgctgcagcgctatcctttcatcagccacggtaaaaagatgattctggttaccggccaccggcgggaaagctttgggctcggttttgaacagatctgccaggcgctggctgagatagcccatacccaccctgaggtgcagattgtctatccggttcacctgaatcctaatgtcagcgagccggtgaatcgtattcttggtcatattgacaatgtgatgttgattgaaccgcaggattacctgccgttcgtctggctgatggatcgcgcctggctgatcctgaccgattccggcggcattcaggaagaggccccctcgctgggtaagccggtgctggtcatgcgcgatatgaccgaacgtccggaagcggtggccgccggcaccgtgtgtctggtgggcaccgacagccagcgcatcgtcgcggaagtgacgcgactgctggaggatgatgctgcataccaggcgatgagccgcgcgcataatccctatggcgatggcgaagcatgtcgtcgcattttgtctgcacttaaaaataatcaggtaacgctatga

SEQ ID NO: 136754 - DNA, 1263 bp, Enterobacter cloacae
atgagtttttctaccatttcagtgattggccttggctatatcgggctgccaaccgctgccgcgttcgcctcccggcagaagcgggtggtcggcgttgatgttaatcaacatgccgtggagaccattaaccgtggagagattcatatcgtggagccagatctggcgagcgtggtgaagaccgcggtcgagcaggggtatttaagcgccaccaccaccccggtggaggcggatgcttacctgattgccgtgccgacgccgtttaaagatcgccacgagccggatatggtgtttgtcgagtcggccgccaaatccattgcgccgacgttaaagaaaggctcgctggtgatcctcgagtccacttcgccggtcgggtcgaccgaacagatggccgagtggctggcggagatgcgcccggatcttagcttcccccagcaggtgggtgaagcggcggacgtgaatatcgcctactgcccggagcgggtattgcccggtcaggtgatggtcgagctgattaaaaacgaccgcgttatcggcggcatgtcgccggtctgctccgctcgcgccagcgagctgtataaaatcttccttgaaggcgaatgcgtggtgaccaactcgcgcaccgccgagatgtgcaagctgacggaaaacagcttccgcgacgtcaacatcgcttttgccaacgagctgtcgctgatttgcgccgaccaggggattaacgtctgggagctgatccgcctggcgaaccgccatccgcgcgtcaatatcctgcagccgggcccgggtgttggcggccactgtatcgccgtcgacccatggtttatcgtggcgcaaaacccgcagcaggcgcgtctgatccgcaccgctcgcgaggtcaacgaccacaagccggaatgggttatcgaacaggtgaaagcgcaggtggcggactgcctgaatgccaccaacaagcgggccagcgaactgacgatcgcctgttttggcctcgcttttaaaccgaatattgacgacctgcgcgaaagtccggcgatggaaattgccgcgcagattgcccgctggcacagcggcacgacccaggtggttgagcccaacattcacgcgctgccgaagaaactcgatggactgtgtacgctggcgacccttgaggcggcgctggccagcgccgatgtgttggtgatgttggtcgatcataaccaatttaaagccgttagcggcgatagcgtcacccaggcgtttatcgtcgacaccaaaggagtgtggcggtga

SEQ ID NO: 136755 - DNA, 1068 bp, Enterobacter cloacae
gtgagaaccattctggtcaccggcggcgcgggcttcattggttcggcggtagtgcgggagattatccagcacaccgccgatcgcgtggtggtggtggataaactgacctacgccggcaatttaatgtcgctggcgccggtggcgcaggatgcgcgtttcgcctttgaacaggtggatatctgcgaccgcggcgagctggatcgcatttttcgtcagcatcaaccggatacggtgatgcacctggcggcggaaagccatgtcgatcgttcgattgacggcccggcggcgtttatcgagaccaatatcgtgggcacctatacgctgctggaggcggcccgtagctggtggaataccctggctacggcgcaaaaatcggcgtttcgcttccatcacatctccaccgatgaagtgtatggcgatctgcacggcagcgatgatttctttaccgagaccacgccctatgcgccaagcagcccctattcggcttcgaaagccagcagcgaccacctggtgcgcgcctggctgcgaacctatggcctgccgacgcttatcaccaactgctcaaataactacggcccgtatcactttcccgagaagctgatcccgctgacgatccttaacgcgctggcgggcaagccgctgccggtgtatggcaatggacaacagatccgcgactggctgtacgtggaagatcacgccagagcgctgtatctggtggcgacccgcggcgaaccgggcgaaacttacaatatcggcggtcataacgaacgtaaaaatatcgaggtggtggaaaccatttgtcagctgctggaagagctggcgccggataagccgcagggcgtggcgcactatcgcgatctgatcgccttcgttgccgatcgtccgggccacgatctgcgctatgccattgatgcctcgaagattgcccgcgagctgggctggacgccggcagagactttcacctccggtatgcataagaccgtggcgtggtatctggcgaacgaggcctggtggcgtcaggttcaggacggaagctatcagggcgagcgtcttgggctgcaaagctaa

SEQ ID NO: 136756 - DNA, 882 bp, Enterobacter cloacae
atgaaaggtattattctggcgggcggttccggaacgcggctacatcccatcacccgcggcgtatcgaagcagctgttgccgatctacgataagccgatgatctactacccgctgtcggtattaatgctggccgggatccgtgagatcctgattatcaccacgccggacgacctacgtgatttccagcgcctgctcggcgatggctcagagtttggcattgcgctgcactatgccgtacagccgacgccggatggtttagcccaggcgtttatcatcggagaagcctttcttaacggcgaaccggcgtgtctggtgttaggcgacaatatcttcttcggccaaagctttagcccgaagctgcgcagcgtcgctgcccgcacggaaggggcgacgatttttggctatcaggtgatggatcctgagcgctttggcgtggtggagtttgatgataacttccgtgcgctatcgctggaagagaagccgaagcagccgaagtcgaactgggcggtcactggtctctatttctacgatggcaaggtgacggagtatgccaaacgggtcaagccatccgagcgcggcgagctggaaatcacctccatcaaccagatgtatctggaggatggcgcattgaccgtcgaactgcttggacgcggctttgcctggctggacaccggcacccacgatagcctgatcgaggccagcatgttcgtgcagaccgtcgagaagcgccagggctttaaaatcgcctgtctggaagagatcggctggcgtaacggctggctggacgacgacggcgtcaaacgtgcggcgaagcggctggaaaaaaccggctacggccaatatctgctggatctgctccgtgcccgtccgcgccagtattga

SEQ ID NO: 136757 - DNA, 675 bp, Enterobacter cloacae
gtgcccgtccgcgccagtattgaccccctggagtgggagaaccgcttctttgccgtgaacagcgcgatcgtgcgctttgacgagcacgcgccgcggctgacgcctgaggcgctggcggggtggtcgcgagtgcaggcgaagatcgccgccagcgacaccgtccggctggacgcgctgcagcggctgggttttcagctggtggaaggtgaggtcgatctggcgctgccggtgggcagccctgcagatgccggcgcagacgtcgccgtggaagcggatattgcgccgctgcgcgagcaggcggcgcaggcatttgccatgagccgctttcgcgcgccctggtacgctgccgacgctagcggccgcttctatgcccagtggattgaaaatgcggtgcgcggcaccttcgatcatcagtgcctgatttaccgccatcctgagggcgatattcgtgcctttgtctccctgcggcagatcactgcgaccgaagcgcgtatcggcctgctggccggacgcggcgccggggcgcagttgatgcaggcggcgcggtactgggccgcctcgcgcggactttctacactgcgggtggcgacccagatgggcaacaccgccgcgcttaaacgttatattctcagcggtgctaacgtggaaagcaccgcctactggctatacaggtga

SEQ ID NO: 136758 - DNA, 1131 bp, Enterobacter cloacae
atgatcccatttaacgcgccgccggtggttggaaccgagcttgattacatgcagtctgcgatgaacagcggcaagctgtgcggcgacggcggctttacgcgccgctgccagcagtggatggagcagcgatttggcacggcaaaagcgctactgaccccttcctgcacggcttcgctggagatggccgcgctgctgctggatatccagccgggcgacgaagtgattatgcccagctatacctttgtctccaccgccaacgcctttgtgctgcgcggggcgaaaatcgtcttcgttgatattcgtcgcgatacgatgaatatcgacgaaacgctcatcgaagccgccatcaccgataaaacccgggcgattgtcccggtgcattatgccggcgtagcctgcgagatggacaccatcatggccatcgccgacaaatacaacctgtttgtggtggaagacgccgcacagggggtgatgtccacctacaaggggcgcgcgctgggcaccatcggccatatcggctgcttcagcttccatgaaaccaaaaactacaccgccggcggtgagggcggggcgacgctgatcaacgatcgcacgctggtggaacgcgcggagattattcgcgaaaaaggcaccaaccgcagccagttttttcgcggcctggtggataaatatacctggcgggacattggctccagctatctgatgtccgacctgcaggccgcctatctgtgggcgcagctggaagcggcggagcgcatcaaccagcagcgcctggcgctgtggcagaactactatgatgcgctgctgccgctggcgcgcgccgggcgtatcgaactgccgacggttccggccgactgcgggcaaaacgcgcacatgttctacattaagctgcgcgatatcgaggatcgcagcagactgatcgcctggctgaaagaggcggagatcctcgcggtattccattacattcccctgcacagctgcccggcaggcgaacagttcggcgaattccgcggtgaagaccgctacaccactcaggagagcgagcgtctggtacgcctgccgctgttttacaatctgtctgtggtgaaccagcggacggtgattaactcgctgctgagctacttctcctga

SEQ ID NO: 136759 - DNA, 189 bp, Enterobacter cloacae
atgctgcgccaccagcttcgtgacgccattaaatatcccggccccggccagcacgccgagtacggtgaccagttgccggaagttaccggcctggccaacgcccgccggcccaaacgagacggccagcagcttgacgaccagcagaccggcgccgattttgaccagcgtcgatgccgccgtccacagtga

SEQ ID NO: 136760 - DNA, 936 bp, Enterobacter cloacae
atgaagcttaaaaacaccctcctggcgtctgctctcctgacaaccgccacgttgtctgcccatgcagcgaccgagttgaccccggagcaggcggctgcgctgaagccctacgatcgcgttgtcgtcaccggccggtttaatgccattggcgatgcggtacaggcagtatcgcgcaaagccgacaaagacggcgcggcctcattctatgttgtcgacacgtcggactacggcaatggcggcaactgcctttataaagaagacgcgccgaaagcggatgcgccgaagaatcgcattatcaacggcgtgatggagttgccgaaagatcaggccgttgagctgatgccttacgacaccgtcaccgttcagggcttctatcgcagccagccggaagtcaacgacgccatcaccaaagcggcgaaagcaaaaggcgcctatgcgttctttatcgtccgccaggttgacgccaaccagggcggcaaccagcgcattaccgcttatatctacaaaaaagatgctgaaaaacgcgtgctgcagagcccggacgctatcccggctgactctgaagctggccgcgcagcgctggccaaaggcggcgaagcggcgaagaacgttgaaattccgggcgttgccaccaccgccgcggtgggttcgggtaccggcgttgggcgtttctttgagactcagtcttcgaaaggtggacgttacactgtcactctgccgaacggcactaaggtcgaagaagtgaacaaagtgactgcggcgcaaatggtgccgttcgataacatccagttcaccggcaactacggcaacatgaccgaaatctcctatcagacggcgaaacgcgcggcgaagaaaggggcgaagtactaccacatcacccgccagtggcaggaacgcggcggcaacatcaccatcagcgccgatttgtacaaataa

SEQ ID NO: 136761 - DNA, 1530 bp, Enterobacter cloacae
atgcgtattggtgtaccacaagaaaggctagcccaggagacccgggccgccgccacgccgaagaccgttgagcaattgctcaaactcggctttagcgtcgcggtagaaagcggcgccgggaagctggccagctttgacgatgaggcctttgccgaggcaggagctgaaatcgtgaccggcgacgaggtatggcagtctgatgtcatccttaaggtcaatgctccgaatgacgatgaaattgccctgctgaatccggggaccacgctgattagttttatctggccggcgcaaaacccgcagctgatggaaaaactggcggcccgtaatatcaacgtaatggcgatggattccgtgccgcgtatttcccgcgcccagacgctggatgcactcagctcaatggccaacatcgccgggtaccgcgctatcgttgaagcggcgcatgaatttggtcgattctttaccgggcagattacggcggcaggcaaggttccgcccgccaaggtgatggtcattggcgccggggtagccggtctggcggcgattggcgccgccaacagcctgggcgctattgttcgcgccttcgatacccgtccggaagtgaaggagcaggtgcagagtatgggcgccgagttcctcgagctggactttaaagaggaagcgggcagcggcgatggctacgctaaggtgatgtctgaggcctttattaaggctgaaatggcgctgttcgccgcgcaggcgaaagaggtcgatatcattgtcaccacggcgttaatcccgggcaaaccggcgccgaagctgatcacccgcgaaatggtcgactccatgaaatcgggcagcgtggtggtcgatctggcctcgcaaaacggcggcaactgtgagtacaccgtaccgggcgaagtggtgaccaccgccaacggcgtgaaaatcatcggttacaccgatcttcctggccgtctgccgacccagtcctcccagctctacggcaccaacctggtgaacctgctgaagctgctgtgcaaagagaaagacggcaatatcgttatcgatttcgatgacgtggtagtgcgcggcgtgaccgttgttcgcgaaggtgaaatcacctggccggcgccgccgattcaggtctccgctcagccgcaggccgcggcgaaaaaagtggaagcaccgaaagaagcggtgaaaccggcgtcgccgtggcgcaaatatgcgctgatggcgctggcgattattctcttcggctggctggccaacgtggcgccaaaagagttcctcggccatttcaccgtcttcgcgctggcctgcgtggtgggttactacgtggtgtggaacgtctcccatgcgctgcatacgccgctgatgtcggtgaccaatgccatttcgggcattatcgtggttggcgcgttgttgcagataggccacggcggctgggtcagcttcctgagctttatcgcggtgctgatcgccagcattaatattttcggtggttttaccgtgactcagcgcatgctgaaaatgtttcgcaaaggataa

SEQ ID NO: 136762 - DNA, 1389 bp, Enterobacter cloacae
atgtctggtggattagtaacggctgcatacattgttgctgcaatcctgtttattttcagcctggcgggcctgtcgaaacacgaaacgtcgcagcagggcaactatttcggcatcgccgggatggccattgccctgatcgctaccatcctggggccggacgccggcaacgtcggctggattattcttgcgatggtgatcggcggggcgatcggtattcgtctggcgaagaaggtcgagatgaccgaaatgccggagctggtggctatcctgcacagcttcgtgggtctggcagcggtgctggtgggtttcaacagctacctgcagcatgaaaccggtatggagcaaattctggtcaatattcatttgaccgaagtgttcctcgggatcttcatcggcgcggtgaccttcaccggttcggtggtggcgtttggtaaactgcgcggcaaaatttcctccaggccgctgatgctgcccaatcgccataagctgaacctggcggcgctggtggtttccttcatcctgatggtgatttttgttcgctctgacagcaccggcacccaggtcctgtgcctgctggtgatgaccgcgatcgcgctggcctttggctggcacctggtggcctctatcggcggtgcggacatgccggtggtggtctcgatgctcaactcctactcgggctgggcggcagcggcggcgggctttatgctgagtaatgacctgctgatcgtcaccggcgcgctggtgggctcttccggcgccatcctctcttacattatgtgtaaggcgatgaaccgctcctttatcagcgtgatcgccgggggcttcggcaccgatggttcctccagcggcggcgatgaagaagtgggcgagcatcgcgagattagtgccgaagagacggcggagatgctgaaaaactcgcactcggtgatcatcaccccgggctacggtatggcggtggctcaggcgcagtatccggtagcagaaattaccgagaagctgcgggcgcggggtatcaaagtacgctttggtattcatccggtggccgggcgcctgccggggcatatgaacgtcctgctggcggaagccaaagtgccttacgacatcgtgctggagatggatgagatcaacgacgatttcagcgacaccgacaccgtgctggtgatcggcgccaacgataccgtcaacccggcggcgcaggacgatccgaagagcccgatcgccggcatgccggtgctcgaggtgtggaaagcgcagaatgtggtggtctttaagcgttcaatgaacaccggttacgccggcgtacagaacccgctgttctttaaagagaacactcatatgctgtttggcgatgctaaagccagcgtcgatgcgatcctgaaagcgctgtaa

SEQ ID NO: 136763 - DNA, 222 bp, Enterobacter cloacae
atgttccggttcttacatcagacagaggatattatggataccgagttaaccccaacgcagatggccatcgaattcttacgccgcgacactaccgtcatgaccccagcgcagtatctgaaaaaacttaaactgctggagctggagtttgctgacctgatggcgctctcctcgctggagctgaaagaagagatcgatctggcctggcgtctgggtatccactaa

SEQ ID NO: 136764 - DNA, 951 bp, Enterobacter cloacae
atggcgaagtatcagagcatgctggtagtaatcgatcctaaccaggacgaccagccggcgctaaggcgagcggtgtacctgcaccaacggattggtggacgcatcaaagcctttttgccgatctatgatttttcctatgaaatgaccaccctgctgtcgccggacgagcggacggcaatgcgccagggcgtcattgcccaacgaacggcctggatccgcgagcaggcgaaattctacctggaatcgggcgtgccgattgacgtgaaagtggtgtggcacaaccgtcccttcgaagcgattattcaggaggtggtcagtgagaaacacgatctgctgctgaagatggcccaccagcacgacaaactggaggcggtgatctttaccccgacggactggcatctgctgcgtaaatgcccttgcccggtgtggatggtcaaagaccagccgtggccggaaggcggcaaagcgctggtcgccgtcaatctcgccagcgaagagaattatcacaacacccttaacgagaagctggttcgcgagacgctgtcgctggcggaagaagtcaaccacactgaagtgcacctgatcggtgcctacccggtgacgccgatcaatatcgcgatagaactgccggattttgatcccagcgtctacaacgacgcgatccgcggccagcatctgctggcgatgaaagcgctgcggcagaagtttggcatcgatgaaaaattcacccacgtcgaaaaaggactgcctgaagaggtgatcccggacctcgccgagcatctgcaggcggggatcgtggtgctgggaacggtcggacgtaccggcctgtcggcggcgttcctcggcaataccgcggaacaggttgtcgaccacctgcgctgtgacctgctggtgctgaaaccggaggcctaccagacgccggtggaactggacgacgacgacgacgattaa

SEQ ID NO: 136765 - DNA, 348 bp, Enterobacter cloacae
atgcccaatctgcgtcagcagatgatgcgcctgatgagcggtgagattaaaggcgaccaggatatgatcctgttgctttccaaaaagaatgccgaagagcgcctggccgcgtttatctataacctttctcgtcgtttcgcccagcgcggcttctcaccacgtgagttccggctgaccatgacccgcggcgatattggcaactatctcggcctcaccgtcgaaaccatcagccgtctgctgggccgttttcagaaaagcggcatgctggcggtgaaaggcaaatatatcactattgaaaacagcgatctgctggcccagctggccgggcaggcgcgcaacgtcgcttaa

SEQ ID NO: 136766 - DNA, 537 bp, Enterobacter cloacae
  misc_feature (482)..(491): n is a, c, g, or t
atgatccctgagaagcgaattattcgacgcattcagtctggcggttgtgcaatccattgtcaggattgcagcattagccagctctgcatcccctttactctgaacgagcatgagcttgatcagctggataatattatcgagcggaaaaagcctatccagaaaggtcaaaccttgttcaaagccggtgatgagctgaagtcgttgtacgctattcgctccgggaccatcaaaagctataccatcaccgagcaaggtgatgagcagatcactggcttccatctggcgggcgacctggtgggctttgacgccatcggcaccggtctgcacccgagctttgcgcaggcgctggaaacctcaatggtctgcgagatccccttcgaaactcttgacgatctttccggaaaaatgcccaatctgcgtcagcagatgatgcgcctgatgagcggtgagattaaaggcgaccaggatatgatcctgttgcnnnnnnnnnnaaatgcccaatctgcgtcagcagatgatgcgcctgatgagcggtga

SEQ ID NO: 136767 - DNA, 516 bp, Enterobacter cloacae
atgttgaccttgctgcaggataaaatggataccccgctggggccgttgtgggtgctttgcgacgaacagtttaatttgcgcgccgtcgagtgggacgagcaccgcgatcggatggaaacgctgctcgacgttcactatcgccgggaaggctatcagcgcgtcgactgccgcaatcccggcggtctcagcagtaagctgagcgactattttgccggcgatttagccattatcgagactctgcctaccgccaccgccggcaccccttttcagcgccaggtctggcaggcgttacgcgatatcccctgtggccaggtgatgcactacggccaactggccgaggcgctcggtcgtcccggcgccgcgcgcgcggtgggcgccgccaatggcgccaatccggtgagtatcgtggtgccctgccatcgggtcatcgggcgcaacggcaccatgaccggctatgccggcggcgtacagcgtaaagagtggcttttgcgtcacgagggctatctgttgctttga

SEQ ID NO: 136768 - DNA, 159 bp, Enterobacter cloacae
atgcaatatatactgactggcgtaatcgtactgatcttcagcggtctggttattcatggtatgtcgctgttgcttgagcgagggtatcgcgcgcttttcggcatattcgccggagccggagaagcgacccgtaagttcaaagtgaagatatcgcgttaa

SEQ ID NO: 136769 - DNA, 1527 bp, Enterobacter cloacae
atgagtatgtcatccataccgtcatcttcccccggcggaaagcgctatggctgggtagagaagatcggtaacaaggtcccgcacccgtttttgctgtttatctatctcatcgccgtgctgatcgctgccacggcaatcctctccgccctcaacgttggggtacaaaacccaactgacggttcgcgggtggtggtcaaaaacctgctcagcgtggaaggattgcactggtttttgccgaacgtgattaaaaacttcagcggtttcgcgccgctgggcgcgatcctcgccctggtgctgggcgccggctttgccgagcgggtgggcctgttaccggcgttgatggtcaagatggcctcgcacgtcagcgcccgctatgccagctatatggtgctgtttatcgcctttttcagccatatctcttccgatgcggcgctggtgattatgccgccgctgggagcgctgatgtttcttgccgtcggtcggcatcctgtcgctggtctgctggcggcgatagccggcgtgggctgcggctttaccgccaatctactgattgtcaccaccgacgtgctgctctccgggatcagcaccgaggcggcaaagtccatcgatgcctctttgcacgtcagtgtgatcgacaactggtactttatggcgacctcggtgatcgttctgacgctcgtcggcggactgatcaccgataagctggtcgagccgcggctgggccagtggcaaggcagtcgtgatgaaaagctgcagacgctgacgcccgcggagcggttcggcctgcgcatcgccggcgtggcgacgctggtattcgtggcggtcatcgccctgatggtggtccccgaaaacggtattcttcgcgatccggttcagcatacggtcatgccctcgccgtttatcaaaggcatcgtgccgctaattatctttttcttctttgtcgtgtcgctggcatacggcatcgccaccggcaaaattcgccgccaggccgacctgccgcagttgatgattgagccgatgaaagagatggccgggtttatcgtgatggtcttcccgctggcgcagttcgtggcgatgttcaactggagcaacatgggcaagtttatggccgtcggtctgacggacctgctggagagttcaggcatgaacggtgttccggcgtttgtcggccttgcgctgctgtcggcttttctgtgtatgtttatcgccagcggctcggccatctggtcgattctggcgccgatcttcgtgccaatgtttatgctgttgggctttcacccggcgtttgcgcagatcctgtttcgtatcgctgattcatcggtgctgccgctggcgccggtgtcaccgtttgtgccgttgtttctcggctttctacagcgctaccggccggatgcccgcctcggcacctactactcgctggtgctcccttacccgctgatttttctcgccgtctggctgctgttgctggtgggctggtatctggtgggactgccgatcggccctggcatctatccgcggctgtcttaa

SEQ ID NO: 136770 - DNA, 225 bp, Enterobacter cloacae
gtgggtaccccgctgcacagctggcagctggtgagccagggcagaacctccatagcccataaagggatgttgctggcggggaaagtcctcgcggcgaccgccatccgtttattcagcgacagcgccctgctggcggccagccagcaagagctcaggcaggtactggccgaacgcccctatcgttgcccgatcccggcggaggtgagtccgtccgttttacgataa

SEQ ID NO: 136771 - DNA, 1215 bp, Enterobacter cloacae
  misc_feature (508)..(517): n is a, c, g, or t
  misc_feature (1124)..(1133): n is a, c, g, or t
atggaagccatttttcagtttgtggacgaggtggttgaggcacaacgcgacacttactgcgccatcgccgacgacatctgggaccacccggagacccgctttgaggagttctggtcagcccaacggctggccgacgccctggaggcggaaggttttcagctcacccgcgatgccggcgggatcccgaatgcctttatcgccagcgtcggtgagggccaaccggtcattgccctgctcggcgaatttgacgccctggcgggactcagccagcaggcccacagcgcggaaccgacgcccttgacaccgggagccaacggccacggctgtgggcacaatctgctcggcaccgcggcattcgccgcggcggtcgccgccaaaggctggctgcagcagcacggcgacagcggcactctgcgcttctacggttgtcccggcgaggaaggcggttcgggaaaaacctttatggtgcgcgaagggttgtttgatgatgtcgatgcggcgctgaccnnnnnnnnnnccggcaccgcggcccacgccgctaattcgccgcacctgggccggagcgcgctggatgccgtcaccctgatgaccaccggcagcaatttcctcaatgaacatatcatcgagaaggcgcgcgtccattacgccattaccgataccggcggcgtctcgcccaacgtggtgcaggcgcaggcggaagtgctgtatttgatccgcgcgccggagatggccgacgctgagcaaatcttcgcccgcatagagaagattgcccagggggccgcgctgatgaccgagacccaggtcagctgccgctttgaaaaagcctgctccagctatctgcccaaccgcacgcttgaggcggcgatgtatcaggcggtctgtcattacggtacccccgcctggagcgacgaggaacgcgcttttgccgcggcgatccgcgccaccctcagcgccaacgatattaacaacagcctgaacaatattgccggcaccagtggcgaggaaggcaaaacgttcgctcgtcgccaccgcgacaccttgctgattgatgaggtggcgccctgggcggccacggataacgtcctcgccggatccaccgacgtcggcgatgttagctggaaagnnnnnnnnnngcttcagcccgtgcttcgcggtgggtaccccgctgcacagctggcagctggtgagccagggcagaacctccatagcccataa

SEQ ID NO: 136772 - DNA, 1311 bp, Enterobacter cloacae
atgccgcaacttgatgaatacctccgccagctggcgccctccatgacccaatggcgccgcgattttcacctgcacgctgaatccggctggctggagtttcgcaccgccagtaaggtcgcggatattcttgacgggctaggctatcagctggcgctaggccgcgacgtcatcgatgccgacagccggatggggctgccggacgaggagaccctggcccgggctttcgaacgcgcccgcgaacagggcgcgccggagcgctggctgccggcgtttgaaggtggtttcgccggcgtggtggccacgctcgacaccgggcggcccgggccaaccctggcctttcgcgtcgatatggatgccctcgatctcaacgaacagcatgacgatagccaccgcccccatcgcgatcatttcgcctcctgcaacgccggcatgatgcacgcctgcggccatgacggccataccgccatcgggctggggctggcgcatgtgctcaagcagtatgccgcccagctcaatggcgtcattaaactgattttccagcctgctgaagagggtacccgcggcgcccgcgcgatggtggccgccggcgtggttgatgacgtggattatttcacggcgatccatatcgggaccggcgtcccggcaggtaccgtcgtctgcggtggagacaactttatggccaccaccaaattcgacgtgcagttcagcggcgtggccgcccacgccggcggcaagcccgaagacgggcgcaacgcgctgctggccgccgcccaggccgcccttggcctgcacgccatcccgccgcacagcgctggcgcctcgcgggtcaacgtcggggtgatgcaggccggtaccgggcgcaacgtggtgccctcttccgcgctgttaaaagtggaaacccgcggcgaaagcgaagccattaatcagtacgtgttcgagcgagcgcagcacgtcgtcgccggggctgcggcgatgtacgaagcccgctacgaactgcgcatgatgggcgcggcgaccgccagcgcaccgtcgccggcgtgggtggactatctgcgcgaacaggccgcccgggtgcccggcgtgcaacaggcggtggatcgcatcgccgccccggcgggctcggaagacgccaccctgatgatggcccgggtccaggcgcgcggcggcctcgcctcgtacatgattttcggcactgaactcagcgccggtcaccacaacgaaaagtttgacttcgacgagagggtgatggcggtagcggtcgaaaccctggcgcgcgtcgcgcttaactttccctggcagcggggggtgtaa

SEQ ID NO: 136773 - DNA, 909 bp, Enterobacter cloacae
atggcatttcagattaaatttcatcaaattcgcgccttcgtcgaagtagcccgggaaggcagtatccgtggcgccagccgggcgctggcggtctcgcagccggcgctgaccaaagcgattaaagagctggaggaggggctttccgcccagctgttcgtccgccgcagccagggggtggcgttaaccgacaatggcgaaagtttttatcaacatgcgagcctgatccttgaggagctgcgggcggcgcaggatgaactgctgcagcgccagggggaacaggccgggcaaattaatattggccttggcgccagcgtcgcccggtcgctgatgccgtcggtgatctgccgctttcatcagcagcatccgcaggtgaaggtacggatcatggagggtcaactgctggcgatgattaatgagctgcgccagggggagctggatttcaccattaatacctattaccccgggccgtacgaccatgaattcagctttgagaaactgtttgagaaaccgttcgcggtgttcgcccgcgcgggccatccggcggcgcaggccacctcgctgggggagttgatggatcaccactggaccatgccgacgccgcgcggcagctacttcaagcagctgcaggaatgcttcgaacagctgggacgggagccaaaggtggggatcgtctgcgaaacgttctcatcctgcatcagcctggtggtgaaaagtgattttctcagcatcctgccggtggagctgggcaacgacccgctgatggccgacaaactggtgatgatccccatccgtgaagtgttacccaccgccacctattatctgatccagcggcgcgatacccgacagacgccgctcacggcgtcgttaatcaccctgttccgccgccagagccgacaattgtttccttaa

SEQ ID NO: 136774 - DNA, 519 bp, Enterobacter cloacae
atgaaccttgatgacaaatccctgtttcttgacgccatggaagatgtccagcctctgaaacgtaataatgacgtgcactggcatcccgggcgtaacagccgggccccgcaacgcgtcgataccctgcagctggataattttctcaccaccggctatctcgatatcgtgccgctcgccacgccgctggagtttaagcgagaagggctgcaggcgagcctctccctgctgcgccagccggtggaacagtgccggcagatgctcttcgcctttatggtacaggcgcagaaagaggggttacgcaatgtgctgatcgttcacggcaaaggccgcgacgaccagtcccacgccaatattatccgcagctatctggcgcgctggctggaagagctgccggaggtgcaggccttctgcgccgcgcttccgcatcatggcggcagcggcgcctgctatgtcgcgctgcgtaaatcggcgcaggcgaagcaggagacctgggagcagcacgccaagcgcagtcgttag

SEQ ID NO: 136775 - DNA, 807 bp, Enterobacter cloacae
atggacaagcatccagacgatttactgaccggcgacggcgatccgtttaaaggcgatcctaactttatggcctccctggcgcggggtctggaggtgattcaggcgttcacgccgcagcggcccctgctgtctatctcacagatcagtcagaagaccggcatcccgcgcgccgcggtgcgccgctgcctgtataccctgagcaagctggggttcgtgtatgccgaagacggtaagaatttccagctgcggccgcggatcctggcgctgggccacgcctggctggcctcgacgccgctggcgcgttcggcgcagccggtgctgcggcatctaagcgaaatgctcaatgagtcctgctccatcgccaccctcgacggcgacgatatcctgtatatcgcccgcgcctccagctcgcggattatgaccatcgacctggatatcggcagtcgccttccggcgtgggcgacctcgatgggccgggtgctgctgagccatcagccggaggagaagctcaacgatatgctgggccgggtgaccatgatccgctataccccacagacggtggattcggtggcgaagctgcgcgccgaactgaaacgggtgcgtcagcaggggtatgccctcaacgatcaggagctggagatggggctgcgctccctcgcggtcccgctgtttaacgctcaggggcaggttcaggcggcgctcaacgtcggggtgcatgcgggccagatgacggcccgcgagatgatcgagcgcgtgctgccggagctgcaaaaagccgcccacgagctgacgctgcttctgcgctaa

SEQ ID NO: 136776 - DNA, 687 bp, Enterobacter cloacae
atgattgataaaagcgtatcgacgctgagcgaggccatcgccgggatccacgatggggcgactattatgatcggcggctttggccccgccggccagccgacctttctgattgacgccctgattgaccagggcgctcgcgacctgaccatcataaataacaacgccggcaacggggaagtgggtctcgccgcgctgctcaaggcgggccgggtgcgcaaaatgatctgctcctttccgcgccaggtggattcgcagattttcgatgatctctaccgtcgcggcaaagtggagctggagctggtgccgcagggcaacctcgcggcgcggatccaggcggccggcgccgggctgggggcggtatttacccccaccggctacggcacgccgctggcggaaggcaaggagacacgggaaatcgacggtcgccactacgtgctggagtacccgatcaaagccgatttcgcgctgattaaagctcaccagggcgaccgctggggcaacctggtctatcgcaaggcggcgcgcaactttggcccgatcatggcgacagcggcgaaaaccaccatcgtagaggtctcgcagctggtggcgctgggcgacctcgacccggaaaacatcatcacccccggcattttcgtccagcgcgtcttctcgctggaaaacctgactgccgcacaacacgcctga

SEQ ID NO: 136777 - DNA, 657 bp, Enterobacter cloacae
atgcaaaaactgacccgtgacgaaatggcccagcgcgtggcccgcgatattcccgaaggcgcttacgtcaacctcggcatcggcctgccgacccgcatcgccaattacctgcccgctgacaaagaggtgttcctgcacagcgaaaacggcctgctggggatggggccgaaaccgcagcccggggaagaagatcccgagctgatcaatgccggtaaagagtatgtcaccctcctgcaggggggctgctatttccaccacggcgactccttcgccatgatgcgcggcggccatctcgatatctgcgtgctgggggcctatcaggtttccgccagcggcgacctcgccaactggagcaccggtgcgccggatgcgatcccggccgttggcggggcgatggatctggccatcggcgcccgccaggtgtttgtgatgatggaccacctgacccgtgacggcgagtgcaagctggtggcgcagtgcagctacccgctgaccggcgtcggctgcgtcagccggatctataccgacctggcggtgatcgacatcaccgaccgcggcccggtggtgcgggaaatctttaacggcctctcttttgaagagctgcagcgcatcactccggtggcgctgacctttcaacaactggcggaaagcgcgtaa

SEQ ID NO: 136778 - DNA, 1110 bp, Enterobacter cloacae
  misc_feature (1047)..(1056): n is a, c, g, or t
atgaatcaggcatttatctgtgatgcggtgcgtacaccctttggccgtttcggcggtgccctggcgacgatgcgcgctgacgacctggcggcgctgccgctgaaagcgctgctggcgcggaacccgggactggatccctcgcgcattgacgatgtgatctttggctgcgccaaccaggccggggaagacaaccgcaacgtggcgcgaatggcgctgctgctggccggcctgccggagagcgtgcccgggagcaccatcaaccgcctgtgcggttccagccttgacgcgatcggcgttgcggcgcgggcgattaaaagcggggagacgcagctgatgatcgccggcggggtggagagcatgtcccgcgcgccgtttgtgatggggaaagcggagagcgcctttagccgcagcatgcagatggaggataccaccatcggctggcgctttattaacccgcagatgaaagccctgtacggcgtgcattccatgccggagacggcggaaaacgtcgccgatgagtttgccatctcccgtgccgatcaggacgcgttcgccttacgcagtcagttgcgcaccgccgcggcgcaagaggcggggcgtttcgccgatgagctgatcgccgtccaggtgccgcagcgcaaaggcgagccgctgctgtttagccgcgatgagcacccgcgcagcacctcgctggaggcgctggctaaactgcgcggcgtggtgcgcgccgacggcagcgttaccgccggtaacgcctccggggttaacgacggcgcctgcgcgctgctgctggccagcgagacggcgctgtcggctaacgatcttcagccgctggcccgggtggtcggcgtggcgacggcgggcgtggcgccgcggatcatgggctttggcccggcgccggcggtgcgcaaggtgctggcgcagaccggcctgacattaggccagatggatgtcattgagctgaatgaagccttcgccgcgcaggcgctggcggtgacccgtgatttgggcttaccggacgatgccgcccacgtgaaccctaacggnnnnnnnnnngggcgattgcgctgggccacccgctcggcgcctccggcggccggctggcgatga

SEQ ID NO: 136779 - DNA, 189 bp, Enterobacter cloacae
atgagtttgttgaccccgatgctgcgcagcagtccgctaaccgactggttcagcgacgcgcagcgggtgcagggcatgctggattttgaagcggcgctggcgcaagcgcaggccgccacgaagccatcgattttgccgcgctgggcgaggcggcggtgggagccggtaatctggccatcccgctggtga

SEQ ID NO: 136780 - DNA, 978 bp, Enterobacter cloacae
gtgggagccggtaatctggccatcccgctggtgaaacagctgacggcccaggtaaaagcgcgagatcccgaggctgcgcgctacgttcactggggcgctaccagccaggacgccatcgacaccggactggtgctccagctgcgcggggcgctggatgccgctgagactctgcttgagcagctgttggcggccctggcactccaggcggatcgttatcgcgataccgtgatgccgggacggacctggatgcagcacgcgctgccggtgacctttggcctgaagctggcgggcaccctcgacgcgctcctgcgctggcagcagcggctgcgcgagatgcgtccgcggctgctggcgctgcagttcggcggcgccgcgggcactctggacgcgctaaaagagaaagggccggcggttggcctggcgctggcgcagaccctcggtctgtcgctgccggatacgcataagcgcaatccggtggcctgcgcggcgatcctgaccgccgcccagcgtacgccggggctgatggcgacgctctacgccagccaactccagcagcatgagcgggcgctgggcggctggcaggcggagtgggagaccctgccggagctaattaccctggtgggcggggcgttggcgcaaagcgaggcgctggtgcgcgacatgcaggttttcccgcagaaaatgcgcgccgatctcgatatcacccatgggctgattatggctgaggcggtgactctggcgctggcggaattcattggcaaagccgaggcgcatcatcatatcgaggcgctgtgccgccaggcgctggaccgtcactgcccgctggtcgatctgctcgcggctgacccacaggtcagtcagtatctctctcgtgaacgcttaaccacgctgctggacccggcaacggcgaccggcagcgccgaacgctttgtgcgccaggtgctggcgcgttatcaggagcaacgtgatgaatcttga

SEQ ID NO: 136781 - DNA, 765 bp, Enterobacter cloacae
atgaatcttgattatcaactcgacgggccggatggcgcgccggttatcgtcctctccaactcactgggcaccacccgggcgatgtggcagccgcagatcgaggcgttaaccgcccatttccgggtgctgcgctacgacacgcacggccacggtaaaacgacaaaaaatggcaaagtaaccctcgcccagttgggggaggatgtgattgcgctgctcgatcacctgaatatcgaccgcgcctggttctgcgggatctcgatgggcggtctgaccggcctgtggctgggacgctttgcgccggagcgttttcatggtctggcggtcgccaacaccgcggcgcgcattggcgatcaggccagctggctgtcgcgggcgcgggccgtacgtcaggaggggatggcggtggtggccgccggagcggcagaccgctggttcacacacgcgtttcgccagaaggcgccggaggtggtcgaggcgctttgtcaccagctgacccataccgatgctgaaggctatgccgcctgctgtgaggcgctggccgccgccgacctgcggggcgaagtggggcagatcccgctgccgacgctaatcatcgccggggaaagtgaccctgtcaccacggtcggtgacgctcatttcctgcagcagcagatccccgcctccgaggtggtggttctggcggcatcgcatctgtctaacattgaggcgccgaaaagctttacttcggcgctgctgagctttttccagggggaacgccatggatga

SEQ ID NO: 136782 - DNA, 390 bp, Enterobacter cloacae
atggatgataaacagcgctatcaggacgggatggcggtacggcgcaaagtattgggcgacgcccacgtcgaccggacgctgcagcatctgacgccgttgaatgatgagtttcaggactttattacccgctatgcctggggcgagacctggacgcgtccggggctcgatcaccatacccgcagcatgatcactattgccatgctgatcgctctcaatcgcgaggcggagctgaagatgcatctgcgcgcgtcgtttaacaacggggtgacccgcgatgagctgaaagagctgatcatgcactctgcgctgtactgcgggctgccggcggccaatgccacgatgcatctggcgcagcaggtgtttgacgacatcgacgccgcgcagggttga

SEQ ID NO: 136783 - DNA, 1137 bp, Enterobacter cloacae
atgaaatcgttttccgggaaagcgtctttaatggccacactggttgccgcgctggtcggcgccagcagcgcgcaggcagcggaaattaaaatcggggtggtattacccctgagcggcgccctcagcggctatggccagccgtcgcagaaagggctggacattattcaggccatcaccccaacgttaaaaaatggcgataccatcaagcttatcgttatcgatgataaaagcgacaaagtcgaagcggccaacgccatgcagcgcctggtctccagcgataaagtggatgccgtgatcggggaagtcacctcctccaataccctggcgatgaccaaaatcgccgacgacagcaaaacgccgctggtctcctccaccgccaccaacgaccgcgtcacccgcaaccatccctacgtcagccgggtctgcttctcggacagcttccagggggtggtcggggccaatctggcctcccgcgatctgaaagccaaaaccgccgccatcgtgtttgacagcagcaacgactactccgtcggcctggcgaaagcgttccgcacccagttcctgaaaaacggcggcaccattcccatcgaggtccaggccccgggcggcagcaaggactttaaagcccagctggcgagcgtcaaggcgaagaatgtcgacatgatttacatgccgatctactacaccgaaggggcgctgattgccgtgcagtctaaacagctggggctcaacaaaccggtggtgggcggcgacggtctggccgcggatcaggtcttcttcgatgtcggtaaagacgcggtcaacggctatatgaccaccgattattactcgccgaacgccaaagagcagaccccggcgggggaaaccttcatcaaagcctgggaagccaaataccagcagccgacccatacctggggcgcaatggcggcggacgcctataacgtcatcgtcaacgccatgaaccagtgcagcgatccccacgatcgggtctgcgtaaatgaaaaaatccgcgccaccaaagatttccagggggtgaccggcacgctgacgttacagaacggcgatgccattcgcagcgcggtcatcaacgaagtgaaagatggcaagctggcgtttcgtaccgtggttaacccttaa

SEQ ID NO: 136784 - DNA, 900 bp, Enterobacter cloacae
atggacggcgccatttttctccagcaagtggtcaatggaatgagtcttgggggcatgtacgccctgattgccatcggttatacgatggtttatggcgtgctgcggctgatcaacttcgcccatgcggacgtgatgatggtcggcgcgtttagtacgctgtttttattttcttcggttgggctacccttcggggtagccgttttcctgaccctcgggctgtgcggcctgtttggtatgctgattgaccgggtcgcctatcgtccgctgcgtcaggcctcgaaaatctccatgctgatcaccgccatcggcgtcagcttctttctcgaaaacctgtttaacgtactgtttggcggcagctcgcgcttcttctccgcccctgactttttcaaccagacccgggccttcggcagcgtcatcattaccaacgtggcgtggattgtgccgctgatcaccgtcctgctgctgctggcgatcctctggctgctgtaccgcacccgctatgggatggcgatccgcgcggtggcctttgacgtcaacaccgtgcgcctgatgggcattgacgccaaccggatcatctccctggtcttcgccctcggcagtagtctcgcggcgctcggcggcgtgttctactccatcagctacccgacgatcgatcccctgatgggcgtgcttatcggcctgaaggccttcgccgccgccgtgctgggcgggatcggcagcgtcaccggcgcggtgctgggcggctttatcctcggttttaccgaggtggtcgccgtggcgatcttccccgaactgggcggctataaagacgctttcgccttcctgttcttgattctggtcctcttgttccgcccggtcggcattatgggcgacgaacgtctggaaaggagccgtttctga

SEQ ID NO: 136785 - DNA, 252 bp, Enterobacter cloacae
  misc_feature (239)..(248): n is a, c, g, or t
atgctcaacgcgacgacgaccgccggggcgcagctgcgcaacctggtaattattgtcatctgtatcgcgctgctggccggaatcaacgtggttttcaatgactacattgttcgtgtcatcagcaccatttttatctttatgatcctcgcggtcagctacaacctgatcaacggcgtgaccggccagctgtcgctggagccgaacggcttcgtggcggtgggcgcctacgtcaccgcccnnnnnnnnnnctga

SEQ ID NO: 136786 - DNA, 780 bp, Enterobacter cloacae
atgtttgaaatggccgcccccagcccgtggatcctcagcctgcacgcgggcttcctccctgccctgctgataagcggcctgtgcgcggcggcgctggcggtgtgcctcgccgtgccggtcttccgggtacgtggcgactacctggccattgtcaccctcggctttgggtttatcatcaagatcctcgccattaacaacccgcaaatcaccaacggcgccatcgggctgaacgatattccgcagcagccgcatctcctgttctggtgcgggctgttcgccctgctggccaccggcatgatcctccagctggtgtggtcgaagtatggccggatgatgaaagctattcgcgacgatgaagatgcggcgatcgccatgggggtcaacaccttccgcattaaaacctgcgccttcgccaccagcgccttcttcgaagggatcggcggcggtctgctggcttccctgctgaccaccatttccccagggctgttcgactttatgctcaccttccagctgctgattattatcgtcctcggcgggctcggcagcaccaccggcgccctgctcggcaccgtgctggtggtcggcagcggcgagtggctgcgcttcctcgatcagccgctgcagttcttcggtcacgatctcggcgcgtacccgggcctgcgaatggtggtcttctccctgctgttgctgatcatcatgctcttcgcccgcgaggggctgctggggaaaaaagagatttggcagaccggaagaaggagcggcggctatggcggaaaataa

SEQ ID NO: 136787 - DNA, 549 bp, Enterobacter cloacae
gtggtgaacgccgggatcgcccgcaccttccagaatatccgcctgtttaactccatgacggtgctggagaacgtgatggtcggactcgaccgcgccagccgctattcgctgctggaggcggccctgcatattggtcgctactttccggccgagcgggcggcgaaagccaaagcgatggccatcctggaggatattggcatcgcccacttcgcccatatgcaggccacaaacctaagctatggcaaccagcgcaaagtggagatcgcccgcgcgctggccaccgcgccgaagctgctcctgctcgatgagccggccgccgggatgaacccgaaggagaccgaggatctggcggagctgatcttccacatgcgccatgactatcagctaagcgtcctgttaatcgagcacgatatgcccttcgtcaaccgcctgtgcgagcgggtgatggttctggagtacggtaagccgttgttcagcggcctgatggccgaggcgatccagcatccggacgtcatttccgcttatctgggagaagccaattatgcttaa

SEQ ID NO: 136788 - DNA, 696 bp, Enterobacter cloacae
atgcttaacgcccgggaactgaaggtcttttacggcgtgatccagggtctgaagggcgtcgatatcgacgtctatgaccgggaaatcgtcaccctgatcggcagcaatggcgccggtaaaacctccaccctgaacgggatcgtcaacctggtgcgctccagtgggcgcgtcagcttcctcaacgacgatatctcacgcagccagacccaccagatcgtgcgtcgcgggctggcgctggtgccggagggacggcgcgtctttaccaacctgaccatcgaagagaacctgcgcatgggcgcttacaataatctcgccggctacgcccgcctgcgcgatcgcatgtacgccctctttccgcggctcaaggagcggcgccatcagatggcgggcaccatgagcggcggcgagcagcagatgctggccatcgcccgggcgctgatgagcgagccggtgttattgatgctggatgaaccgagcctcgggctggcgccgaaaattgtcggcgagctgttcggcatcattaagcaactgcgcgaagagaatatgacggtgctgctggtggagcagaatgcgacggccgcgctggcgatcgccgatcgggcgtatgtcctggagaatggccggatcaccttgtcaggcgcggcgcgggagatgctgactaatccggaaattaagcggatgtatctggggggatag

SEQ ID NO: 136789 - DNA, 171 bp, Enterobacter cloacae
gtggcattgtggcaacggttaacgggctggctggcttttttgtccaacggtgaagccggacagcaggatacccagcgcgtcatggaggcgatcctgccggtagccagcctctacggcgtggacattggcaacgtggaaacccggtggttccgtcatgataagacatactga

SEQ ID NO: 136790 - DNA, 810 bp, Enterobacter cloacae
atgcgcaataaaaccacaaaaatcgcactggcgctgggtatgctgctgctcgcctcgcaggcacaggcggaccagctggctgacatcaaagccgccggcgtcgtaaaagtcgccaccttcgacgccaacccgccgttcggctctgtggacgccaaaacccaccatatcgtcggctacgacgtcgactttgcccaggcgctggcgaaagcgctcggcgtcaaactcgagctggtggccaccaacccagccaaccgtattccgctgctgcagtccggcaaagccgacctgatcgtcgccgacattaccatcaccccggagcgggcccaggttattgatttctcaacgccgtatttcgtcaccggccagcagttcctcgtgccggccggctctccggataagctcgatgagtacagcaaagcgcgcatcggcgcggtgaaaggcaccaccggcgaacaggccctgcaccagcgtttcccgcaggctcgcgtcctctcctatgacgatattccgctggccctgaccgccctgcgcaacggcaacgtccaggccatcacccaggacagcaccatcctcgccggtctgctggcggaagcgccggataaagccaagtttaaaattctgcccgacctgctcagcaaagaagagattggcgtgggcgtgaagaaaggcgaaccggccctgctgaaagccgtcaacgatgagctggtgaagctggagaaaaccggcgaagccgcgaaaatctatgatgtctggtttggccctgccactaaaacgccgcagccgcgcgcctttaccatagaagcgaaataa

SEQ ID NO: 136791 - DNA, 786 bp, Enterobacter cloacae
atgttctcgggtttactctcccactccgcggctccggccgcggatttttcacgtctgcagcgcgccagcattacgttccgtgatgtggccaagcgctacggcgatcatcaggtacttaacgcgatcaacctgcaggtcgagcccggcgaagtggtggcgatcctcggcccttccggatcgggaaaatcgacgctgatccgcttgatcaaccagctcgaatccttaagcggcggcgagatcctgatcgacggcaaaccgaccagccggctgagcggcagcgccttgcgccagctcaacctttacgcccacctgacggcgcaggagaacatcactctggcgctggagcgcgttcatggctgggaaaaaagcgcggctcaggcgcgggcgctggcgctgctgcgtcaggtcggactggaagaaaaagcgcagcagatgccggcgcagctctccggcggccagcagcagcgggtggccatcgcccgcgccctggcctcctcgccgcagattatcctgttcgatgagcccacctcggcgctcgacccggagatgatcggcgaagtgctgcaggtgatgaaaaccctcgcccacagcgggatcaccatgctggtggtgacccacgagatgcagtttgcccgcgaaattgccgaccgggtggtgtttatcgacggcggcgacatcctcgaagtcgccccgccggctgagtttttcgcccatccgcagcatgcccgcgcgcggcgttttctgcagaaggtgctggatccgctgcaccaggagagcctcgagtga

SEQ ID NO: 136792 - DNA, 753 bp, Enterobacter cloacae
gtgacgccgatgcttgactggcacggcgtcctgagcgggcagccgttgcaatggattatctctggttttctcaccaccgtctgggtcagcgtcgccgggatcctgctcgccaccctgctggcggtcctgctgctggccctgcgcctcggcggcggacgcgcggggcgcggactggtggccgcgtgggtctcgttgtttcgcaacactccgctgctggtccagctgctgttctggtactttgccgcctggaacctgctgccgctggcggtgaaggaggtggtgaacgacgaacacgcctggtccattttgccgggtaacgtctggtggctgacgccggagttcctctgctcgatgtgggggctgggggtctttacctccgcctttctggtggaagagatcgcctccggactgcgcgccgtcagccacgggcagcgggaagccgcgctgtcgcagggctttacgccgtggcaggagctgcgctttatcctcctgccgcaggggctggccaacgcctggcagccgattgtcggccagtatcttaacctgatgaaactctcatcgctggccagcggcatcggctttgcggaactgacctatcaggtgcggcagattgagagctataacgcgcacgccctggaggcgtttgccgtcggcaccgcgctgtacctggcgctgggggtggcgatgggcgtggcgctcacgcgtctcggcccgggaagaaaactgcaacggagcgcccgacatgaacgctaa

SEQ ID NO: 136793 - DNA, 690 bp, Enterobacter cloacae
atgaacgctaatctggcggtgatcgccgataacctcgattacctgctgtggggccgactagcggagggccagcccggcggcgtggcgctgaccctgctgatggccatcggcgccaccctgctggcgctgccgggaggcattgcgctggcgggcctggcctggcgctacggcgggctggtgcggcgtctgctgtttctgtgggcggaaattatccgcggcatcccgctgatatttgtcatcttctggctgtggtatctgctgccgatgctgaccggcggcgatctgcccggcgcggtgaccgtgaccctggcgctggcgtggtttaccgccgcctcggtgatgcactcggtgctggccgggctgcagtcgctgccgaaaggacagtatgaggcggcgctgacccaggggttcgctcccgggcaaacgctgcgcctggtgctgctcccgcaggcgctgcgcaacgttcagccgtcgctggtggggatctttatcggcctgctgaaggacacttcgctggcgtttatcgtcaacgtcccggagctgaccaccgtggccggccaggtcaacaaccgggtgcagatctatcccctggcgatcttcgtcttcaccggcgcggtgtactacctgctgtgctgcggtctgagcctgctggccagccggcgctttacccgccgcgcgaccaccagataa

SEQ ID NO: 136794 - DNA, 711 bp, Enterobacter cloacae
atgtccaggcgacgtggcgcaacattaactaaggccctgctgacggtgggctgcctgctggcagcgccgctggcgcaggcgatctcggtcggcaacctgaccttttccctgccggctgaagcggatttcgccagcaaacgggtggtcaacaataataaaagcgcgcggctgtaccgcatcgccgtcagcgccatcgatctcccgggcggcagcgaagtccgctcccggccggtggatggcgaactgctgttcgccccccgccagctggtgctgcaggcaggtgagagcgagtattttaaattttactatcatgggccgcgggataaccgcgagcgctactatcgggtctcgtttcgcgaaatccccacccgcaacctgacgaggcgcagcccgaccggcggcgaggtcagcatggagccggtggtggtgatggataccattctggtggtgcgcccgcgcgaagtgcagtttaaatggtctttcgataaggtggccgggacggtgagcaacaccggcaatacctggtttaagctgctgattaagcccggatgcgattcgaccgaagaggagggggacgcgtggtatctgcgtcccggggacgtggttcgccagccggcgctgcgccagccggggaaccactatctggtctataacgacaaatttattaagatcagcgatacctgtccgctgaagccccgtcccgcggagtga

SEQ ID NO: 136795 - DNA, 687 bp, Enterobacter cloacae
  misc_feature (590)..(599): n is a, c, g, or t
atgaacagctctcttgccgcggtggccgaaactgatttccagccgttcaccgatctcgctgccggccggcagcggaaggtcttaagcgtgcgtaatctgagtaaagcttatcaagcccagcacaaggtgctggacggcatcagctttgatctgcacgctggcgaaatggttggcatcataggccgctccggcgccggtaaatcaacgctcctgcatgtcctcaacggcacccacagcgccagcggcggagaaattcttagctacccggaagtcggtaccccgcacgatgtctcacagctgaaaggccgtgcgctcaatgcctggcgtagccactgcggaatgatttttcaggacttctgcctggtgccgcgcctcgacgtgctcaccaacgtcctgctgggccgcctcagccagacttcaaccctgaaatcgctgtttaaaatctttcccgcagccgaccgggcgcgcgccattgcgctgcttgagtggatgaacatgctgccgcacgcgctgcagcgggcggagaacctctccggcgggcagatgcagcgggtggcgatctgccgggcgctgatgcaaaaccccgggannnnnnnnnnaccccgggatcctgctggccgacgagcctgtcgcctcgctggatccgaaaaacactcagcgcatcatggatgtgctgcgcgagattag

SEQ ID NO: 136796 - DNA, 198 bp, Enterobacter cloacae
atggatgtgctgcgcgagattagcgagcagggtatcagcgtgatggtaaacctgcattcggtggagctggtcagggcctactgcacccgggttatcggcgtcgccagcggccagcttatttttgacgatcacccttcccggctgacgcaggatgtgctgcagcggctgtacggcgatgaagttagccaattgcattaa

SEQ ID NO: 136797 - DNA, 939 bp, Enterobacter cloacae
atgaaaaaatatatgactggcgcagttcgtttatccgcaatggtcgcgggcatgatgatggcatggcaggcagcggcggcgcagccgaaagagctcaatctgggcattctcggcggccagaacgccacccagcaaatcggcgataaccagtgcgtgaaggccttcctcgataaagagctgaacgtggataccaaactgcgcaactcttccgactattccggggtgatccagggcctgctggggggcaaagtcgatgtggtgctgagcatgtccccctcctcctacgcctcggtttatctcaataatccgaaagcggtggatatcgtcggcatcgccgtggacgacaaagatcagtctcgcggctatcactcggtggtgattgtcaaagccgactccccatacaaaacgctggacgatttaaaaggcaaagccttcggcttcgccgatccggattccacttccgggtatctgatccctaaccatgcgtttaaagaaaaatttggcggtaacgccgacaacaaatacaacaacaccttctccagcgtcaccttctccggcggccatgagcaggacatcctcggcgtgctgaatggccaattcgcgggcgcggtcacgtgggcctcgatggttggcgattacaacaccggctacactaccggcgcgttcaaccgcctgattcgcatggatcatccggatctgatgaagcagatccgcattatctggcaatcgccgctgatcccgaacggcccgatcctggtgagcaatgcgctgccggcggactttaaagcgaaggtcgtggcggcagtgaaaaagctggacaccgaggatcacgcctgctttatcaaagcgatgggcggtactcagcacatcggcccgggcagcgtggctgacttccagcagattattgatatgaaacgcgagctggtaagcgcgcgttaa

SEQ ID NO: 136798 - DNA, 873 bp, Enterobacter cloacae
atgaagacaacccacaccgaatttgaacgctattaccagcaggtacgctcgcggcaaaagcgcgatgccgtctgctggtcgctgctgctgctggcgctctattttgccgccggcagcgccgcggaatttaatctgctgactatctggcactcgctgccccacttctttgactatatggcagagaccattccgcccctgagcgccggcaacctgttcgccgatgtgcagaccaaagggtcgctggcctggtggggctatcgcctgccgatccagctgccgctgatctgggaaaccctgcagctggcgctggcctcgaccctggtggcggtcgccatcgccacggttttcgcgtttcttgccgccaataacgcctggtccccggcgccggtgcgctttgccattcgcgtgctggtggcgtttttgcgcaccatgcccgagctggcgtgggcggtgatctttgtgatggcgttcggcatcggcgcgatcccgggctttctggcgctgatgctgcataccgtcggcagcctgaccaaactgttctacgaggcggtggaaagcgcgcaaaacaaaccggtacgcggcctggcggcctgcggcgcgtccccgctgcagaaaattcgcttcgccctctggccgcaagtgaaaccgctgtttctctcctatggctttatgcggcttgaaatcaacttccgctcgtcgaccattctcgggctggtgggcgcgggcggcatcggccaggagctgatgaccaacatcaagctcgaccgctacgatcaggtgagcatcaccctgctgctgatcattctggtggtgtcggcgctggacatgctgtccggtcgtctgcgcctgtgggtactggaggggaaaaaatga

SEQ ID NO: 136799 - DNA, 885 bp, Enterobacter cloacae
atgagcgtctggcacatgcaaccggatatcgccgccagccggcggcaacataagcagctctatcaggtccaggggcgctacctgcgctacgtcgggctggtggcgctggcctgcctgctctattacgtctggttttttctgcagttcggcgtcagcggcgaacagctgaccaccggcctgcagcagattggccgctacctggcgcggatgttcgtctggcacgacttctggaactggccgttcggctattactttacgcaaatcggcgtcaccctggccatcgtcttcgccgggacgctgaccgccacggtgctggcgctgctgctctccttcttcgccgcccgcaacatcatgcgcggcgtggtgctggggaccctcgccctgctgatgcgccgcctgtttgatgtactgcgcgggatcgacatggctatctgggggctgattttcgtgcgtgcggtcggcctcgggccgctggcaggggtgctggcgatcatcatgcaggacaccggcctgctgggacggctgtacgcggaaggacacgaagccgtggaccgatctcccgggcgcgggctgaccgccgtgggcgcgaacggcctgcaaaagcatcgctttggcatttttacccagtcgttcccgaccttcctcgcgctgagcctgtatcagattgaatccaacacccgctccgcggcggtgctgggcttcgtcggcgccggcggtatcgggcttatctatgccgagaatatgcgtctgtggaactgggatgtggtgatgtttatcaccctgctgctggtggcggtggtgatgatcatggacaccctttccgcctggctgcgccgtcgttatatcggcggcgccgcggtgccgctgtatcagggcggacgctag

SEQ ID NO: 136800 - DNA, 192 bp, Enterobacter cloacae
atgatcatctcgatgaacgtctggaatttccctggaacaccgctggtcgcctttttagcaacgctgcggaacatggccaggaacagaagacccaaaaccaccgagaagaacatggagtcgatgttgatcgtccagaaggtggccggggggttatgtggatccaccagcgagaatgtacgcaggtccagctga

SEQ ID NO: 136801 - DNA, 927 bp, Enterobacter cloacae; identical to SEQ ID NO: 71822

SEQ ID NO: 136802 - DNA, 186 bp, Enterobacter cloacae; identical to SEQ ID NO: 15707

SEQ ID NO: 136803 - DNA, 183 bp, Enterobacter cloacae; identical to SEQ ID NO: 71824

SEQ ID NO: 136804 - DNA, 582 bp, Enterobacter cloacae; identical to SEQ ID NO: 15705

SEQ ID NO: 136805 - DNA, 234 bp, Enterobacter cloacae; identical to SEQ ID NO: 104436

SEQ ID NO: 136806 - DNA, 711 bp, Enterobacter cloacae; identical to SEQ ID NO: 71828

SEQ ID NO: 136807 - DNA, 294 bp, Enterobacter cloacae; identical to SEQ ID NO: 15700

SEQ ID NO: 136808 - DNA, 2739 bp, Enterobacter cloacae
atggcaaagctgctcaaggcaatgaaacgcccggcggcgctgtggggggtgccaatggtgcccctgctggctgtcacgggtgtaaccatcatcgttgctatctggacttccgtcgctctcctgttcttacttcctgtgcaatttctggtgatgaagtcccttaccagaaatgaaccgatgcggttcaatctgattgccgtatggctgagagcgaagggaaagccggtagcaaaccgtttatttggcgcaacaacatttatgcccgttgagcatgatgatgttgatatcaaggagtttctcgacgccatgaaactaaatcagtgtgccaccatcaagaagtacatcccgtactcatcgcacattcatcagcatgtggttcgttcccctaagagcgatctgtactgcacctgggaattgatgggaacgccgttcgactgcgagtctgacgagtcgctccagttcgggacgaaccagttacacgggctaatccgctcattcgaaggtatgccagttactttctatatccataacgaccgcaatacgtttaccgacaatcttcataaagattccggcaacccgtatgccgatgaagttagccgtctttactacgcttctgtcggtctgttccggcgcaaccgcctgttcctgacggtctgctatcgcccgtttgtcagccttgaaaaagcagaacgcaaacggatgaaagacagccagaaactaaaggagctggacggtgctttgctggaaatgctggaaataaaaagcacgctcgataccgcgctgtcgcgctatggtgcgcgacctctcggtacgtttaccgaaggaaacgcggtgttttcgtcgcaactggctttctatgaatatctgctaacgcaccagtggcgaaaagtgcgcgtcacccgtaccccggcctatgacgtgatgggggcggcggcgttgttcttttcggctgaatccgggcagataaaccacgccaacggtacgcaatatttccgggggctggaggttaaagagttctccgaagagaccgccacggggatgatggactcccttctttacgccccctgcgattacgtgatcacgcagtcctatacctgcatgtcacgcgaggaagcgaagaaagccattaagcgtacccgtcgccttttgatgagtgccgacgacgatgctgtttcccagcggctggatctggatgtggcgcttgacctgctgacatcggggaaaatcgcttacggcaagcaccatttttccattatggtgtattccccgtcgctggaaagcctggttgctgatacgaatgaaatcagtaacgcgctgaacaacatagggataacgcctgttccggcagaaatatcgctttcagcggcgtatatggcgcaactgccaggcaactacaacctgaggccacgtaaaggggagctgagtagccagaactttgtggagctggccgcgctccataatttctatccgggcaagcgcgataaagccccctggggggatgcgatggctttactgcgcaccccgtcaggcgatggctactatatcaacctgcataacacactggcagataaggacgaattcaacgagaagaacccggccagtacctgcatcctcggtacgaacggttcgggtaaaaccatgttgatgacgttctttgagatcatgcagcagaaatacgggcgcgaggatagcttctccccggatgccaaaaccaaacggctgacaaccgtttacctcgataaagaccggggcgcagagatgaacatccgggcgctgggtggccgttactatcgggttatcagtggtgagtctacagggtggaacccgttctcgttgccagcaaccaaacgcaatatcaatttcatcaagcaactgatgaaaatcctttgtacccgtaacggctcgacgatctccccacgcgatgaacgacgtctgagtgatgcggtcaatgctgtgatgaatgacgagccgcaatatcgcgtctacggcattacccgaatgctggaaaatttgcctgagccggctacgaaagaagcccaggaaaacggccttagcattcggttgtcacagtgggcgcagggcggtgagttcggctgggtgtttgataacgagtctgacacgttcgatatcagcaactgcgataacttcggcatcgacggaacggagttcctggacgatgcaagcgtatgtgcgccaatctcgttttatctgctgtaccgcattaccagcctgcttgacgggcgacgcctggtcattttcatggatgaattctggaagtggttacgcgacccggtgtttaaggactttgcttataacaagctgaaaaccatccgtaagctgaacgggatgctggtcgtcggtactcaatccccggcagagatcatcaaagatgatatcgccccggcagtgattgagcagtgcgggacacagattctggcggcgaaccccaacgccgaccgcgcacactatgttgacggtatgaagtttgaaccggaagtgttcgacgtggtgaaagggcttgacccgcaagcccgccagtatgttgtggtgaaaaatcagttcaagcgcggcgataccaaacgttttgccgctcgtgtcacgctcgacctgtcgggtatcggcagatacaccaaagtcatgagcggcgatgcccccaacctcgaaatattcgaatcgatttaccgggaaggaatgcagcctcatgaatggctcgatacctacctggctaaagcgctctga

SEQ ID NO: 136809 - DNA, 708 bp, Enterobacter cloacae; identical to SEQ ID NO: 27078

SEQ ID NO: 136810 - DNA, 243 bp, Enterobacter cloacae; identical to SEQ ID NO: 71832

SEQ ID NO: 136811 - DNA, 1074 bp, Enterobacter cloacae; identical to SEQ ID NO: 104430

SEQ ID NO: 136812 - DNA, 138 bp, Enterobacter cloacae; identical to SEQ ID NO: 71834

SEQ ID NO: 136813 - DNA, 684 bp, Enterobacter cloacae; identical to SEQ ID NO: 71835

SEQ ID NO: 136814 - DNA, 906 bp, Enterobacter cloacae; identical to SEQ ID NO: 71836

SEQ ID NO: 136815 - DNA, 1245 bp, Enterobacter cloacae; identical to SEQ ID NO: 71837

SEQ ID NO: 136816 - DNA, 321 bp, Enterobacter cloacae; identical to SEQ ID NO: 71838

SEQ ID NO: 136817 - DNA, 1026 bp, Enterobacter cloacae; identical to SEQ ID NO: 71839

SEQ ID NO: 136818 - DNA, 303 bp, Enterobacter cloacae; identical to SEQ ID NO: 71841

SEQ ID NO: 136819 - DNA, 306 bp, Enterobacter cloacae; identical to SEQ ID NO: 71842

SEQ ID NO: 136820 - DNA, 1740 bp, Enterobacter cloacae; identical to SEQ ID NO: 71843

SEQ ID NO: 136821 - DNA, 765 bp, Enterobacter cloacae; identical to SEQ ID NO: 71844

SEQ ID NO: 136822 - DNA, 1026 bp, Enterobacter cloacae
atgattgagttatcggtagaaaatctgcatctcacctatggcgacaacccggtgttgaagggggtgtccatgacgctcggccggggggaggtagtatcgctgctggggccttcgggaagtgggaaaaccacgctgctgcgggcggtggccgggctggaaaaaccgacgagcggacggatcgccatcggcaaccgcacggtgtacgacggcacgccgcgcagcgagatcccggccgaagagcgtaacctcggcctggtgttccagtcctatgccctgtggccgcacaaaacggtgttcgacaatgtggcctatccgctgaagctgcgtaaagtggccgccggggagataaaagagcgggtgcagcgtgtgctggatcagctggggctggggcaccttggcaaccgccatccgcaccagctctccggtggccagcagcagcgggtggccatcggtcgggcgctggtttacaacccgccggtgatcctgctggatgaaccgctctccaaccttgacgccaagctgcgcgaagaggcgcgggtgtttctgcgcgagctgatcattaagttgggcctgtcggcgctgatggtcacccacgatcagaatgaagcaatggccatctccgatcgtattctgctgctgaacaatggcgtcattgagcaacaggggaccccgcaggagatgtacggcagcccggcgacgctgttcgccgctgagtttatgggcagcaataaccgcctgcacggcaaagtgatggcgctggagaacggcagggcgcggatcgaaggcgccagctggagcctgtcggtgatccgcgtcgagcgcctgcgacttgacggcgccgcgcaggataatagcctccagctaccgctgctgaccagcatgtacctcggcgaccgctgggagtacctgttccgtaccgaaggcgacgactttccgctgcgcgcctacggaacggcgctgcgcgatgccgaacactgccatctgacgctcccggcggaggatgtgtggatttttccgcagcagtaa

SEQ ID NO: 136823 - DNA, 1089 bp, Enterobacter cloacae
atgtataagaaaataagtggtttagtggtttcactgacggccgttttcgcctgtgccgcctgggcggaggtgcctgcgggctatcctgcggattatcaaaaaacgattgatgccgccgtaaaagagggcaaggtggtgatctattccacgaccgataccaaagcggccgggccgttaattaagggatttgaagcgcaatacccgggtgtaaaagtcgaatataacgacatgaacagtactgagctgtataaccgctatatcagcgaacaggccgccgggggcggcagcggggatgtggtgtggagctcatcgatggatacggcgctgaaattagccaccgaatacgccgaacaatatgcctcgccggaggtgaagcaattacccgactgggcggtctggcagcaaaaagcctatggcactacctatgagccggtggtgtttatctataacaaacggctgatcccgcagaatgaggttccggattcgcataccgcgctggcaaaacttatcgccagccaggccgataaatttaaaggcaaagtcaccacctacgatatagaaaaatcgggcctcggttttatgctggcggtacaggacagccaggccgacgcgaactattttgccgacctggcgaatatcgccaaaggcggcctgacggtgcagtcttccaccggcacaatgatggagcgcgtctcctccggcgaaaacctgatcggctataacattcttggctcttatgccgaagcgcgggcgaaaaacgatccctctttaggtattgcctatccgaaagattacgtgctggtgctctcccgcgtctcgtttattagccaggagagcgaacatcccaatgcggcgagattgtggctggattatgtcctgtcggaaaaaggccagcagatcctcgccagccaggcggatattccctctattcgtcgcgatattgcaggtaaaaatgatatcgacggcatgaccgcgctgctgggcaaagcgttaaaaccgatcccggtcaacgaaacgctgctcgattatttacagccgcaaaaacgtctgcagtttattaaacaatggcgcagcgccgccgcgaaataa

SEQ ID NO: 136824 - DNA, 1080 bp, Enterobacter cloacae
gtgcctacaggacaccgctttctggcgacggatctgcatcagtttgtcgtctcactgtttacccatctcggcagtaccccaggggaagccaccctcgtcgcggaccatctgatcgccgccaatcttgccgggcatgactcccacggcgtcgggatgatccccagctacgtcaaatcccacgccggtggttttctgcagctcaaccgccacgccacggtgaccaaagacgccggcgccgtggtcaccctcgacggcaacgccggcttcggccaggtggtcgcccacgaggcgatgcagttaggcattgaaaaggcgaagcagcacggtatggcggctatcgccctgcgcaacgcgcatcacgtcggacgcatcggctactgggccgaacagtgcgccgccgccgggctgatctccattcacttcgtcagcgtcatcggcgacccgatggtcgccccgttccgcgggaaggacagccgcttcggcaccaacccgctgtgcgtggtgtttccccgcgcgggccatccgccgctgctgctggactacgccaccagcgccatcgcctttggtaaaacccgcgtcgcctggcataaaggcgaagccgtggcccccggctgcctgattgacgccgagggtcgacccactaccgacccggcggtgatgcagacctcgccgctgggcgccctgctcaccttcgcccagcacaaaggctatgccctggcgacgctgtgcgaagtgctcggcggcgcgctctccggtgggcaaaccacccatcaggagagcctgcagaccagcgtcgacgccatctttaactgcatgaccacggtcatcctgcgcccggacgcgttcgatgccccggacagccaggcgcagacggaggcctttatcgcatggtgtaagcagtcgccgcacgatgccgatgccccggtgctggcgcccggcgaatgggaggccgccaaccgcgaagcgcggctggcgcaggggatcccgctggatgccggcagctggcaggctatctgcgccgccgcgcgcgacgtcggcctgagcgaatcgcacttcgaccgctgccgccctctcgcctag

SEQ ID NO: 136825 - DNA, 576 bp, Enterobacter cloacae
  misc_feature (480)..(489): n is a, c, g, or t
atgaaaaaaatcacgagcgtgtgcccctactgcggggcgggttgcaaacttaaactggttgtcgacaacaataaaatcattcgcgcggaggccgccgacggcgtcaccaaccagaaccagctgtgcctgaaaggctactacggctgggattttcttaacgatacgcagctcctgacgccccgtcttaaacaaccgatgatccgctaccagaaaggcggcgccttcacgccggtcagctggcaggaggcgattcgctataccgccagcaagctcagggagatcaaagagaagcatggcccgcgcgccatcatgaccaccggctcctcgcgcggcaccggcaacgaaaccaactatgtgatgcaaaagttcgcccgcgcggtgctgaacaccaataacgtcgactgctgcgcccgcgtctgccacggcccctccgtcgccgggctacagcaggcgctgggcaacggggcgatgagcaactcnnnnnnnnnncgattagcgacatcgaaaactcgaaatgcctgctggtttttggctacaactgcgccgactcccatcccatcgtcgcccgccgggtaa

SEQ ID NO: 136826 - DNA, 1482 bp, Enterobacter cloacae
atggcgctggtaaatgccttcggctatgtgctgctggaggaggagctgtacaacaaaacctatgtcgaacgctataccgaagggctggatgcttaccgcgaggcggtgaaggattacgccccggaagcggtggaagggattgtcggggtcagcgcgcgggaaatccgggaggcgatgcgcatgttcgccgccgccccatccgccaccattatgtggggcatgggggtcacccagtttggccaggcggtggacgtggtgcgcggcctggcaagcctggcgctgctcaccggcaacctgggacggcccaacgtcggcgtggggccggtccgcgggcaaaacaatgtacagggcgcctgcgatatgggcgtgctgccgaacctgtttcccggctatcaggaggtcaccgaccccgccgtgcgggcgaaattcgccgccgcctggggcatcgacccggcgctgatggacgaccaggtcggcacccgcatcaccgaggtgccgcataaagcgctgaccggcgagatcaaagcctattatatcatgggcgaagatccgctgcagaccgaagccgacctcggcctggtgcgcaaaggcatcgaggcgctggacttcgtggtcgtgcaggacatcttcatgaccaaaacagcggaaatggccgatgtcctgctgccggccacctcctggggcgagcacggcggcgtcttcacctgcgccgaccgcgggttccagcggtttgaacaggcgatccctccggcggggaatgtgaagcgcgactgggagatcattagcctgctggccagcgaattgggctatccgatgcactatgagaacaaccagcagatctgggacgagatgcgcgagctctgcccgctgttctacggcgtgacctgggagaaaatgggcgatatgggccatgtccagtggccgtgcccgaccctcgatcatcccggcacgccatggctgtataaagacaaccgcttcgacaccccctcgggtaaagggcagctgttcgccaccgcctggcgcgcgccggcggagcgcccggatgacgagtggccgctggtgctctgcaccgtgcgggaagtcgggcattattcctgccgctcgatgaccggcaactgcgccgcgctgcagtcgctggccgacgagccgggacgggtgcagatgaatcccgcggatgcgcaacgactggggatcgccgacaaacagctggtgtggatcagctcccggcgcgggaaggtgatctcccgcgccgacctcagcgatcgcatcaatccgggggcggtctatatgacctatcagtggtgggtgggcgcctgcaatgagctgacccaggataacctcgatccgatctccaaaacgccggaaaccaaatactgtgcggtgaaagtggaagcgattgccgaccagcaatgggcggagcgctatgcctggacggcctacagcgacatgaaagcgcgactgaaagccgctgccgacgtctga

SEQ ID NO: 136827 - DNA, 1158 bp, Enterobacter cloacae
atggccgtatcgccgtcactgatcgccgaagccgttggctggcgacgtgaatttcacgccgcgcctgagctcggatatcaggagcaggagacctcgcgccgcgttgcggagctgctggcctcgtttgggctgcaggtgcatcgcgggctggccggcaccggcgtcgtggcgacgctggagaacggccccgggccggttatcggcctgcgcgccgatatggacgccctgccgatcaccgagctggggagcgtcagctaccgttcacgccgtcccggggtgatgcacgcctgcggccacgatggccataccgcgatgctgctggcggccgccgcccatctggcgcagacccgccatttcagcggcaccgtccactttgtctttcagccggcggaagagaacctcggcggcgcgcgcaaaatggtggaggaggggttgtttgagcgcttcccgatggacgccatctacgcgctgcataactggccggggatccctcttggcgaagtggcgctcagcgatggcgcgatgatggcctcgctggacgccttcgagataaccctgcgcggaaagagctgtcatgcggcgatgccggagagcggggccgatccgatcgtcgcggcggcgcaactgataatggcgctgcagaccattccttcccgccgcttgtcgccgcaggattccgcggtggtcagcatcacccagataaacggcggcgaggcgatcaacgtcctcccggacaccgtggtgctgcgcggtaccttccgctgcctgagcaatcgcgttcgcgcccgcgtgcgggagctcatcgaaagctatgtggcgacccagccgcaggtgtccgatgtgcagggcgagattagctggttcccgggttatccggtgaccaaaaaccatgcgctgcaggcgcagcaggtgcgcgaggtggccgtcgccactctcggcgcgcaagcggtgcgctggaatcaggcgccgtcgatggcctccgaagattttgcctgcatgctggaggcctgtccgggggcctatttctggataggcaccgacggcgaaaccccgtcgaagccgctgcataacgccagctatgactttaacgatgcgctgatcggccccggcgtcgccatgtgggtggggctggtggagaaacagctgccggcggcgtaa

SEQ ID NO: 136828 - DNA, 1200 bp, Enterobacter cloacae
atgtttaacccagaccagaatcgtcttgcccccacgctggcgatgatcatggccgcgtcgcttgtgggatttatcaccggctatacggtgccgttaatcagtcttgagctggcgcagcagcagatcgcgccgctgtacgtcggcctgctggccgccctgccgcccgccggcatgatgatctcctctttcctctctcctgcgctgtgccggcgcgttgaaatgggcgtgctgctgagcggcagtctgatcctgctggcgctggcgaccatcgcctcatgcatgactaccgatatgacgctgcttttgctgccgcgcctgctgaccggcctggcctccggggtcattatcgtactcggcgaaagctggatcactggcggcgcggcgggcagccagcgcgctaccctcaccggtctctacgcctcggcctttaccggctgccagctggccgggccgctgctgatctccgtcggccccgcctggcagacctcagcgctgatagcgattgtcgcggtcaccgccgtctgcctgctgatgctgcgccatctgcccaccggcactcgtgaaagcctcggggagcgcgccagctggcgcagcctcggcgctttcctgccggtactggcctccggggtcttctgcttcgccttctttgacgccagcatcctcgccctgctgccgctgtacggcatggacaaagggctgaatgaagggctggcggtgctgctggtcaccgtggtgctgaccggagatgcgatgttccagaccccgctcggctggctggccgaccgggtcgggattcgccgtgtgcatctgagctgcgcggtggttttcagcctgtcgctgctggccctgccgctgatgctcggctcgcgcattcagctgatggccatttgtctgctgctgggcgccgcggcgggcgcgctttataccctgtcgctggtgcgggcggggaaaaccttcaatgggcagaagctgattatgattaacgccctgttcggctttttctggtccgccggcagtgtggccgggccggtagtcagcggcatgctgatcggcatcactggttacgatggcctgatcgtcaccctggtggccagcggcgttctgttcctgttgattcagtgtctgtgcaaaaacgagaaaaccctgcttgccagtgagcaggaagatgacatggacgaggcgacggagtccgcacggtag

SEQ ID NO: 136829 - DNA, 435 bp, Enterobacter cloacae
atggaaagtaataccttacatcgtggcagattgatcgatcatattctgctggttgtcgaagactttgaggcaagcaaaaacttctataccgccgtactgtcggcgctggagatcccggttatcaccaccgccaatgaatacttgctggccgacgaactggtggtggcctcacgccgcagcccggaggctgccgggaaactgactgggcgccaccacctggcattccaggccagagatcgtgacatggtggacgctttttaccatgcggcgctgacccatggcggacgtgataacggcgcgcctggcgaacgacactatcatcctggttactatgccgcttttgtgctggatccgcaggggaataatattgaggcggtgtaccatggcaaggctgagcgcagcgccgggtctgttgcgatcagcttcacgcagtaa

SEQ ID NO: 136830 - DNA, 1233 bp, Enterobacter cloacae
atgaaattagcgttgggaccgtacatccgttttagcagaatcttgttatttccgctggcgatggttatctatgatttttctgcttatctgactaccgatctcattcagccgggtattatccacatcatccgggaatttgaggctgatgttgcgttagccccggcctctgtcagcctctatttagccggggggctggcattacagtggctgctggggccgctctccgaccgcattggtcgccgccccgtactactgaccggagccatcatctttgctttggcctgcttcagcatgatctttgtcacgtcgattgatcaatatcttatcgcccgttttatccagggaaccagtatctgcttcatttcgacagtcggttatgtctccatccaggaggcttttgatgaaaaagagtctatccgcattatggcggcgctgacatccatcgttttgctggcgccggtaatcgggcccctggcgggcgctggcctgatgaatttcctgcactggaagttattgtttgcgatcatcggcgccatgagcttgctggcctgggcgttactgatttttaacatgccagaaacggtcacctctcagggccgggggtttcgtccgggagaggtattttccgagtttgtccgcgcctttaaacagccggtggtgctcacgggcgcgctggcgttgtcattcagtaacctgccgataatcacctgggtagcactctctccggtgatcctgatcgatgacggcgggatgtcgcgcggcgcctatgcctggacccaggtgcctgtctttggcggcgttattattgccagcatcatcgtggcccgttttatcaaggatccgacctctccccgctttatctggcgcactatcccgatacagctgaccgggttgttggtattactggcgggaaatattgcatggccccatacctggtggtggtccgtttcaggaacaagtctctatgccctcggaacaggcctgttgttccccgtattattccgttttgcgcttttttcccactccctgccgaaagggacggtttcagccaccatcaacattgtggcgctcagttttatggcggcctcggtggaagtagcgcgctgggtttacttccaggctggcggcagaatagcctttcactgcctggcgctgatagcgggaatcgtcgtcatcatgctggtctcgcgcttgttaaaactccgtcaacaacatctccttcagccaacctga

SEQ ID NO: 136831 - DNA, 393 bp, Enterobacter cloacae
atgttttcatacattatgctgggaacgaacgatctgccacgcgccatcaagttctatgacccgttaatggcgctgctggggcacgtcaaagccggccgtaacgaacagggggcgtcctggggcaccttcaacggcaatcacacctgcgggctgtgcgtgggcgttccttttgaccagcagcctgccggggtgggtaatggaacgatggtggcgcttaacgcccgctccgtcgcacatattgcggaactgcatgccctcgccctgcaactcggcggacgtgatgaaggcggtcccggtcaccggccgcagtatggcgacggttttcacagcgcctacgtccgcgatcccgacggcaataagctggcgtttgtttactatacgtctacagattga

SEQ ID NO: 136832 - DNA, 615 bp, Enterobacter cloacae
atgacagttacatggacggtcacgcccgtggggtatcagcacattgccaaacgctgccccgcctgcaatgtaaaacgcgacttcgcgccttccggcgccatccgggtgaattcgcaaaagaagctgctggatatctggagcatctataaatgcacgcgctgcgattacacctggaatatcgcactgttttccaggcagcacgtcagcaagataaaccgtgaactgcttcagcgcctgctgcagaacgatgcagccatggttcactattatgccgctgacctcgcgacgctgaagcgcaaccgcgccgagccgtcggggcaacctgattttcgtattcacgagcaatggtcggttacgttgatggcatgtcagcggataacggtgcgcgtcagagtcagtcagccatttcgcatcagcctgctatcaatactgaaaaaacagctcaagctgagtacggctgaaatccggtggttggtcgcgacagggcatatcgagggtattccactaaaacagctcaagacgaaaaagctgaaggcgatggaatatgattttcagctggcggcggaaacgctgtatgcgcgacgccggattacgttatcactttgcggtagataa

SEQ ID NO: 136833 - DNA, 723 bp, Enterobacter cloacae
gtgattcacattaataacttacataagcgcttcggcgacagccacgtgctgcgcggcatcagttgcgatattaaaccgcaggaagtggtgtgcatcatcggcccatccggctcggggaaaagcaccttcctgcgctgcatgaacgccttggagacggtcagcgaaggcgaggtggtggttaacggctttgccgcccacgaccggaccaccgacctcaacaagatgcgcgaaagcgtcggcatggtgttccagcgctttaacctgttcccgcacatgacggtgctggaaaacctgatcatggcgccgatgaatctgcgcaatatgccgcgccagcaggctatcgacctggccgaagccttgctggcgaaggtgggcttaagcgataagcgcgacgcctggccctcgagcctgtccggcggccagcagcagcgggtagccatcgcccgcgcgctggcgatgaagccgtcgataatgctgttcgatgagcccacttcggcgctggatccggagctggtgggcgacgtgctggaggtgatgaaaaacctcgccagcgaggggatgaccatggtgatcgtgacccacgaaatgggctttgcccgcgaagtggccgaccgggtgatcttcatcgaccagggcgtgattcaggaagagggcaagccggggcagatctttagcgcgccgaccaacccacgcaccgccgcgttcctcagcaaggtgctgtaa

SEQ ID NO: 136834 - DNA, 765 bp, Enterobacter cloacae
atgacgggattccgttgggagatcatcgaggagtacggcccgctgtttgtggacggcgccctgatgacgattaaatgtaccattatctgcgtgatcctcgggacgctgtgggggttaactctcggtctcgggcggatggcgaaggccgagcacgggccgtggaaatatattctccgctacctggtgcagtttccggtgcgcttttacgtcagcgccttccgcggcacgccgctgttcgtgcagattatggtggtgcactttgcgctggtgccgctgtttatcaatccgcgcgacggcctgctggtgaccagcggcctgatgagcgccgactttgcccgcgaactgcgcgccagctacggggcgttcctctcctgcatcgtggcgatcacccttaacgccggagcctatgtgtcggagattttccgcgccggcatccagtcgatcgacaaagggcagatggaggcctcccgcgcgctgggcctgccgtggtggaaaaccatgcgcaaggtgatcctgccgcaggcgtttcgccgcattctgccgccgctgggcaataacgccatcgccattgtcaaagactcgtcgctggcctcggcgatcggcttggccgatctggcctatgccgcgcgcaccgtctccggcgcctacgccacctactgggaaccctacctgaccatctctctggtctactgggtgatcaccttcctgctggcgcagctggttaaccgtctggaaaagaggtttggcaaaagtgattcacattaa

SEQ ID NO: 136835 - DNA, 768 bp, Enterobacter cloacae
atggtcaagaatttgctcaaagcgtgttgcatgatagccgcgctgacggctgccggacaggcggctgcggaaacctataccgtcggctccggcggcacctaccggccgtttgaatttgaaaacagccagaaacagctggaaggtttcgacatcgacatcatcaaagccatcgccaaagccgaaggctttgacgttaagctggtcaataccccatgggaaggcatcttcgccacgctgaacaccggcgaccgcgacatcatcatctccgggatcactatcaccgataaacgcaaacagatggtcgatttctccgcgccgtacttcccggccgaacagtctatcgtcgtcgctcaggactcgcaggtggattcactggcggccctgaaaaacgagaaggtcggggtggtgaactccagcaccggcgatatcgtggtttctgaggtgctgggtaaaaacagcaccgcgatcaagcgcttcgacaataccccgctgatgctccaggagctgtttgaggacggcgtcagcgccgcggtaggcgacgtcggggtggtgaagtactacatcaaacagcacccggagaagcagttcaagctggtgccggatgccaaatttgagcgtcagtatttcggtattgcggtggcgaaaggcaacagtgaactgctgggcaaaatcaacgccgggctgcaaaagatcgttgctgacgggacttacgccaaaatctataaaacctggttcgacgacaacgtgccgacgctgccagcgcaataa

SEQ ID NO: 136836 - DNA, 903 bp, Enterobacter cloacae
atgaaaagcgcggtaaaaaaagagaagggcaaagtcgatctgttcggcgaacgctatcgcgcccgggcgcaccagctctccccccggctgcgggcggtggtcagctatatcaacgacaaccgcgaggtggtgctggagcatacggcgatggagatcgccaccgcgacccagacctccgacgccacggtggtgcgtgccatccaggcgctgggcttcgccgggctgcgcgagcttaagcagaccatggagcgctggttcggcacctcggtcacctcggcggaaaagatgcgctcgacggttaccgcgctctccagcgacgtcaactccagtattgattttgtgcttgaaggccatcagcgggtgtgcgaggtcctgtcgcgggccgacaaccgtgcggcggtggctcaggcggtggcattgctcagcgacgcgcgccaggtggggatcttcggtatcggcgcctcggggatcctcgccgaatacaccgcccggttgttcagccgtattggcctgccggcgtacgtgatgaaccgcacgggctttagccttgccgaacagcttatcggcctgcagcgcggcgatgtgctgatcatgatggggcaaaaatccccccatcgcgaagggttgaccaccctgcgcgaggcgaagcggctgggtattccgaccatcctgctgacccaggcggtggactcgcgcttcagccaggaggcgcaggtggtgatcgacgtcccgcgcggcggggacagtagccggatgccgctgcacggtacggtgctggtctgtctcgagatgattgtcctgtcggtggcctctaccacgccacaaaaaacggtgaaatccctgaaacgaatcaacgatctgcatcgggctatcggtaaatccggcggtaaacggggccattga

SEQ ID NO: 136837 - DNA, 954 bp, Enterobacter cloacae
atgcgttggttcgtctcattgctgctgttgctgacgggggccgtcagcgccgccgccccacaaactcaaactttcaccgatgatttaggccgcacggtcaccgtgccgctgcatccgcagcgtatcgtttcgatgcacgatctcgacattaccattccgctgattgagctcggggcgccgccgatcgccagccacggccggacgcgcccggacggtagccactacctgcgatccagcgcccagctcaccggcgtcgatttcgacaacagcgatatccgctttattggcaccgccgatatcgatctggaagcggtagccgcagccaggccggatctgattatcaccgagcccagccgccacgtgtcagtggagcaactggagaagattgccccgacggtgagcatcgaccatctgcagggcagcgccccggagatttaccgcaagctggcgcagctgaccggcacccagccgcggctggcgatcctcgagcgccgctatcaggagcaaatcaagcagctgaaagcgatggtcaacccaccgcagtacagcgtctcagtgatccaggcgaacaacggcaaggtcacggtgcatcattcgtatcatgcgctgggccgggtgctgcgcgacgccgggttccgctttccgccgctgattgagcggatccccgatggtcagcgcattgacgtcagcgcggaacagctgccggagctggacgctgattttgtcttcgccacctggcggtcggataccggcggtaagccgcaggatgagctgcaggcgatggaaggcgtgatgcccggctggtgcgactttctgcgcgcctgccgcaccgggcactatattttactgccgcgggaagaggtgatctccaactcctacgccgcgctgtctctgatggtggcccaggtgcagtcgcatattgccggcaggccgatcccggcggaggccaaatga

SEQ ID NO: 136838 - DNA, 687 bp, Enterobacter cloacae
gtggttctggcgctggtgctgtttttcccggcggtaggcctggtctggcggccgctggcggggatggtcggcggcatagcggtggccctgctggtcctgacgctggcccgcgactgttcgcggccgcgctttattttaattggcatcggcgtctcctggagcctggcggccgcggtcggcatctttatgaccaccgccgacgtacgcgacgtgcagacggcgatgatctggctggcgggcagcctgcaggccgccacctggccgctgctggcggtggctttttgctgggcgctgcccggggccatcatcctgttctgtaccgcccgggcggcggacgtggcgctgctgggcgaccggaccgccatcggcctcggcgtacgtctgcagcagctgacggtgctgcgcttttttgcgccggtgctgctgacctcggccagcgtctcctgcgtcggcagccttggatttgtgggcctgatggcgccgcatatggcgcgtttcgtgctgcgcggcggccaggtatcgctgctgtgcggcagcgcgctgattggcgccttgctggtgctggcgaccgatacccttggccggctggcgtttgccccgctgcagatcccggcggggattgtcattgccctggtgggctgcccgttcttcgttgtcttgctctggcgtcgccgtgatgccctttaa

SEQ ID NO: 136839 - DNA, 231 bp, Enterobacter cloacae
atgtcgttgcagatcgtcgggcgtcgtcaacgggccatgctggcgcatccagcgcggcgcggcgcagagcagcgaacggcacactccgaggcgacgagcgatggcccccgcttccgggttgtcggtaatgcgaatggccacgtcgatacgctcgccgatcaggctgaccggatggttattgatatccagctccaggcgcagcagtggatagcgggcgagaaagtccggtag

SEQ ID NO: 136840 - DNA, 798 bp, Enterobacter cloacae
  misc_feature (387)..(396): n is a, c, g, or t
atgaaattatctgcccttgctgttgctaccgccctgttcagcggcgcggtcttcgcagcgcctctgacgctgcaaacttacaacccgcaggaaaaaggactttttgccgttaactcgaccctcgtttccggtccgcatgaagcggtacttttcgacgcgcagttcagcgtcaaagatggggaaaagctggtggagatgatcaagaaaaacggcaaaccgctatcgcggattgtgatcacctctggcgatccggatttctattttggtcttgagccgctggtaaaagccttcccgcaggcggaggtggtcgccacgccggaggtcgtcaaacatattgcagccaccaaagcggccaaactggcgtactggggcccgcaaatgaaagannnnnnnnnngagaaagtgaccatcatgcagccgcatgactacgcggcgttcgtctggatccgggcgaacaaaacgatcctcggcggcaccggcgtggcgtggggtatgcatctctggaccgccgacacccagacgccggccagtcgtcagcaatggcgtaatacgctggaccagatgatcgccctgcacccgcagcgggtgatcccgggccattatctaggcaccccgccggagggagacagcgcagtgcgctttacaaaaacttatctccagcagttcgagcaggcgctgaagacgcattcggattcggccggggtgatcaaggcgatggaggcacagtggccgggcctggcggagaccagctcgctggagttaagcgccaaagttaataccggtgagatgaagtggtga

SEQ ID NO: 136841 - DNA, 141 bp, Enterobacter cloacae
atgaaatcgaaccatcaggcacgtcatcttctcggtctgaactataagctttcccggcagaaaaaagtggtgctggaaggcgatgaagaaaccaccatcaaccacatccatgctaccggccgcaaacgccgcggtggttaa

SEQ ID NO: 136842 - DNA, 1698 bp, Enterobacter cloacae
atgcaatttacccataagaaaaaccgttccctgtacatcccctacgcgggtcccgttctgcttgaattccccctgctcaacaagggaagcgccttcagtatggaagagcgcagcaatttcaacctgctcggcctgctgccggaagtggttgaaactatcgaagagcaagcggaacgcgcctggatccagtatcagggattcaaaactgaaatcgacaaacatatttatctgcgtaacatccaggacaccaacgaaaccctgttttatcgcctgatcggcaaccaccttgaagagatgatgccggttatctataccccgacggtaggcgcggcctgcgaacgtttctccgagatctatcgtcgcgcccgcggcgtctttatctcctaccagaatcgccataaccttgacgacatcctgcaaaacgtcccgaaccacaacgtgaaagtgattgtggtcaccgatggcgagcgcattctcggccttggcgaccaggggatcggcggaatggggatcccgatcggtaaactgtcgctgtacaccacctgcggcggcatcagcccggcttacaccctgcctatcgtgctggacgtcggaacaaacaaccagcagctgctcgacgatccgctgtatatgggctggcgccatccacgcattaccgacgacgagtactatcagttcgttgacgacgtgatccaggcgattaaggcccgctggccggacgtgctgctgcagttcgaagattttgcgcaaaagaacgccatgccgctgctcaaccgctaccgcaatgaaatctgctcgtttaacgacgatattcagggcaccgcggcggtgaccgtcgggacgctgatcgccgccagccgcggcgccggtagccagctgagcgagcaaaaaatcgtctttctcggcgcgggttcggccggctgcggtatcgctgaacagattatcgcccagatcgtccgcgaaggactcagtgaagaagaggcccgccagcgcgtgtttatggttgaccgcttcggcctgttaaccgacggcatgcctaatctgctaccgttccagaacaagctggtgcaaaagcgtgagcagctgcagagctgggataccaccagcgaggcgctgtccctgctggacgtagtgcgcaacgtgaagccgaacatcctgatcggcgtctcgggtcagccgggactgttcacggaagagattatccgcgagatgcacaagcactgcccgcggccgatcgtgatgccgctctccaacccaacctcacgggtggaagcgacgccgcagaatatcctgagctggaccgacggcgaggcgctggtcgccaccggcagtccattctccccggttaccgtgaaaggcaagcagtatcccatcgcccagtgcaataactcctatatcttcccgggtattggactgggggtgatcgcctccggcgcgtcgcgggtcacagacgagatgctgatggctgccagcgaaaccctggcgcagcactcgccgctggtcaacaacggcgaaggtccggtgctgccggagctgaaggatatccagaccgtctcacgggcgattgccttcgcggtgggcaaggtggcccaggagcaaggcgtggcggtgaaaacctccgccgaagcgctgctgcaagcgatcagcgataatttctggttaccggaatatcgcaattatcgccgcacctcgatttaa

SEQ ID NO: 136843 - DNA, 696 bp, Enterobacter cloacae
atgctaaaattaacccctggcgcgaataaagcgaatgcgattctgatccgtattgtcttgtttcttatcggcggtatcgccatcatcaccggaatgtgcctcttcagcggtgatatgtggatgctcaccccgcgggcggaacagtatcagcccgccaccggcgatctggtggatgtcgtcatctatgaaccgagtaaatttttcttcgctctgctctacgtgtttattattaccctggtctggctgttgacggtacgtaaaatcccctggcggccgatacagcatcctatattaccgctgatggtactgattgccgccgggatatttattttcctccacccggaggtcaccccgggtcgggatgccagtattcagtacggtaaacacaatacctattatgcgtccatattctggatgaaaacccggtcaggtagtcattccgctaagcaatcaaaatatgaaacctttgttgaagcgaaagatccccgctggcttatcgacagaaacaatcttcgccgcgcctggcgctgtgaagtgcagcggcatacccagttttacaccctgtcattcaatgagggctggttcccgaacggcgatccgcaggtccttgccaaccagtgtagtcagattgccgatctggatacggtctctgaagacgagctgcttgtcactaaaaccatcaggagccgtaaatga

SEQ ID NO: 136844 - DNA, 687 bp, Enterobacter cloacae
atgagccagcaaaaaatggttttgcagccgatattacgcctctggctggggctgtttagcggactgttgctggtgagcgccatcagcgcctttcacggtgagtactggtatttcggcgataagcaggcgttttacgcggcgaaagccggcgaggtctctgtgcatgaactctatacgccggcgaaaatcctctttgcttttatcgtcagcacgatcccgccgctgctgtggctgctgctggttaaccgtcgggcgccacggctgctgacccacactctcccatcggtgttactcctgctggcgggtttgctgtttttcttcctgagacccgacgtgattcccggcggggaaacccctgtctatcgctacggcgagcgggagcgctactaccagacgatacgctggcagaaaccggagcctggcgcgtggcggggtacccgctctgagtacaacgtgtatatcgaatatcgtgatcccaggggatatcgcaaagtcgacaatattaaaaacgcctatacctgtgaaacccaccgggagtctcgcttttttaccttaacgaccgaagaggattggtatccggattcgtatccgaatattctcgaggctccctgccaggcgataaaggatccccaggcgatgacggaatatacccgcgaccacgcccgctgttttcccattacgttttag

SEQ ID NO: 136845 - DNA, 1716 bp, Enterobacter cloacae
atgagtacattactaattgcccatgcgctccacgtggagacggcttttgggccgctgtttaactccctctccttcaccctgaagaaaggcgaccggatcggtctcatcggccataacggttgcggcaaaagcaccctgctgcaagtgctggacggcaccctcgcgcccacctcgggcagcgtctcgctcgccggtcagtgtctgatggcccgcgttgaacagcatctgccggaggcgctgcatacgcagtcgctgctgcaggcggtgctggccccattacccgccgacgcgcgggaagcacagcgctggctggccgagcgcctgctggcgcagatgggctttaccccggcggtgatggagcagcagaccgccaccctgagcggcggccagcacacgcgtctgctactggcccgggcgctgatccgccagcctgatctgctcttgttggatgagccgggcaaccatctcgatctgcccaccctgctgtggctggaaagcttcctgcaaacctggcaggggagcttcgtactggtgtcacacgacaacaccttactggatgctgtaactaatgccagctggatcctccgtgaccagacgctacattgcttcgccttgccctgcagcgctgcccgtcaggcactgcaggagcaggatgaaagcgccgcgttacgtcataaggcggagcaaaaagagatcgaccgggtcagcgccagcgcccggcggctggccacctggggtcgggtctatgacaatgaagatctcgcccgcaaagccaaacagatggagaagcaggtcgcccgcctgaaagacgagcagaccgagctcagcgtcggcccgccgtggcgcctggtgttacagggggacgccctgccggccgaccgccttttggagatggacacccttcccgtctcgcccgcgccgggtcagccatccctcttcaccaccggcgtggcgcgcctgcgcagcggcgatcgcgtggccatcatgggacgtaatggcggcggcaaatcgtccctgctgcgcctgctgtggcagcagatgaacaacgcatcgcctctcccggggctgcgcctgcatccccggttgcaccccggctactatgaccagacgctggcgcagttgccggacgaggccagcctgctcgaggccctgacgccgtttgccccgtcggcggacacccgtaaacgggcgctgatcgccgccgggtttggctgggcgagacatagccagaagatcagcaccctcagcggcggcgagcgatcgcggctgctgttcgttggcctgtcgctggcgcgctacagtctgctgctgctggatgaacccaccaaccatcttgatatggagggtaaagcggcgctggcgcagacgctgcgcgattaccccggcggcgtgctgctggtcagtcatgaccgccagctgattagcgaaagctgtaaccgcttctggctgattgacagcgccgggctaacggagtggcacagcctggaggaggtctatgcccgtctgcaggccgtggcgcccgccccggacagtcggctcgctttgcagagtacacccgccggggctgacgatgatgaggaggcgctgctggcgcggctgattgacctggagcagtggctggctgacgacatggcccgcaagccaaaacatcaaaagccgtcactgcaggcacagtggcaagaggagattgcccgcctgcttaaccaactgacgtaa

SEQ ID NO: 136846 - DNA, 954 bp, Enterobacter cloacae
atgcctgatacccccttaatccaacagattcgtaccgcctcgcggttaatggtgcgcgagctgggctttatgagcaccacgctggccgccacccattattcaccttcggcggtgcacaccctgcttgaggtatcgatgaggggggagatgacggccgcgcagctggtcacgttgctgggactggaaaaatcaagcgtcagccggatggtctctcgtctgctggcggccggtgagctggaggagcgtccttgcgcggaggatgcgcgcgtgaaatcactcgccctgacggcaaaggggcacgatacggtggcgaaaattaacgcctgggggacccgtcaggtggtggaggcgttagaccatctggatgagacgcagcagcaaattgtcgccactggactggcggcctatgcccgggcgctggcgcagtgtcgggatagcgcgctcgcggatacggctccgcaaatttcgctgatgaccggctaccagccggggatgatcggccggatagcccagatgcacggggagtattacgcccgtcatcatgactttggcgctttttttgaaggcaaggtcgccagcggcgtagcggaatttgccacccggctctcctccccggccaaccagatctggctggcgatccgcgaagggaaaatcgtcggctcgctggctatcgatggcgaggacctcggccagcaggaggcgcatttgcgctggttcattctcgatgacagctgccggggaagcggcattggcaggcggctcctcagcgaggcgatggctttctgcgatagtcgccagtttagcgcggtgcagctgtggacctttaaagggctggacgcggcccgcaaactgtatgaatcctttggcttcacgttaatccgcgaatggcagggggagcagtggggaaaggtaatgaccgagcagcagtttacccggtccggaaacatcggctaa

SEQ ID NO: 136847 - DNA, 600 bp, Enterobacter cloacae
atgcatctggtaaaaaccatcctcaccgccggtctgcttttgtccgccgccgcccaggcccacaatgtgctggaatttccccagccggaaaacaacccggaagaattttacgccgtcactgagatcccgacgggcgggatcattaagtacgaaaccgatgctaaaacggggtttatcgtcgccgaccgctttcagtcgatgccggtggcctacccggcgaactacggctcgctgacccagtcgctggccggggatggcgacccgctggacgtggtgttttatacccgcgcgccgatggccccgggcacgctgattaagctgcgggcaattggtgtgctgaagatgatagacggcggtgagaaagacgacaaaatcatcgccgtaccggccagtaaaattgacccgacctacgacgacatcaagaccatctccgatctgccgaaaatagaacagcagcggctggaggccttcttccgggtctataaagaactgccggaggggcgtaaaaaggtcgagctggccggctttaatgacgccgcggccgcgaagcaggagatcaaatcggcctgggaggcctggaaggcgaagaacccgcaataa

SEQ ID NO: 136848 - DNA, 1011 bp, Enterobacter cloacae
atgaaggcagctgttgttacccacgaccatcaggttaacgtcacggaaaaaacgctgcgcccgctggaatacggcgaagcgctgttgaaaatggaatgctgcggcgtgtgtcatactgacctgcacgtgaaaaacggcgattttggcgataaaaccggcgtcattctcggccatgaagggatcggggtggtacaaaaagtcggcccgggcgtcacctccctgaagccgggcgaccgcgccagcgtggcgtggttcttcgaaggctgcggccactgcgattactgtaacagcggcaacgagacgctctgccgctcggtgaaaaacgccggctataccgtcgatggcggcatggcggaagagtgcatcgtcaccgccaactacgcggtaaaagttccggacggcctcgactccgccgccgccagcagcatcacctgcgcgggcgtcaccacctacaaagcggtcaaggtctcccacatcaaaccgggccagtggatcgccatctacggcctcggcgggctgggtaacctcgcgctgcagtatgcgaagaatgtgtttaacgccaaagtgatcgctatcgacgtcaacgacggacagctggagctggcggcctcgatgggcgccgacctgaccatcaactcccgcaatgaagatgcggcgaaagtgattcaggaaaaaaccggcggcgcccacgctgcggtagtaaccgcggtggctaaagcggcctttaactcggcggtggatgccgttcgcgccggtggccgcgtggttgcggtgggcctgccgccggaggcgatgagcctcgatattccgcgtctggtgctggacggcatcgaagtggtcggttcgctggtcggcacccgtcaggatctggtggaagccttccagtttgccgccgaaggcaaagtggtgccgaaagtcaccctgcgtccgctggaagatatcaacgctatcttcaaagagatggagcaaggtcagatccgcggccgtatggttatcgatctgcgtagctaa

SEQ ID NO: 136849 - DNA, 1623 bp, Enterobacter cloacae
atgcatcgtcattttcgcctgcccgcgctggccgcgctgtttctcaccggcgccttttccgtctgggccgccgacacgccggttaaaggcggcaccttaatttatctggagcagcaaccgcacaccaatctctatccgcccgccggcggcttttacccgaatggcgggattctcaatcagataaccgacaagctcacctggcagaacccgaaaacgctggagattgagccgtggatcgccgagagctggaccagcaatgccgataaaaccgagtacaccttccacctgcgcaaaggggtcactttctcagatggcacaccgctggacgccgccgccgtcgccaaaaacttcgatacctatggtctgggagataaagcccatcgtctgcccgtctcggaggtcatcaataactaccagcgcagcgaagtgatcgacccgctgacggtaaaattctacttcaacaagccgtcgccgggcttcctgcagggaaccgccaccatcggctccggtctggtatctctcagcaccctgcagcgtaattttgaagagctgggcgatgcccgacatattatcggctccggccccttcgtcgtgcaggatgaaaaaccaggccgcgagctgacgctggtggcgcgcaaggattaccagtgggggccgaaaaacattgcccagcaggggcccgctaacctcgacggcatcacctatattgtgacgccggaagacagcgtgcgtatcggcgcgctgctggcaggtcaggcgggctttattcgccaggtgcaggcctacgatgaaaagcaggctaccgatcagggatttaagatctacgctgcccctacccgcggggtcaacgacagtctgagcttccgcccggataacccactggtcgccgacctgcgggtgcgtcaggccctgctccatgccaccaacgccaggcaggtggtggagacgctattctccgctaactacccgcaagccacctccgtgctggccagctctgccgccggctatgtcaatctcagcgataaactcaccttcgaccaggccaaagcccggcagttgctggatgacgccggctggaagcccgccgccgacggtattcgcagcaaagacggtcagcggctggcgctgaccgtctatgagtcgctgccgcagccgcaaaataaggaagtgctgcagctgatcgcccagcagtggcgccaggtgggtgtggcgttgacggtcaaagccggggatgccggtagccgtacgctggataacctcgacccgcagaaaaccccgctcaccgtctcagaagtgggccgcgccgacccggatgtggtgaaaagtatgttcttccccaacaaccgcgatgcgctgctgcagaaaggcggctccagcgataaagtgcagcgcttccgcgatgataagctcaatgacctgctgaccggcatctccgcggcggtagagccgcagcagcgcttgcagttaaccggtgacgcccagcgctatctgatcgataacgcctatgtgatccctattttcgaagagccgcaggtgttcgccggcgcgccgtgggtcaaaggcgtcagcttcgaggccgtcggtcgtccgtcgttctacggcgcgtggctggacaagcactaa

SEQ ID NO: 136850 - DNA, 945 bp, Enterobacter cloacae
atgagcgcttatcttctgcgacgattcggccaggggctgctggtcctgtgggcggcctttaccctcacctttttcctgctgcaggtcctgccgggggatgcggtgctgatcaagtttcagaacccggaccttggcctgagcccggcgcaaattgcggagatgcggctggcctacggcgccgatagcccgctgtggcgccagtacctgcacacgctgctggcgatgctgcacggcgacttcggctattccctgcaggcgggtctggcggtcagcagtctgattgccagcaacctgccggataccttaagcctcgcgctgccggccttcctgctggcggtggcgctggcgttcgccctcgctttcgcctcgcggctgccggggctgcgctggctgagcaattttctgcagtcgctaccggtgctgtttatctctctacctaccttttggttgggtatcgccctgatccagctcttctcgtttcagttgcgctggatcccggtaatcaaccccggcccactggaaggactgattttaccggttatcgccgtcgcactgcccatttccgccccactggcgcagatcctgatgcgcagcatggatcaggtggcggttcagcccttcgtcgcggtcgcccgcgccaagggcatgagcgaaacgggcgtcctctggcgccatgtgatggggaatgccctgctgccggcgctgaatattgccgggctgctgctcggcgaactgattgccggggcgttgatcaccgagaccgtcttcggccgcagcggcctcggccagctgacccagcaggcggtcaataaccaggatatcgccgtactacaggcggtggtgatgatctccgccctcggtttcgtcctgatcaacctgctggtcgacctggtcatgccgcgactggatccccgactccatttacagaccggaggtgcgaaatga

SEQ ID NO: 136851 - DNA, 849 bp, Enterobacter cloacae
atgagcctggtcgactataccatcgcggttcgccgccgcccggagtggcgtagagtgcgcctgcagcctggcctgtggctggcgtgggcggtgatgatcgccgccctgttaatggccattgccccacagtggtttacctccgctaacccgctggaggggatccccggcgctcagcgcctggcgccgcaggcgcactactggctgggtaccgaccagctggggcgcgacctgtggacgcgggtggtttacggcgcggtgcattccctgtcggcggcgctgatcgccgtcgccatcggcctggtggtgggtaccacccttggcaccctcgccggggcgctggccggacgcgtggaatccaccatcatgcgcctggtcgatgtcctgctggccatcccctccctgctgctgcagctcacggtgattattctgctgggtttcggcacggtaaatgcggcggtggcggttggcgtcgcggctatcgccagcttcgcgcgcctggcgcgagcagaagtggtacgcgtgcgccacagcgattacgtcgaggcggcccggggcagcggcggcacttttttcgccgtcttctggcgccatattctgcccaactcgctcactgcggtgcttgctttcgcgacgctgcagttcggtcaggcgatgttggccctggccaccctcagcttcctcggctacggcactccgccgccggtcccggagtggggactactgatcgccgaaggtcgcaattacctgtcaaccgcctggtggctgaccaccttccccggcctcgccgtggtcgccgtggtccttgccgccaatcgtcttagccgccagtggagtggagcacgcccatga

SEQ ID NO: 136852 - DNA, 1554 bp, Enterobacter cloacae
gtggtgcacaacatcagcttttccatccagcgcggcgaaatgctggccttcgtcggagaatccggctcggggaaaaccaccaccgcgcaggccattatcggcctgctggcggataatgcccgccgggatgccgggcggattgtcctcaatggcgaagtgattagcgactggtcggataaacgcctgaaccgcctgcgcggagtgagcatcagcctggtcccgcaggatcccggtaattcgctcaacccggtaaaaaccattggtcagcaggtggaagagatcctgcggctgcatcagtccctctccgccgctgagcgccgacagcaggttcttaacctgctcgctaaagtcggtctcagccacccggaacagcgttttgaccaatatcctcatcagctgtctggcgggatgaaacagcgggtgctgatagccatcgccattgccctgcagccggatctgattattgccgacgagcccaccagcgccctcgacgtcacggtgcagaagcgcattctcgacctgctcgatatcctgcgtcgcgagtcgggcaccgccgtgctgtttgtcacccacgatctggcgctggccgccgaacgcgccgaccggatcatggtgtttcgccaggtagaaattcaggaacaaggcgccaccgaggcgattgtccagcgtccgcagcatccttacacccgccagctgctccacgacctgcaggatgcgccgttggggctggcggcggcgcgtcaccggccgctggccacgccggccattcgcgtggaggggatcagcaaacgcttctcgctgggcaaacaggcgctgcaggcgctcgacagcgtcagctttgaggtcagacgcggcagcacccatgcgctggtgggcgaatccggctccgggaaaaccaccctggcgcggatcctgctgggctttgagcgcgccgacgccggacaggtcatcatcgacggtatcgacgccgggcatctcagccgcgaggcacagcgtcagctgcggcgcaagatccagtttgtctaccagaaccccttcgcttcgctcgacccgcgccagacgctgtttgcgattatcgaagagccgttaaaaaactttgagcgcctcagcgcggcgacgcgtcgccagcgtgtggagagcgttgccgcccgggtggccctggcccccgagctgctgtcgcgtacgccgcgggagctttccggcggccagcgccagcgggtggcgattgcccgggcgctgatcctcgagccggcgatactggtccttgacgaagcgacttcggcgctcgacgtcaccgttcaggcgcagatcctcgccctgctgcagcagctacagcagcagctgggtctgagctacctgttcattacccacgatctggcgacggtcaggcggatcgccgacagcgtcacggtgctgcgcgccggccaggtggtggagcatggcgacgtaaaccgcctgttcgccgccccgcagcaggcctacacccgcgaactgatcgccgccattccccaggtttcctcccgcttagcacaggcccacacggagaacgcataa

SEQ ID NO: 136853 - DNA, 987 bp, Enterobacter cloacae
atgccaaaacgcctcggtttttttacccgtctgctcgatcagggctccgcgcaaacgcgctaccggctggcggccgaacagatccgccacgcggagcgtttgggcttcgacagcgcatggattgcccagcaccattttcatgaacaggaaggcggcctgccatcgccgctggtgtttctcgcccacgtcgcggcacagaccgaccggatccgtctcggcacggcgattatcactctgccgatggaaaatccgctgcgcgtcgccgaagacgcggcggtactggatttactcaccgacggacgtctggaggtgggttttggctccggcggcacgccaacctcgtttctgcccttcggcctgaccagcgagcagcgcggggcggcgtttgccgaccatctgcacctgatccatagcgcctggcgcggcgacacgctaagccacccggacaaccgtctctatccgccggcgccgcagttggcggagcgtatctggatcgccaccttctctgcggagggcgccatccgcgccggtcaggcgggacacgggttgatgctgtcccgcacccagccacggccacccggcgagccacgtctgccgctggacgccattcagaacccgatcattgacgcctacctggcggcgctgccggacggcgttgcgccgcggatcctcgcctcgcgcaccgccttcgtcgccgacagtcacgcccacgccctgcaggtcgccgagcccggtctgcgcaagcaggcgactcagcaccgggcggcgggtcatacgatagaaggtgacagtgtcaccgactatctgcaacagctggatgcccacgttggcgatcctgagcatgttattgcctccctggcgcaggacagcgtgctggcccgcgccaccgatatttcgtttcaggtgcactcggtcgagccttcgcaccgggatacgctgcgttccattgagctgatcgcccagcatattgccccccacatcagataa

SEQ ID NO: 136854 - DNA, 918 bp, Enterobacter cloacae
  misc_feature (831)..(840): n is a, c, g, or t
atgacgctgagtcaggatattctggccgaactggcggagattacccccggttccccgctttatcaggcgcgcgccgtccgcgatgccgccacccgtcacgcccagggaagttatgaagtgctgttccgccagcaggacgctgactttcctcttgatgaacgcttcgcggtggccgcgaaggtggcgaaactgcaccaggcggacgcgctggcggcgcactatgccggtttcggcctcgccgatccgaccaccgatcgtctggtcccggcgctggcctttgcccgcctgctcaccttcacccccgttgaagccactcccggcgcgctgcacaccttaaccagcgcgggctggagcctgcggggcatcgtcaccctggcgcagctggtagcctttgtcagcttccagagccgactgctgctgggcctgcgggcgctcaaccataagcccatcgtcagcgcagatacgccgctggtcgccggatactggcataccaccccgtacgcgcagagcggcaaagcggccccggttcgcttcacccgcgacgagctgcactgggaaccctggctggccgataaaccgctggcggaattcaacgctgaagaacaggcgattctggccaaatatggccatagcgactccccctactttcgcctgctggcgcgcaaccagccggtgctggagcagcggaccctgaccgataagggcattttctataccgcgggaggattgccgcgcgccgaacgcgagctggccgccacggtcgccagtaaaatcaacggctgtatttactgcgcctcggtgcatgcccgcaaagcggcgcagctggcgaannnnnnnnnncgccgggagaggatctgcgcgacgggcaatcgccgcgctggcaggcggaaatcgacgccgccgccgcgctatcggtga

SEQ ID NO: 136855 - DNA, 153 bp, Enterobacter cloacae
gtgacgccacccgcgttaaacgccgatcatctggcggcgcttgatgagcagggcttagatactctggcccagctggatctgctgcagtccgcggcctttttcgcctgggccaaccgcctgatgctgaccctgggcgaaccctggcgtgagtag

SEQ ID NO: 136856 - DNA, 1155 bp, Enterobacter cloacae
atgaaaaaaacgattttttcactggcgctgggcacctttggacttggcatggcggagtttggcattatgggcgtgctgccggatatggcgcacgatgtcggaatatccatacccgccgccggcaatatgattgcctggtatgccttcggcgtggtgatcggcgcgccgatcatggcgctgctctccagccggttttccctgaaatcggtgatgctgttcctggctggcctgtgtattctcggcaataccctgtttaccttctccagtagctacgccatgctggcgcttggccggctggtttccgggtttccccacggggcgttctttggcgtcggcgcgattatcctgtcgaaaatcgcgccgccggggaaggtgaccgccgcggtggcggggatgattggcggcatgacgatcgctaacctggtgggcgtcccgggcggcacctggcttgggcatcacttcagctggcgctatacctttgcgcttatcgcggtatttaacgtggcggtatttctggcgatcttctgctgggtgcccacgctttatgaccgggccagcacgcggctgcgcgagcagttccgttttcttgcctccccggcgccgtggctgattttcgccgccaccatgttcggtaacgccggcgtgtttgcctggttcagctatatcaagccctttatgctcaatgtatccggctttgctgaaagcaagatgatgctgattatgatgctggcggggctgggaatggtggtcggcaatctgttcagcggcaaaatttccgggcgctacagcccgctgcgcattgcggccatgaccgacggggtcattgccgtgacgctgctgctgatctttgccttcggtgaacagaaagtcgcttcgctggcgctggcgtttctctgctgcgcgggactattcgccctgtcagcgccgctgcagatcctgctgctgcagaacgccaaaggcggcgagatgctgggggcggccgggggacagatcgcctttaacctcggcagcgccatcggcgccttctgcggcggaatgatgatcgcccagggctttggctggaacagcgtggcgctccccgccgccgcgctgtcgtttctggcgatgagcgccttgctcatctatggctgtcatcagcggcgacaagcttactaa

SEQ ID NO: 136857 - DNA, 441 bp, Enterobacter cloacae
atgcaaagtgttgatgtcggttttactcatgtcgcctttaccgtccgctgtctggccagcagcatcgatttttatacccgctataccgcgatgaccgtcattcaccagcgcgagcccgacctcccctcggcgcgaaaagtggcatggctcagcgaccgcacccggcctttcgccctggtgctggtgcaaagtgacgatccggccgatacgccgctgggaccgttcggccatctcggcgtcgcctgcgccacccaggccgagatcgatgagaaagtggccctcgcacggcgggaaggtgttttacgccgggagccggagcagctgggcgatccggtgggctatttcgctttctttgccgacccggacggtaacaccctggagctgtcgtgggggcagcgggtgggactggaagtcatcctggcgggaaaacccggcgaataa

SEQ ID NO: 136858 - DNA, 375 bp, Enterobacter cloacae
atggtcggccgtggtcgaggtacccagcgaggccacggcataattaatgtcgtactgcgccagcgccacgacgtccatatacccttcgacaaccagcaaacgcggtggttcggggttatcctgctgcgcttcatacaggccatacagctggcggcctttatggaatatgtcggtttccggggagttcagatacttcggcagggcatcgcccagcacccgtccgccaaacccaatcacccggcctcgcttatcgcggatggggaacatcacccgttcgcggaagcggtcgtaactgcgtccctgatcgttggtgaccagcatgccggcatcaataagcgactggcggttttcctgattgccgccaaaccgttttaa

SEQ ID NO: 136859 - DNA, 351 bp, Enterobacter cloacae
atggcgctctatctggctgggtccgttgcctgcttcataaggcacttcgaggttgtgcatggcggccagctcttcgaccgtttccacgaactcgagcttgtcgtagttcatcaggaagtcgatagcattgccgtgcgccccgcagccgaagcagtggtaaaactgtttttcaccgttgacggtgaaagagggggttttttcgttatggaacggacagcacgcgtgaaaatttttgccctgctttttcagctttacccgcgcatcgatcagatcgacgatgtcggttctggcaagcagatcgctaataaatacacgtggaattcgtccagccataagccccgttatttctga

SEQ ID NO: 136860 - DNA, 216 bp, Enterobacter cloacae
atgccggtaattaaagtacgtgaaaacgagccgttcgacgtagctctgcgtcgcttcaagcgttcctgcgaaaaagcaggtgttctggcggaagttcgtcgtcgtgagttctatgaaaaaccgactaccgaacgtaagcgcgctaaagcttctgcagtgaaacgtcacgcgaagaaactggctcgcgaaaacgcacgccgtactcgtctgtactaa

SEQ ID NO: 136861 - DNA, 1014 bp, Enterobacter cloacae
atgcgtgtactgggcattgaaacatcctgcgatgaaaccggcatcgcgatttatgacgaccagcaaggtctgttagccaaccaattgtatagtcaggtgaaactgcatgcggattacggcggcgtggtgccggagctggcatcgcgcgaccacgtgcgcaaaacggtgccgctgatccaggcggcgctgaaagaagccggtctgacggcgaaagatatcgacgccgtcgcctatacggcgggtccaggcctggtcggcgcgctgctggtcggggcgaccgttggccggtcgctggccttcgcctggaacgtgccggcgatcccggtacaccatatggaagggcatctgctggcgccgatgctggaagataatccgccggcgttcccgttcgtcgcgctgctggtttccggcggccacacccagttgattagcgtcaccggtattggtcagtatgaactgctgggcgagtcgattgacgatgcggcgggcgaagcctttgataagacggcgaaactgctgggactggattatcccggcgggccgatgctgtcgaaaatggcgtcccagggcaccgaaggccgctttgtcttcccgcggccgatgaccgaccgtccggggctggacttcagcttctccggcctgaagaccttcgccgccaacaccattcgcagcaacggcgacgatgagcaaacccgcgccgacatcgcccgggcgtttgaggatgcggtcgtcgatacgctgatgattaaatgtcgccgcgcgctggagcaaaccggctttaagcgtctggtgatggcgggaggcgtgagcgccaaccgtaccctgcgggcgaagctggcggagatgatgcaaaaacgcggcggcgaggtgttctacgctcgccctgagttctgtactgacaacggcgcgatgatcgcctacgccggcatggtgcgtctgcaaaccggcgccaaagccgagctcggcgtgacggttcgcccgcgctggccgctggccgagctgcctgccgcctaa

SEQ ID NO: 136862 - DNA, 1608 bp, Enterobacter cloacae
atgtcatcactggatcttaaccctgaattacccgcgacaacgcggacttccggctcccgggaaaccttagaagattacaccttacgttacgccccgctgagctttcgccgctggggtccgggcgtcgtcgcggtcaccgcgctgggcggcatcgcctatctggccgacttttccatcggcgccagcatcggtatggcctggggcaccagcaacgccatctattcgatcctggtggcggcgctggtgatcttcctcaccggcattccgctggcgatcaccgccgcgcgctacaacattgaccttgacctgatcacccgcagcgccggcttcggctatttcggctcggtgatcaccagcattatttttgccggcttcacctttatcttcttcgccctcgaaggctcgatcatggcccagggcctgctggtgggcctcgggatcccgctgtggatgggatatctgatcgccaccctgatggtgctcccgctggtggtctatggcatgaaagccctgacccgcctgcaggtgtggaccacgccactgtggctggtgctgatggtggtgccggtggtgtggctgattgtcaaagatccgcagctggtggacggcttcctgcatttcgccggtaaaaacagcgcgtcgacggtggatattaccgccatcatgctcggcgccggggtatgcctgtcgctgatcatgcagattggcgagcaaattgattacctgcgctttatgccgcctaagaccgcggagaatcgtaaaagctggtggctggcggtcttttccgccggcccgggctgggtggtgttaggggcgatcaaacagatcatcggcgccttcctcggcttctatctgttgacccgtttcccggcggtgcacaataccgaaccggtgcagcagttcgtcagcgtcttcgataacctggtgcccggctggctggccctgacgctggcggtggtgctggtggtgatctcgcagatcaaaattaacgtcaccaatgcctactccggctcgctggcgtggaccagcgcctggacccgcaccaccaaacgctatccgggacggattatttttgtggtggtcaacctggcgattgccctggcgctgatggagggcgatatgttcagcgccctgtcgtggatcctcggcttttactccaacttcgctatcgcctgggtcgtggtggtggcgaccgacatcacctttaataaaggcttgctcaagctggcgccggcgcagccggagtatcgccgcggcatgatctacaacgttaacccggtgggcgtggtctcctttggcctggccgccgggctgtcgatctgcgccttcttcggtctgctgggggcgacgctggcgccgttctcgccgctgattgcgctggtcgtcgcctttgtcatgaccccgctgatggggctccttacccgcgggcgctactatattaagcaggtggatgacggtatcgccgagccgcgctatgacgcggcggggaacgcctccaccaccgtgtatcaatgcgttagctgtgaggaagagtacgagcgcccggacgtgatgcactcgcacaagcatcagggagccatctgctcgctgtgtaaaagtatggagtag

SEQ ID NO: 136863 - DNA, 618 bp, Enterobacter cloacae
atgaactcttataaacacccgctgcgcgtcggcgtcggcggcccggtcggctccggtaaaaccgctctgctggaagcactgtgtaaagcgatgcgcgatacctggcagctggcggtggtcactaacgacatctataccaaagaagatcagcgcatcctcaccgaagcgggcgcgctggcgcctgaacgcatcgtcggtgtggaaaccggcggctgcccgcatacggcgatccgcgaagatgcctcaatgaacctcgccgccgtggaagcgctgagtgaaaagttcggtaacctcgaccttatcttcgtggaaagcggcggcgataacctgagcgccaccttcagcccggagctggcggatctgaccatctacgtcatcgatgtggccgaaggggagaagatcccgcgcaaaggcggaccggggatcaccaaatccgatttcctggtgatcaataaaaccgaccttgccccctatgtgggcgcgtcgctggaggtgatggcgagcgatacccagcgtatgcgcggcgatcgcccatggaccttcaccaatctgaagcagggcgacggcctgagcaccattatcgccttcctcgaagacaaaggcatgcttggcaaatag

SEQ ID NO: 136864 - DNA, 711 bp, Enterobacter cloacae
atgctcatcatgaccaccacgctcacagccactagcatgtcgacagcggaacaacgcctgcggctgatgcagctggccagcagcaacctgccggtagggggttacagctggtcccaggggctggagtgggctgtggaagccggctgggtgccggacgtcgcggccttcgagcgctggcagcgacgccagatgacggaaggcttttttaccgttgacctgccgctgttcgcccgcctgtaccgcgcctgcgaacaaggcgatatcgctgcggcccagcgctggaccgcctatctgctggcctgccgggaaactcgtgaactgcgggaggaagagcgcaaccgcggcgcggcgtttgcccgtctgctgagcgactggcagccggactgtccgccgccgtggcgctccctgtgccagcaaagccagctcgccgggatggcctggctcggcgtgcgctggcgtatcgccctgcccgagatggccctcagcctgggctacagctggattgagagcgccgtgatggccggcgtcaagctggtccccttcggccagcaggccgcccagcagctgattttacgtctttgtgaccactacgcggccgagatgccccgcgcgctggccgcgccggacggcgatatcggatcggccaccccgctcgccgccatcgcctctgcccggcatgaaacccaatactctcgattattccgttcctag

SEQ ID NO: 136865 - DNA, 477 bp, Enterobacter cloacae
atgctttatttaactcaacgtctggagatccccgccgccgcgaccgccagcgttacgctgccgattgatgttcgcgtcaaaagccgggttaaggtcaccctcaacgatggccgggaagccggcctgctgctgccccgcggcctgctgctgcgcggcggcgatgtgctcagcaacgaagaaggcaccgagtttgtgcaggtgattgccgctgatgaaggggtgtcggtagtgcgctgcgacgatccgtttatgctggcgaaggcctgctaccacctcggcaaccgtcacgtgccgctgcagatcatgcctggcgagctgcgctaccatcacgatcacgtgctggacgatatgctgcgccagttcggcctgacggtgacctttggccagctgccgttcgagccggaagccggcgcttacgccagcgagagccacggtcatcatcatgctcatcatgaccaccacgctcacagccactag

SEQ ID NO: 136866 - DNA, 1704 bp, Enterobacter cloacae
atgagtaatatttcacgccaggcctatgccgatatgttcggccccaccgtcggcgacaaggtgcgcctggcagataccgagctgtggatcgaggtggaggacgatttgaccacctacggggaagaggtcaaattcggcggcggcaaagtgatccgcgacggcatgggccagggacagatgctggccgccgactgtgtcgacctggtgctcaccaacgcgttgatcgtcgatcactgggggatcgttaaggccgatatcggcgtgaaggacggccggatcttcgccatcggcaaagccggcaaccccgacatccagcccaacgtcaccatccccatcggcgccgcgacggaagtgattgccgccgaaggaaaaattgtcaccgccggcgggatcgatacccatattcactggatctgtccgcagcaggcggaagaggcgctggtctctggcgtgaccaccatggtcggcggcggcaccggcccggccgcgggcacccacgccaccacctgtaccccgggcccgtggtatatctcacgcatgctgcaggcggccgacagcctgccggtcaatatcggcctgctgggcaagggcaacgtttctcagccggacgccctgcgcgagcaggtggcggcgggcgtcattggcctgaagatccatgaggactggggcgccaccccggcggcgatcgactgtgcgttaaccgtcgccgatgaaatggacattcaggtcgccctgcacagcgacaccctcaatgaatccggttttgtggaagacaccctcgccgccatcggcggacgcaccatccacaccttccataccgaaggggccggcggcggccatgcgccggacatcatcaccgcctgcgcccatccaaacattttgccgtcgtccaccaacccaacgctgccctacaccctcaacaccatcgatgaacatctcgatatgctgatggtctgccaccatctggacccggacattgccgaggacgtggcctttgccgagtcgcgcattcgccgggaaaccatcgccgcggaagacgtgctgcacgacctcggcgccttctcgctcacctcctccgattcgcaggccatgggccgcgtcggggaagtgattctccgcacctggcaagtggcgcatcgcatgaaggtgcagcgcggagcgctggcggaggagaccggggataacgacaacttccgcgtgaagcgctacatcgccaaatacaccatcaacccggcgctgacccacggcatcgcacacgaagtcggatccattgaggtgggtaagctggctgacctcgtggtctggtcgccagccttcttcggcgtgaaaccggccaccgtgatcaaaggcggcatgatcgccatcgcgccgatgggcgatatcaatgcctctattccgaccccgcagccggtgcactaccgcccgatgtttggcgcgctgggcagcgcccgccatcactgccgcctcaccttcctgtcgcaggcggcggcagccaatggcgttgccgagcggctgaacctgcgcagcgcgatcgccgtggtgaaaggctgccgtacggtgcagaaagccgacatggtgcacaacagtctgcagcctaacatcaccgtcgacgcccagacctatgaggtgcgggtggatggcgaacttatcaccagcgagccggcagacgttctgccgatggcgcaacgatattttctgttttaa

SEQ ID NO: 136867 - DNA, 321 bp, Enterobacter cloacae
atgatccccggtgaatatcacgttaagcccggtcagatagccctgaataccggccgggcaacctgtcgcgtggtcgttgagaaccacggcgatcggccgattcaggtcggttcgcactaccatttcgccgaggttaacccggcgctgaagttcgaccgtcagcaggccgccggctatcgcctgaatatcccggcgggcacggcggtacgctttgaacccggccagaaacgcgaggtcgagctggtggccttcgccggtcaccgcgccgtcttcggcttccgcggcgaggtcatgggccctctggaggtaaacgatgagtaa

SEQ ID NO: 136868 - DNA, 303 bp, Enterobacter cloacae
atggaactgaccccccgagaaaaagacaagctgttgctgtttaccgccgcgctggtggcggagcgtcgcctggcccgcggcctgaagctcaactatccggagtccgtggccctgatcagcgcctttattatggaaggcgctcgggacggcaaaagtgtggcctcgctgatggaggaaggccgtcacgtcctgacccgcgagcaggtgatggagggcgtcccggaaatgatcccggatatccaggtcgaagccaccttcccggacggctcgaagctggtcaccgttcacaacccgattatctga

SEQ ID NO: 136869 - DNA, 825 bp, Enterobacter cloacae
ttgcacggcaccgtgttaccaccactcaaaaaaggctggcaggccacgctggatctccgctttcaccaggccggcggcaagaccgttctcgccagcgcccaacacgtcggcccgctgaccgtccagcgcccgttttacccggaagaagagacctgtcacctctatctgcttcacccgcccggcggcatcgtcggcggtgatgagctgacaattagcgcgcaccttgcccccggctgccatacgctgataaccatgcctggcgccagcaagttttaccgcagcagcggcgcgcaagcgctagttcgccagcagttgacccttgccccgcaggcaaccctggagtggctcccgcaggatgccatcttctttcccggggccaatgcccggctgttcactacctttcatctttgcgcctccagcaggctgctggcctgggatctgctctgccttggccgcccggtgattggcgaaaccttcagccacggcaccctcagcaaccggctggaggtatgggtggacgatgagccgctgctggtcgagcgcctgcagctgcaggagggagagctctccagcgtcgccgaacgtccctgggtcggcactttgctgtgctatcccgctaccgatgccctgctcgacggggtgcgcgacgcgctggcgccgctcggtctctacgccggcgccagcctgaccgaccgcctgctgacggtgcgtttcctcagtgacgataatctgatttgccagcgggtgatgcgcgacgtatggcagtttctgcgccctcatctcaccggtaaatctcccgtacttccccgaatctggctgacttaa

SEQ ID NO: 136870 - DNA, 618 bp, Enterobacter cloacae
atgagtgcaatcgcgcctggactggtactcctcgcctacctctgcggctccatttccagcgccattctggtatgtcgccttgctggcctgcccgacccacgcgacagcggctcaggcaaccccggggccactaacgtactacgaattggcggaaaaggggcggccgtagcggtacttatttttgatgtgctgaagggcatgctcccggtgtggggcgcctgggcgctgggccttacgccgttctggctggggttagtggcgattgccgcctgcgtgggccatatctggccagtcttctttcatttccgcggcggtaaaggcgtcgccacggccttcggcgctatcgcccccatcgggctcgatctcaccggggtgatggccgggacctggctgctgaccatcctgctcagcggctactcttccctgggcgctatcgtcagcgcgctgatcgccccgttctacgtctggtggttcaaaccgcagtatacctttccggtgtcgatgctctcctgcctgatcctcctgcgccatcacgacaacattcagcgtctgtggcgtcgccaggagagcaaaatctggacccgcgtgaagaagaaaaaaacgccagagcagaagtaa

SEQ ID NO: 136871 - DNA, 384 bp, Enterobacter cloacae
atggatattgtatttatagagcaactttcggtaatcaccaccattggtgtttatgactgggaacaaaccattgagcagaagctggtgttcgatatcgaaattgcatgggataaccgcaaggcggccgccagcgatgatgtcagcgattgcctcagctatgctgatatcagcgagcgcgtgatcgcgcatgtggaggggggaaaatttgcgttagtggagcgggtggcggaagaggtggccgacctgctgctggaaacattccagtcgccatgggtgcgcataaaagtcagcaaacctggcgccgtggctcgcgcggcaaacgtcggggtgattattgaacgtggccttaatctgaaacaaaacttttcaggtcatacttgttaa

SEQ ID NO: 136872 - DNA, 822 bp, Enterobacter cloacae
atgagcgatatacactcgctgctggtggcggcaatattgggtgtggttgagggtttgacagagtttttacctgtttccagtaccggtcatatgattattgttggtcacctgctggggtttgaaggtgataccgcaaatacctttgaagtggtgattcagttaggttcgatactcgccgtggtggtgatgttctggcgtcgcctgttcggcctgatcggcatccatttcgggaaaccgccggcgcatgaaggccagggcagcggccgtttgtcgcttatccatatccttctcggcatgatccccgcggtggtgatggggctgattttccatgacaccattaaatccttgtttaacccggtgaacgtgatgtacgccctgattgtcggcggcgtattgctgattgcagcggaagtgctgaagccgaaacagccgcgcgcggtcgggattgacgatatgacctaccgtcaggcgttcgtcatcggctgctttcagtgcctggcgctgtggccaggtttctcccgctcgggggcgactatctccggcggcatgctgatgggcgtcagccgctatgcggcctcggagttctctttcctgctggcggtaccgatgatgatgggcgccaccgtgctggacgtctacaagagcatcggcttcctgaacatgggcgacgtcccgatgttcgccgtcggcttcgtgatggcgtttatcgtggcgctgattgcgattaaaaccttcctgcagctgatcaaacggatctcgttcattccgttcgctatctaccgctttatcgtcgcggcagcggtgtacgtggtcttcttctaa

SEQ ID NO: 136873 - DNA, 1242 bp, Enterobacter cloacae
gtgaagagttatctggtcggtggcgcggtgcgtgacgcgctgttagggctgccggtcaaagaccgagactgggtggtggtgggcgccaccccgcaacagatgctagacgcgggctatcaacaggtaggccgcgattttcccgtgttcctccatccgcaaagccgggaagagtatgccctggcccgcaccgagcgcaaatccggcgcgggctataccggttttacctgctatgccgccccggacgtcaccctcgaagccgatctgctgcgccgcgacctgacggtcaatgccctcgcccaggatgccgacggcgcaattatcgacccctacggcggacagaacgatctccgtcagcgcctgctgcgccatgtctctcccgcgtttagtgaagatccgctgcgcgtgctgcgcgtcgcgcgctttgccgcccgctacgcccacctcggttttcgcattgccgaagagacccaggccctgatggccgcgatggttgaggccggcgagctggcgcatttaacgccggagcgggtgtggaaggagacggaaagcgcattaactactcgcaacccgcaggtctttttccagacgctgcgcgactgtcaggccctcaaggtgctgttcccggagattgacgccctgtacggcgtgccggccccggcgaaatggcatccggaaatcgataccggcctgcacaccctgatgaccgtcacgatggccgcgatgctgtcgccggatgtcgacgtacgtttcgccaccctgtgccatgacctcggcaaagggctgacgccgaaggcgctctggccgcgtcaccacggccatggtccagcgggagtcaagctggtggagcagctctgcgcgcgtctgcgggtgccgaacgatatccgcgatctcgcgaaactggtggcggagtaccatgacctaatccacaccctgccgattctgcagccgaaaaccctcgtcaaactcttcgacaacattgacgcgtggcgcaaaccgcagcgcgtgcagcagatcgcgctcaccagcgaagccgacgtccgcggacgcaccggtttcgaggccagcgattacccgcaggggcgcctgctgctggaggcctgggaagtggcgcagtcggtctccactaaagaggtcgtggcggcgggctttaaaggggcggaaattcgcgaggagctgacgcggcggagaattgcggcggtagcgcagtggaaggaaaagcgttgcccccagccgcaaggctga

SEQ ID NO: 136874 - DNA, 621 bp, Enterobacter cloacae
atgccaaaattacgcctgattacttttactttgctcgcgcttagcgccgccacggcggttcacgcagaagaaaagcgctacgtttccgatgagctgaacacctgggttcgcagcggcccgggcgataattatcgtctggtcggcaccatcaacgccggggaagaagtgtcggtactgcaaacgaacgacagcaccagttacgcgcaaattcgcgatagcaacggccgtaccgcctggatcccgctgaaagagctgagcaacgagcccagcctgcgcacccgcgtcccggatctggaaaaccaggtcaaaacgctgaccgataagctgaataacatcgatgccacctggaaccagcgcacggcggatatgcagaagaaagtcgccggcagcgacagcgtgattaacgcgctgaaggacgagaaccaaaagttgaaaaacgagctggttgtcgcgcagaagaaggtgaatgcggcaaatctgcagcttgatgataaacagcgcaccattatcatgcagtggtttatgtacggcggcggtgtgctgggcgtcggtctgctgctcggtctggtgctgccgcatctggtgccaagccgcaaacgtaaagaccggtggatgaactaa

SEQ ID NO: 136875 - DNA, 1299 bp, Enterobacter cloacae
atggctcaagaaatcgaactcaagtttatcgtcgctcaggatggggtagagacgctgcgcgagcagctcaatgcgctcgaggcgaaacatacgcccgcgggccagttgctgaacatttattacgaaaccgccgataactggctgcgtcgtcacgatatggggctgcgcatccgcggcgatcaggggcgttatgagatgacgctgaaaatcgccggtcgggtggtcggcggcctgcaccagcgcccggaatataatattccactggataaaccggagctggcgcttgagcgcctgccggcggaggtctggccgcaaggggaacttccggccgcgctggcggagcatgtccagccgctgttcagcaccgattttgcccgtgaacgctgggtgatccaggaaggaaagagtgagattgagattgccctcgatcgcggcgaagtaaaggcgggcgaacatcaggagccgatctgcgaactggagctggagctgctcgccggggagaccaccgatctgctgcgcctcgcgcatcgtttgctggagagcggcgtcctgcgtcaggggagcctgagcaaagccgcgcgcgggtatcatctggcgcaaggtaacaatgagcgtccggtgacccggctggcggtgctgccggtggcagcgaaggccagcgtggagcaggggctggaggcggcgctggagagcgccctggcgcattggctgtatcacgacgagatctggctgcgcggcaacgcaaaagccaaagcggaaattctgctggcgatagcccgcgtgcgccatgccctcgtgctgttcggcggcatcgtgccgcgtaaggcgaccacccacctccgcgcgttgctgaacgacgccgacgccgttctgctggctgcggacaccgccgacgaagcgttattccgcaccgaggtcgttggcgccaaactggccctgaccgaatggctggtccaacgcgggtggcgtccgttcctcaacgaggcgggagagaaaaaaatagccggatcgttcaaacggtttgccgatattcacctctcgcgggtggcggccgagctgcgcagcgccgtgcagcatctggcggtagaagatgccgctgaccagttgccgaagctgtcccgcgacatcgacagcgtccagctgctggcgggcgcctatggcgacgccgtcgcgccgtggctggagaactggcaggaacttcagcgtgcgatagagcatgacgaccgcagcgtgtttgaatatttccgtcgccaggcgctggctgccgagccgttctggctgcatagtggaaaacgataa

SEQ ID NO: 136876 - DNA, 360 bp, Enterobacter cloacae
  misc_feature (293)..(302): n is a, c, g, or t
atgatgccgctttctccgcagttacagcagcactggcagacggtcgctgaccgtctgccaacggattttcccgttgccgaactgagcccacaggccaggtcggtgatggcgttcagcgattttgtcgaacagagtgtgatcgctcagccgggctggctgaatgagcttgcggactccgcgccggcggcggaagagtggcggcattacgaagcctggctgcaggagcgcctgcaggccgtcactgacgaagcggggttgatgcgagagctgcgtctcttccgccgccagatgannnnnnnnnnatcgcctgggcgcaggcgttgtcgctggtgcgcgaagaagagacgctgcagcagctga

SEQ ID NO: 136877 - DNA, 1068 bp, Enterobacter cloacae
  misc_feature (1032)..(1041): n is a, c, g, or t
gtgcgcgaagaagagacgctgcagcagctgagcgtcctggcggagaccctgattgtcgccgcccgcgactggctttacgccgcctgctgtaaagagtggggaacgccatgcaacgccgagggtcagccgcagccgctgctgatcctcgggatgggaaagctgggcggcggcgagctgaacttctcttccgatatcgatctgatctttgcctggccggagcatggcgccacccgcggcggccgccgcgagctggataacgcccagttctttacccgcctggggcagcggcttatcaaggcgctcgaccagccgacgcaggacggctttgtttatcgggtggacatgcgcctgcggccgtttggcgacagcgggccgctggtgctcagctttgcggcgctggaagattattaccaggagcaggggcgggactgggaacgctacgcgatggtgaaagcgcggatcatgggcgataacgacggcgcctacgccagcgaactgcgcgcgatgcttcgccccttcgtcttccgccgctatatcgacttcagcgtgatccagtcgctgcgtaacatgaaaggcatgatcgcccgtgaagtgcggcgtcgcgggctgaaagacaacatcaagctcggcgccggcggcattcgtgaaattgaatttatcgttcaggtctttcagctgatccgcggcggtcgcgaacctgcgctgcagcagcgcgcgctattgccgacactggcggcgattgatgagctgcatctgctgccggaaggcgacgcgacgctgctgcgcgcggcctatctgttcctgcgccggctggaaaacctgctgcaaagtatcaacgatgaacagacccagaccctgccgcaggatgaactgaaccgcgccagactggcgtgggggatgcataccgatgactgggagacgctgagcgcgcagctggcgaaccatatggccaacgtacggcgggtgtttaatgaactgatcggcgatgacgaggctcagtcgccagatgagcagctggccgagtactggcgnnnnnnnnnntcattacggctcgatgaagaaacgtag

SEQ ID NO: 136878 - DNA, 1401 bp, Enterobacter cloacae
gtgctggcgctgattgccgatttccgcaaagagctggatcggcgcaccatcggcccgcgcggccgccaggtgctggatcagctgatgccgcatctgctgagcgaactctgctcgcgcgccgatgcgccgctgcctctggcgcggatcacgccgctgttgaccgggatcgtcacccgcaccacctatcttgaactgctgagcgaattccccggcgcgctgaaacacctgattacgctctgcgcggcatcgccgatggtcgccagccagctggcgcgccacccgctgctgctggatgagctgctggatcccaacaccctctatcagccgacggcgaccgatgcctatcgcgacgagctgcgtcagtatctgctgcgggtgccggaagaggatgaagagcagcagctggaggcgttgcgccagttcaagcaggcgcagcagctgcatatcgcggcggcggatatcgccggcaccctgccggtgatgaaggtcagcgatcatttaacctggcttgccgaagcgatcctcgacgcggtggtgcagcaggcatgggggcagatggtggctcgctacggcctgccgacccatctgcacgatcgccaggggcgcggcttcgccgtcgtcggctacggtaagctcggcggttgggagctgggctacagctccgatctcgacctggtgttcctccatgactgcccggcggaggtgatgaccgacggcgagcgggagattgacggccgtcagttctacctgcggctggcccagcggatcatgcatctgttcagcacccgcacctcgtccggtattctctacgaagtggacgcccggctgcgcccttccggcgcggcggggatgctggttaccaccgctgacgcgtttgccgactatcagcagaacgaggcctggacgtgggagcatcaggcgctggtgcgcgcccgcgtggtctatggcgacccggcgttgcaggcgcgctttgacgccattcgtcgcgatatcctgaccaccccgcgggagggcgcaaccctgcagaccgaggttcgcgagatgcgcgagaagatgcgcgcccacctcggcaacaagcatcccaatcgttttgatatcaaagccgatgccggcgggatcacggatattgaatttattacccagtatctggtcctacgctatgccagcgacaagccgaagctgacccgctggtctgataatgtgcgtattctcgagctgctggcgcagaacgacatcatggacgaggaggaagcgcgcgccttaacgcacgcgtacaccaccttgcgtgacgcgctccatcacctggccctgcaggagctgccgggacacgtggcgccagaggccttcagccgggagcgcgagcaggtcagcgccagctggcagaaatggctgatggcttaa

SEQ ID NO: 136879 - DNA, 1152 bp, Enterobacter cloacae
atgcagaatgtcgaagacgccgttggtcatcaccactttctcgccgcgcttgcgcgccgccgcaaccgcctgtttgagctcctcttcgctcatcacgccaaagccggtctcagcccggccgcggaccgcgttttccagctcgacaggggaaacggtggatgtacccagcttaccgaccaccacgcccgccgcggcgttagcgaaatagcaggcctcttccagggtgttgccggacgccagggtcgccgccagcacgccaatcaccgtgtcgccggcgccggtcacgtcgtacacttcctgggcctgggtcggcatatgcagcggcggacgccccggctgcagcagcgtcatcccctgctcagagcgcgtcaccagcagcgccgacagttcgaattcggcgatgagcttcatgccgcgctcaacgatctgcgcttcatcctggcacttgcccaccaccgcttcaaactcagagaggttcggggtgagcaacgtcgcgccgcgatagcgttcgaaatcggtgcctttcggatcgatcagcaccggcacgcccgcttcgcgtgcgagtcggatcatggtctggacgctggtcagcgcccctttggcatagtccgaaaggaccagcgcgccaatagagcccagcgcctgctgaatgcgctcgtgcatcggctgcggatcgacgccggagaagccctcttcaaagtcgaggcggatcagctgttgattgcgcgacagcacccgcagcttggtgatagtcgggtgagtcgggacggagacgaagtcgcacttcacattgacgttggccagcgcctggctcagcgcgcgggcggcgtcatcaatcccggtcaatcccaccaggcgcgaggttgcccccagcgaggcaatgttcatcgctacgtttgccgcgccgccaggacgttcttcgatattttccaccttcaccaccggcaccggggcttccggggaaatacgactggtggggccgtaccagtagcggtccagcatcacatcacccaccaccaacactcctgcacgttcaaactccggcagcgttactttcatgactctctcctgcgagacgcaaactttgcgcgcgataatagcacacccgattttatagttaagccatcagccatttctgccagctggcgctga

SEQ ID NO: 136880 - DNA, 693 bp, Enterobacter cloacae
atgtgtgcgaaggatcgtagtcaaattactgtacttagtcaaacggaaaccattcattcttttagcgagatgcttaacttttcatcttgcccctccttcattagaaacacccaaggtgaattccttcatactagcccactttttgacaaaatcttcttaacttccgtaacatctgttgcctggttttcggcgctacccttaaaaactaaaatagagcttatccagtcggaaattaaatcttttacggaagattcttctgttttggtaagaggtattggttttggggatatatcatggacagtttttattgagagctttcaccttgatgatgaaaaatatagtcgatgggtttttattagagagggtgaggctatatgcgactactcaaaagaatatgctgatttttcatcaaaaatggaaaaatatatagaccgcatttcaaaaacggctagttctgattgggctatatttaatctttattcggttgggttttctcatgccactatatctaaaattacaggtattaaagaacaaacatccagaaatacagttcgtcatataaaaaacgaactcaatttccccaatcgtgactatattatattgtcttctatttgtgctcttagttatgggagaattgtggggaatgttattgaaatactaaagggtgatgttaattttttgttaattcaatag

SEQ ID NO: 136881 - DNA, 393 bp, Enterobacter cloacae
atgggtaaagtgcaggcctatcccagtgatgaggtgtgtgagaaaattaatgcgattgtggaaaaacgcagaatggagggggctaaggataaggatgtcagcttttccagtatatctacaatgttacttgagttaggccttcgggtttatgaagctcagatggaacgtaaagaatccggatttaatcagatggcattcaacagagccttacttgaaagtgttgtgaaaacacaattttcagtgaataaagttctgggcattgagtgcctgagccctcatgtcaaagatgatcccagatggcaatggaagggtatggttcaaaatatccaggaggatgttcaggaagtcatgcgtacattctttcctgatgagcaggaggaagcggatgaatag

SEQ ID NO: 136882 - DNA, 495 bp, Enterobacter cloacae
ttgagaaaaaaactggcgtttgctgccctgttattaatatccacgcctgcatgggccacggattgttttgatatggcgggacgggattaccggattgatccggatctgctccgggctatttcatggcaggaatcgaaatgggtggtggatgctgtcggtaaaaatccgggaacaggatacggtgccggactgatgcagatcgattcgcagcaccatgcccggttatcggagttcggtattaaaccggaacatcttctgacggatgcctgcctgaatatttacaccggcgcgtattatctggcgctggcgtttaagaagtggggcgtcagctgggaggcagtcggtgcctacaacgccggattccgcagaacggacaggcaggacatgcgacgactggcatatgcgagaaagattgaggctatctacagggccatcaaggcaaataaaaatgccggacaatcccgggctgttaaaaacgaaagacctcatgaatga

SEQ ID NO: 136883 - DNA, 543 bp, Enterobacter cloacae
atgcacacaataaacgtcaaccccaacgtcaacaccgccactcgtgaatcagacgaacaatttataacagacaaatatctgcgttatgccgtcaccgatggcgatgagcgtctggattttatcccggccctcttttttacgccgtcagccgataatatggcggcgagctggttacgccagcattcggattacgatggcggattctggtcttactggattattccgcagggtgtcggcgggaatattaccccgaaccgtattcagttcatcaccacgcagaccgggtacattgcgccggaaggaaaacagtcttacaggatgcgcatccccggcaattattttgacggtgacgtcagcgccgatgcagcaggaattattgccacgctgacgataatgaactggctgtcatggcaggtggcggatatggggccggaatatgcccgcgtctgtaaacatctggtttcccgtcaggatgcactgaaagattatatcagcattattcatcatcccgaacggcatttaatctggcgggcgatagactaa

SEQ ID NO: 136884 - DNA, 834 bp, Enterobacter cloacae
atgtcgcagctgagttttgccgatgtgttcaacatggccagagaaaccgctgagaatagccctgtgatccaggtcagggcgcaggtcgcggaagtggtgccttctgttcagcgtttgatgagtgagcagcacagccggagccggtttatccacgtgtttaaagacacgggtcgccatctgggacgctgggcggtgttcagtgattttctgtcactggccgccagtgaactggatatggcccggataagagcgccggaaagcattgagcactgccggaaaatctgcgcgcgttatgaggcgtcagatatcgcgaagatgcaggagatgttctgcatgatggtgtgcgcactggaggctaaatttcatgatttcctcggcgccattttcatggtgcttgagctgggcgataactttcgcgggcagtattttaccccatatccggtccagtccctcatggcccggatgctgatgccgggcgtcagggacactatccgccgggaagggatagccacggtcagcgacccggcctgtggtgccgccgggatgctgattgcatatgccgaatgcctgctcgaagcggatatcaatccttccatgcacatgttcggcagctgcatcgatatcgatccggtggcggcagatatggctttcatccagctgtctctgctggggattgccgccgaagtggtcacgggtaacaccctgacaatgcagttccggcgggtaagatacactcccgtgtactacctcaatgactttgaaaaacggctggctgacctgacccggttcagggcgatgcgggactttatgcgcgggatacaggaggctgcgtaa

SEQ ID NO: 136885 - DNA, 231 bp, Enterobacter cloacae
atgaccctgactattctttcaccttccactgaggctgtaaagccccgccgtcaccagcgcattctgcgcgatgacatcgccgcgcgggagattgacccggcgctgaaagccttcggacggcatattgcccggagcattcgcaaggggcgcggcgtccatatcccggcgatgaacaacaccgccttcgggcaggtgctccgcacgcttgaactcaaacgcgcatgtaactga

SEQ ID NO: 136886 - DNA, 348 bp, Enterobacter cloacae
atgcacttacacctgactgaatcctcagcccgtccgggaatgcaggtcactgccgaagccgagcgcgagtactggatgagtcgccagaaagcggcggtgaaagcgcccgctgaaatcgacgttcacgccttccacgacgcgctgggtctgatgtacccgctcaactggtcaacgagtgagagcggtggctgggagacgttcatgctgcaggaaatggtctgtggtgacgtgacagagatttatgcccgctacggagccagatatttccggctgcgggatgtgtgcaacctgagccatgcgcagattaaaacgcgcattaaggaggaatttaacctgttccggaaatga

SEQ ID NO: 136887 - DNA, 339 bp, Enterobacter cloacae
atgaatacccgcatcgttcattccatatcgtccgttctgcgtactgatggctttgtgcgcaatatccacgccgctaacccgttcgatgttatccgcgccgatgtggtgcttgcgcgcatcgagaaagaggcagggcgctgctgcgggatgcattacgagctgtatcaggcgcgcgtgctgggcgatgcgctggattatctggacgcgctgccgctgaaagaccgcccggcgctcatgggcgcggcggcaaaacgcggttacatcctgacgctggctgaagaagggtacgcgcaggaagcccgcgatgtgctgatgagtgaactggcggaaaacgaatag

SEQ ID NO: 136888 - DNA, 876 bp, Enterobacter cloacae
atgaatcacaccaccacacaggctgtcagcgtcgacattaccccccacagcggcgcgggagaggtcatcccgtctttgcccgtcgagcgcattgtggcgcagcgtaacagcggcgtggcggcttttctggaagccataaggctgctacgcgaggcgcagaaactcatttttgaagcatccgggcgcgggtggatctcaggcatgaccgacatcattgagcgcagcctgtcagccgaccgcagcgccacgcgggaagctgccttaaaacgcagcgtctgccgctatgcagatcgcgacatctggacgcgcctgatgaatgatacgggcatgtttacgctaatgagtgaggcgcagcgtaaggaatgggacgcgcagttatacagcgacaactgccccgaaattacgctggacaacgtgatcaccacgttccgggcgcttaacgccagcaaaggcgaaacgtttgagcagggcgtgatcgatgtgttccgcaatctctcatgggactacaaaacgcataatccgtgcctgttgggaaagaaaattatcattgatggtgtcctggacaatcatcgcgggctgtatttttccgtgcgcacgtatgcacagaaccgcatcgatgaccttgcccgcccgttctggttactcgacggaaagaccatacccgacaaccgcgtctcagagggggcaaacctgagcgcgtttatcagccagggcggcgcagcgagtgtgggcgaggtgttcacgtgtgagtattttacggtacgcacatacaaaaaagggtccgcgcacgtcacctttacccggcctgacctcgtggagaaggtgaacgacattatcgcgcggcactatccgggggcgctgccgccggtggtctga

SEQ ID NO: 136889 - DNA, 231 bp, Enterobacter cloacae
atgatcctttctattgtttcaccgtctgacggcgctgtaaagccccgccgtcattcccgcatcccccgcgtcgatattcccgcgccggaaattgaccccacgctcagggcattcgggcgacatatcgcaaaaagcatacgcaaggggcgtggtgttcacatccccgcgatgaaaaacgccgattttggtcaggtgctccgcaccctcgaactgacacgcgcatttaactaa

SEQ ID NO: 136890 - DNA, 228 bp, Enterobacter cloacae
atgcagacacaggcgatgcgtgtttatcagatcacctttaccggacgcgacgcaaaaggcgttattccgatgtttacccgcgtgaaagccatgaccggaaagggcgcaattaaggcgtttattgagcgttacaaacctgttcagggctggtttctgggcgatcccgaagacattaccgacaacgtgcaaaaggaggcagaagaagcagagagcaaaacgcagagatga

SEQ ID NO: 136891 - DNA, 324 bp, Enterobacter cloacae
atgaaatggcgttactctctgcgctggaaattaccatcgccctgtcccggaccgcatgaactggcatccgaagtggtggaggcgggacagcctgcgcctgaatccattatgtcgcgctgggtggcgggcgccgggtatgcggtgtgcgtggattttcccgatgagcggcagattaagcgctggagtgatgagcgcaaagccgctgcgcgtcgaaggaatcttgagcgtcgggtcaacaggatggcgcccctgtttgctgaggaactgattgagagggagcttgaggggcgaccagactatttccggggaaaatctcagacctga

SEQ ID NO: 136892 - DNA, 729 bp, Enterobacter cloacae
gtgaacgcatcaacaacgtctctggtgaccctgaagccagcccggcaggcagcgctgcaggcggtcctgtcggtggaggaatcccgccgtctcggtgcgcgtctgcccgccatgccacacgtgcgcaccttcctgcgtctgctgaccgggaacagccgcatgaacacgaccgtggcacagcgcattcccggcctcaactgggacccgaagcatcgcctgagcagcctcaaacaggtggaggaggcgctcgacgcactgattgccagccacggggagtgctgcccgctgccgctgccggtggacgttcaggctgaactgttcccggaagtgctgcacacccgtacagagcgtcggttgcagcgcagaaacatcgcgttcacccgcaggatgcgccgggaagaacggacgctggcacatcactggcggctgcggcagaacctgctggggcaggccgtcacggagctgaactttcagtccccggaaacggtcagcagctggtaccgccggtgggccgaagagtttgacgcgcgcgagctggagccggctttctggcactggcggtcgcggtttgcgtcgctggcttccctggactggctgcgtgacgcgaaggaaccgctgtacggggtcattcatgaaatcggcttcattgtgcgtgacaccccggcggctgtccgtcaggcggagcgctggcaggtcccgaacaaactgacggaccggaggcggggatga

SEQ ID NO: 136893 - DNA, 432 bp, Enterobacter cloacae
atgcgcaatattattacccccgatgtcctgaaaaccatgatcccacaggaatacgaagactggcgcgaaggaggggaggatttgcgccgcgaactgacccatgccgtgatgcgtgacctgaactgcccggataactgggacatgaacggggagtaccgcagcgagttcgggggctttttcccggtacagatccgcttcacgccttcacacggtaactatcatctcgccgtgtgcagtcccggcgatatctctccggactggatggtggtgtttgtcccggccagcggtcgtccgttctcggttatcagcaccctgtcggactggtcgccggaagccatcagccacacgctgagtctggttgcccggctcgatgccgatggctacagtcaggccagcatcatcagcatgctggtcatggagggcgcacagtga

SEQ ID NO: 136894 - DNA, 2001 bp, Enterobacter cloacae
atgtcagtgaccgagtctaaaacaaaaacccccgcgaaaaccagcaaaaaagcggtgaaacctgccgaatccgccgccctcaaagccgcgcttgaggccgcacagattgagatggtgccgctgtcagcactggtcaaatccccgctgaacgtccgtactatcccgtatccgccggagagcgtgcgggaaatggctgactccattctcgcggtcggcctcattcagaatctggtggttcatactctgccggacggactgtcgggcgtcgcggcgggcggtcgtcgccttgctgccctgcagcttttacagcgcgagcagcgcatcggtgccggacatcttgtcatcgtgaagcgcatcagcgacgaactggcggtggtggcctcgatggtcgagaacaacaaccgggtggcaatgcacccggcagagcaaatcaccggattccgcacgttgtctgagcagggcaaaactccggcacaaatcggggaccagctgggctacagttcgcgccacgtccagcgcatgctgaagctcgccagccttgccccggagcttatcgccctgctggcagagaacacgctcgatgtggagcagtgtcaggcgctcagtctggaaagtgacccggcgcgtcagatacaggtgtatgagcaggtgaaggcttcatacagcaacgctccggcccatctgctgaaacgcgccatcacggacaccgaaatatcggttcgcgacgcccgctttatgtttgtcgggcgcgaagcgtatgaggccgcaggtggcaaagtgcgtgaggacctgttcagcgcgcaggagggcgacggaacggcagacggggtgctggtcgggcgtctggtgcaggagaagctggagtccgccgcgctggctgttgaaatgcaggagggctggtcatggtcactggcacgggaaggggcggtgcggaactacggtgacgaccgggaacattatctggtcctgccggagccggagggcgaactcagcgctgacgagcagcagcgtctcgatgaactgtacgccacgcaggaagccacggcgacgtatgaggatgaagccgccattcaggtgctgattgacgagactgaagaggcggcatcgatccgggcatggacaccggagcagaaagcggccagtggcgtggtggtcagcctgtgtgatggtgagcttcgtatccagcgcggtgtgcagaagaaggtgcaggcggcggtcgctgacgggcaggaaattacgggcgctcaggcctccctgcatgtggtcgccagcagtaccccggatgtggcagagggtatcagtgtgccgcttctgaaaaaaatgtcctccgagagaacgctggcggtacaggcggaactggtgcggcagccacagaaagccgtggccctgatggtctggcggctgtgcagctgcgtgttccactactgtatcaccacccggcacccgtttgtgatgaatctcggggttcaccacagcagcctcaccagcgaagccccgaccggagaaaacggtcaggcatggcagtctctgatgcaggagaaagcccgtctggaggcgctgctgccggagggctggaagaacgatttcaccaccttttttgccctcgacggacagaccctgatgtcgctgatggctttctgtaccgcctgttcggtggacggcgtccagacccgtgaacacgggcatacccgccgcagtgaccttgacggtgtcgaggcggcactcgggttccacctgcgcgactggtggcagccaacggcggataacttcctcgggttactcagcaaaaatcagattgtggcggcgctgaacgacgccggactgaccggggccgcctcggatgctgaaaaaatgaagaaaggcgatgccgccagtcacgccgaacagtggctctccgggacccgatgggtgccgggatggatgcagtccccggatgctgcaacgccggaagaagcagcctccacgcctgacactgacgaacccacctcacacgctgcctga

SEQ ID NO: 136895 - DNA, 558 bp, Enterobacter cloacae
atggcagcacgtggcgttaacaaagtcattctggtcggacatctgggacaggacccggacgtgcgttatatgcccaacggcggcgcagtggcaaacctgacgctggccacgtccgaaacatggcgtgataagcagagcggggaactgcgcgaaaacaccgaatggcaccgtgttgtcatgttcggcaagctcgcggaagtggctggcgaatacctgcgtaaaggcgcgcaggtctacatcgagggccagatgcgcacccgtagctggcaggacgataccggcgccacgcgctatgtcaccgaggtgctggtcgggcagaacggcaccatgcagatgctcggcggtcgtcgtggaactggtgagcctgagagcgccgtgccgcagcagcccgcgcagccgcaggatcctgctgccccggctcaacctgctcaggccccggctaaatccccgaaagcgaagggcggtaaaaaaggccgtcagagcgccaccccgtctcagcttcctccccagactttcccggacgattacccgctgaccgatgaggatgtgcccttttaa

SEQ ID NO: 136896 - DNA, 321 bp, Enterobacter cloacae
gtgcgtatgtctgctttatttgctctgacgtctgtgttcagcgcgttgaatcttgtatttatgccattccatcccgtcatgatgttatgggctttcggcctctctgtcgccttcattattgtcaatataattgccgacagactgcgtctgtggtccggtattgcatggggaatggctgccgccgtaatagtcgcttttatgcttaacggcgcacagcccgatgaagaaaaccgggtactcatcagtacattcgcctgtctcgcctcagcatggtatgccggggttcagttcagaaaagagaagagagagtctctgtcctga

SEQ ID NO: 136897 - DNA, 765 bp, Enterobacter cloacae
atgagaaacgacacactcaacgcgctgatactccgccacggcgaccggatgctaaaggatgcgggctggccgccttgcgtggatatgatgcaaatcgcgcctggaaccatgcccggctggtcagtcgccaccggctcgctcgatgccgcgcacattctggcgctggtcacgcacctttgccagccgctgacctatggccgggccgggttgctgacagccagcgcccggcggctggcgggaaccccggcgcggctgtatctgtacccggcaaagggctttatgccgccggaaaaactggcggacgtccagacacttcatctgccttatgcacaggaatggctgacggcggcagaatgtgacgatctgctggctttcctgaaagcctccctcacgcagatagcggaaatcgtcaggctggatgcgcaccgccttgccgctgcgctgaaaccgtccgtcacgccgcgactgatggacaggcggtttggtgactggcgcgtactggctgacgagtacgagcatgaaaactggctcgatgaaaacgacactgacgtactggatgccgtccttgacgctgttctggtgcgcggggcgtcgttctgccccatcctgttgaccgtggttaatgaacgacgggaggaaatcgaagccgctggcgttatcaccgatatgctgcgttttccgggcgatccggttcgccgctggcttgatcgccgcgtattgcgggacgtggtgagagaggcccgctgcgttaacgctcaggtgtga

SEQ ID NO: 136898 - DNA, 411 bp, Enterobacter cloacae
atgctgtatggcacccgtaaagaactgaacaaaaaacttaaacgcatgtttgggaacgaagaacgctacgccctgctggtctggacgaaagaagacgtgatggccctggccgggaacatgacggaggccgaggctcacaccctgcttgagcttatcggccgcacgggaacgggggagcacaccgaagaaggcgtgtcattccgcaccgtgcaggcgatgtacgccgggattcgcccgggcattccccgcgtgagcgtccccgtcgatacgctgtatcgcatcacggacattgccgcacaggcgattaacggagaagacgagcattcgccgtcgctgacggtcgatcactacccgagtgtcgctgacgctcaggcagaaatcgcctggctgaaacgtgaactggccgcctga

SEQ ID NO: 136899 - DNA, 222 bp, Enterobacter cloacae
atgaactacaacggacacgaagccctgcgccgcgatatggccgggctggccaacaacatctgcgacctgaaaaccaccctgaaagtgctggaagacaaataccactaccagcacgacggactgccggaacggctggctggcgtgagcctgcgacgcctcaacgtcctgatggacgaggcattcaatatcgccctgttactcgatgaatctttcagagactga

SEQ ID NO: 136900 - DNA, 231 bp, Enterobacter cloacae
atgtcacccggcttcagaaacgttcttcgctttgccggcgtccccgtcgacagcagcgagccggtacgcaggcagtacggcagccgcatgattggtatcgtcacggtatgcctgctcccgctcctggtgttcgacgttccgctgtgggttttcgtgctctcccaggtcatctggggcgcgggcgtttatatcggcctctctgtggccggagataaatcccggaatcgctga

SEQ ID NO: 136901 - DNA, 2613 bp, Enterobacter cloacae
atgttaagtattaattaccaaacggaaaacattattgtcgatcatctgccaattatggtgtgctggtctaccaattatcctcaaaagtcattttcgataaaagtgtataaaggtgccgaactggtatctcttatcgcaagagagggtaataatacaattgtcactctcgatgcaatatcgttacaaagctttacttcttataccatagaagtccttacccacggtgacaatggtgagaacaacgtttttaaaaacagttttacgaccagtaaccttggccatttttctggccgctgggtgagcggtgggcatcacttcactaatgatattcattactatcgcggtaaacgtaatgtggtgatgagaaaaacaatttatctcgacgaagacctcctcgatgcctatatcagtattgttggtcttggtttttataaattgtatatcaacggtaaagaggtcacacgcggtgagctcaatactgactggacaaattatgctaaaattatttattatgatacttacaatataaagccgtttattaatcagccgaaaaatgaagtcattgttgagctagccgatggctggtttaatccagcaccgcttaaattatttggtaaatataacctgagagagaccttaaccatcggtgaaccacaggtcatcgctgacatttatatgaggtttgcagatcgcgaaatgatcatcggtagtgatgccgactggcaatattgcgaaggcgcttataccttcaataatatctatttgggcgagcgcctggatatgaaactgtttcgcggagacaacaccaccgatttgctgatgcctgactggaaaaatgtggtgctgagcaacgggcctgaaggccgtctggtctcgagttttattccgaaaattaaccatacgttgtccctcggggcagagcatatccacgtcgtagacgaagagacattcattattgatttcggtgccatcgtcaccggatttatcgatttatccattaccgcgtctgagaatcaacgtgtggaactgctctatagcgaagacgttgatgaaaactacgaactaaacactgactccacccttgcgggatttgtcggcaaacaggttactgaaggtgtgattattgacggcggaattggagcaccggcgagggcggaacagaaggatgcctttgaatgccgcagtgggaagaatcattttatcaatgcctttacctgtcattcgtttcgctatgtgcagttaagcggtattaatattgaacaattaaacaacgttcaggcgctttcagtacatactgtactaagggaaaacgggggcttttactgctcagatccttacataaataagctctttgaggttgctaaaagaaccaaactgaataacattcattcggtcttcggggattgtgcccgcgaacgtttcgcctatggcggagacattgtcgcgttggcccggtcgcaagtgtatcagtttgactctgccgctatttataagaaaactatctttgattttatcaatgatattcgtccctgtggtggtgtgacggaaactgcgccatttatgggaattaagactaatggagtcggcggggaaacgggccccctgggctggcaactggtattaccttatttgatagccattcactatcgacattatggcaatgtcaatctgctggccgaaagcttgccatttcttgagaagcagatcctctccctggaaatgcgcgactttgatgacctggtgacctgctgcctgggtgactggggaagccgcgttcatgatatgcgtaattacaaaaatggctcgccagctctccatttcaccagtgcttgtttctattattatcatttgttaattatcgcaaaaatatgtgatgatcttggctttaaagaaaaatggctaaaatatattggcaaggccaataaaattagagagaaaattttatcactctataagaatacggatggcagctttgccgatcgcagtcagaccagctttgtttttgcaatctacttcgatttgtgtgatgatatcgagagttcattgaatgcattgatcgatctcatcaaaaaagagcaaaatgttatcacttgtgggatttttggccaaagttttgcctatgaaatatttcatcgctatggtcataatgaattaatccttgaatggttaagagtcgaagccggattcaagaaaatgcttaaaaatgatgccagcacattgaaggaatttttcggtgataacctgaatggttcgaataatcacgcgatgttcagttcttattccagttggctgtttcaggctttgggcggcattaccgtcgctgaggaggcggttggtgctgatgttattttaatcagtccatcctttactgacacgattaactttgtggattgctggcatcaaaccatcagagggcgtattgagtgtcgctggcggcgctataaaaaaggcattgaattagtcatcaaagtgccatttaacctcaaaaaatgcacccttaaattaccaaaagtgtatcaacttaataaacaattacctgcgccgatagactgtgatacctatcatcacttttatgacattaccgatgcaggtgagataaaagtactattgtaa

SEQ ID NO: 136902 - DNA, 1281 bp, Enterobacter cloacae
atgtcatctcataccaacattgtacaagaaaaggctttgcaactgatgcaaagtattggtcaaaatacctaccttaagtcaatcatgagcggtatgatgctcatattgccagtaacgatcatgagttctgtggcgactttggttaaagtgtttccgtttgctccatatcaggattttttgttacgacacaacttaactcgcttctttgatatcccgattaccttcacgaataattttttagccgtgattgtcgctttctccgttgcctatacgctagcgaaaaatttcgatgttgatggcttcatgtcaggcctgatttcaatgatctctttctttattttaacgccgtatgatctcggtgaaatagggccgttagggcaatcattttcaatccctggccaatggctggggcccatggggctgtttaccgccattctggtggcgataatttcaacacgaatattcgtggcgataactcgcaaggggttgattatcaaaatgccagaaaatgtccctgaatttatctccaaatcgttctcttcattgattccaggaatcgccatcctgacgctgtttacaattatctccgcagtcattaccagcgttggttatgggagcattcacgaaattatttataaattaatccaggttccgctaacatcacttggatccggaatctggtcactcatctttgttgctgttgttgcgcaattgctatggttttttgggctgcatggccacgctatcaccctcggtatcgtagcgccgatctggtttgccatggatgcccagcagcttgctgcgtatgctgcaggcgtcgacttacccaacatcaccggctttgcgttctttatgacttatggcgctgctggagatttattgccgctggctataatgctcgcttttttcgcgaagagcgcacgctataaaacgctcggtaagatcgccttgccgccagctatcttcaccattggcgaaccgatggcttatggcgtgccgctggtaatgaattttactctggcgattccttatatttttatcaatggcatcatgctcggcattgcatggtatctaacggtcattggcgtattgcctcgcgtcgctggggtgagtaccccggccggcatgccgatcattatttctggttttatgcaggggagctggaaaattgccgctttccaatttataggactttttgcgcgatttgcaggatggtatttcttcttcaagactgccgatcttgtcgcttgccgggaagaaaatcagacggataccatttga

SEQ ID NO: 136903 - DNA, 882 bp, Enterobacter cloacae
atggatattaagcaactcaagtatttgatcgcgctcgatcagacgcgccattttggccaggcggcggcggcctgtcatattacccagccgacgctctccatgcgcattcgtaacctggaagaggagctggacctgacgctgatccagcgcggccaacgctttgaggggtttaccccggagggagagcggatcctggcctgggcgcgggcggtgctggccgctcatgacggcctggcggcagaggcggccatctgtcgcgggcagatggtcggccagctgcgggtcggtatggtgccgctggcgagcctcaatccgatgcagttgattaaacccctggcggagaaatatccggcgctgcagttcagcctgttgtcgatgacctcggagcagattatcgatggcgtcagccgtaatcagctggatctggggatctgttatctgctgcatctggatgaaggtcagttcaagattgctcgcttgccgcaaacccggatgggactgctgcacgataaacgccatttcgacttcagcgccgggacgccgggatgggagacgctggcgacgctgcccctcggctttctgaccaaggggatgtattaccgtgaatcgattgaaatcagctttaaggccaaagggctaacgccaaggtatgtctttgaaagtgattcgacgtttcagattatccaggcggtgcaggcggggatctgctgcgccattatgccgcttaacaacggcctcgaagcgctaagcgataatcttgaaattctgccgatcgccgaaacccatgttgattcacagctggcgctgattatgcgccagcaggaaccagtctcgaccctggcggaaaaatgcttcgccgaggcgcaggggatatttggctga

SEQ ID NO: 136904 - DNA, 2301 bp, Enterobacter cloacae
atgaccaataaaagacgcgcggttcccggtgttcacccctatgacggtccggcaggcgggtggggcgcgttgaaggccacggccatcgccgtgcgcacccagatggatgcctttgaggcgcccgccacgctgctgcgtaccaaccagccggacggttttgactgcccgggctgcgcctggccggataaagaacataaatcgaccttccagttttgcgaaaacggcgccaaagccgtgacctgggaggcgaccaccaaacgggtgacgcccgcattcctcgcggcaaataccgtatcttccctgctggcaaaaagcgattttgaactggagggctacggccgcttaacccatcctttggtttacgaccgggacagcgataccctgcgcccggtggcgtgggagcaagccttcgcccgtatcggcgagatcctccgcggcctgcagccggatgaggttgaattctacacctctggccgagcctccaacgaagcggcgtggctgttccagctgtttgcccgcgagtatggcactaacaacttccccgattgctccaacatgtgtcatgaatccaccagcgtgggcctgccacagtcgatcggcattggtaaaggcaccgtctccctcgacgattttgaccagaccgagctggtgatctccatcggccataatccgggcaccaaccacccgcggatgatgggcaccctgcatgagctatcccgccgcggcgtgccgattatcgttttcaatccgctgcgtgaacgggcgctggagcgttttgccgatccgcagaacgtaatggagatggcgacccggcgctcgacgccgatcgcctcgacctactaccaggtacgagccggcggcgacgcggcggcgttgaaagggatcgccaaagcgctgctgcagctggaggaggagcagggcaatgtgctcgaccacgcgtttattgcccaacatacccagggattcaccgccttcgccgatgacctccacgccacccgctggcaggacatcgaacaggagtctggcctgacgcgcgaatccctgacccaggttgcggcggcttacgccaaatccagggccaccatcgtcacctacggtatgggcatcacccagcataacaaaggcacctccaacgtgcgtctgattgccgacctgctgctgatgcgcggcaatatcggcaagccgggggccgggatctgtcctttgcgcggtcactcgaacgtccagggtaaccgcactgtcgggattagcgaaaaaccctccgcggctttcctcgacagcctgcagcgggtgatggggattacgccgccgcggcatcatggccacgatgcggtaaaagccctggaggccatgatcgccggcgaagccaaagcgctgatctgccttgggggcaacttcgccgtggcgatgccggaccacgaacgcgccttcccggcgatgcgcggccttgagctcagcgttcacgtcggcaccaagctcaaccgctcacatctcctgacggcgaaagagacctttattctgccgtgtctgggccgcaccgagcttgacctgcaggccagcggccagcagtcgatcaccgtcgaggattcgatgtcgatggtgcatgcttcgtcgggcaagcttaagcccgcctcgccgatgctgcgctcggagccggcgattgtcgccggtctggcgaaggccaccttgccggccagcaaagtggactggcagtacctcgtggaagactacgatcgcattcgcgatctgatcgaacagaccattccagggttcgagaattataaccagcgcattcgccatcctggaggcttccgcatgccgctgccgccgaccgagcgcatctggcctaccgccaccggtaaagccatgttctcggtatttaaaggggtgcatgagaacgtggtggtggagggtgaggacgtgatgcgcctggtgacgctgcgcagtcatgaccagtacaacaccaccatctacgcgatggatgaccgctaccgtggcgtctttggccgccgcgacgtgctgtttatgaacgagcaggatatggccgcccagggtctggagcatggcgatcgggtggatatccataccgcgctgccgggaagcgcgctgacgctggaagatatcacggtggtggcctacggcattgcgccgggaaccgtcggcgcctattatccggaagccaacgtgctggtgccgctgaactatctcgatgaagagagcggcaccccttcgtataagtcggttcccgttcgcctgacgctgcgctcgaaagagatccgtccactggccggcgggcgctaa

SEQ ID NO: 136905 - DNA, 513 bp, Enterobacter cloacae
atgcccatcgccgcatcgttaccggaggagagggtgacggagatcctcgccagctcaatgcccaccaaccggatcctgctgctggccggcaacgaaattggccagctgcgggaggcgggcaagctcagcgacatcacttacgggctgatggacaacaaactcgacgagctggcgcacgtgctgggcggttgtgaaaggctggccaccaccccggtgcctttcgcctataccctaatcctgcagcgtaccgtctacctgttctgtacgctgctgccgttcgccctggtcggcgatctgcactacatgacgccgtttgtctcggtctttatctcttacacctttttatcgtgggattcgctggcggaagagctggaagatccgttcggcaccgcagccaatgacctgccgttgaacgcgatgtgcaataccatcgagcgcaatctgctcgacatgaccggtcagcatccgctgccggagacgctgcgtccggaccgttacttcaatctgacctga

SEQ ID NO: 136906 - DNA, 942 bp, Enterobacter cloacae
atgacacaacataattttgaaaatgataataattatcatgagcgttcggtgcaggcgcgaaagagtacccttgttagcgtggtggttaatattttcctttctgccttacaggtagtcgtgggaatattttccggctctcagggattaattgccgacggaatgcactctttttccgatctggtcgccgatggcgtggtattgatggcgaataaaaagagccgtcgaccgtctgaccacgatcaccagtatggccactggcgctatgagaacggcgcctccctaatcatcggcgcgatgctgctgctcgtcgggggtggcatgctatggtccgcggcgggccatctcgcgcaaccgcaaactattccgccggtgcacagcgcggcgctgtggatggcgctggtggcgctggccgccaaggaggggctgtttcgctatatgctgtcggccgccaggcggctgaattcgtcactgcttatcgccaatgcctggcatgcccgctccgacgccgcatcctccctggtggtggccctggggattatcggtaatctggccgggttcgcctggttcgacccgctcgccgcgctggcggtggggctgctgattgcgcgcatgggctatcgtttcgccgccagcgcgctgcatgatttaatggaccgtgcggttgatgaagagatgcagcaggcgattgccgatacgctgcgaaccacgccgggcgtggcgggcctccacgatctgaaaacccgtaaggcgggggatctggtgctggtggatgtccatctcgaggtggctggcgagatgtcggtagccgaaggacatcagattgcccgtcacgcgcgggagcgagtgctggcgcagcatccggtgcttaatgtgatggtgcatctcgatccctgcgatgagcatggggttgacgaaagcggtctgatacacccggtagcctaa

SEQ ID NO: 136907 - DNA, 687 bp, Enterobacter cloacae
atgtcacataacaaaccatcccggctgcgtttcgccattaatctgggcaatgcggtcctggcccatctcggggagacaggaaagcccgcgggcatcaccgtcgagctcagccatcggctggcgacgcgctggggcgtcagcgccgaattcgttccctatcctgccgcgggtaaagtggtggctgacgccggtggcgagcactgggatattgcctttctggccatcgatccggcgcgggaagccaccctgcgctttacctcgccctatatcaccatccagggcaccgcgctggtcagcgttgattcgccctgccagagcgtggccgacatggatcgcccggcaaccaccattaacgtcggacaaaacgccgcatacgatctatggctaacccgccatctgcagcacgccagcctgcatcgccttccctcttcgcaggaggcaatcgacgccttcctcgccggtgaaggggatatggtcgccggcatccgccagccgctggaggcgacagcccgtcagcacgccggggtgcgggtactggcggataattttaccgagatccagcaggccatctgcgtcgcccgggcggacgtggaccgttttcacgcggtaaacgacgcgcttagcgagtggcgggcggatggcagtctgcaggcgctgattgccggtcacctgggccaagcgaactga

SEQ ID NO: 136908 - DNA, 870 bp, Enterobacter cloacae
atgatcggcattcgccggatgatcgaggcgcaggtgctcggcctgaccggcatggcgctaaaagagatcgactttgaacgacccaaaggagagccggggctgtttggtccccagtcggccatctggcaggtgcacggcgattttacctcgatgctctgcggcggcattagcgcgctgttgctgcagatgctgcatcctctggcgctggccggcgtctgggatcactctcgttttcgcgaggatattttgggccgcctgcgccgcaccagccagtttatttctgccaccacttttgccactacccccgacgccgaacggctaatcgccaaagtacaggggatccatcagcggatcgccggggtggataaggacggaaccccgtatcaggcgagcgacccggcgctgttaacctgggtgcacgtcgccgagtgcagttgctttatggcctcccacctgcgctacaagcggacggtggtcagtcccgagcgccaggaggactattttcgtgagtcggcggaaatcgcccggcggctgggggctcgggatatccctcagacaccgcaggaggtggcggactatctcgaggcgatgcgcccgcgactgcgctgcgacgaacgtacccgggaggtagccgaggtgctgctctccacccgtctgccggggcggatgagccagccggtcggccgggtgatgatgaacgcaggaattgaccttttgccggaatgggcgcaggagatgctgggattgtcgctcacgccgctgcagcggcgcacgacgcgcctgatggtgcatggcgtggcccgcgtactgcgcgcctcggtacgcaacggcgcctggcattgcgccatgcgccggatgacggaggcgtga

SEQ ID NO: 136909 - DNA, 432 bp, Enterobacter cloacae
atggcgattcataagaaagggctagcgcactgggaaggcgacctgaagcatggcaaaggcaccgtgtcgacagaaagcggggcgctgagccagcagccctacggatttaacacccgttttgagggggtgaagggcaccaaccctgaggagctgatcggcgctgcacatgccgcctgcttttcgatggccctgtcgctgatgctcagcgaagagggatataccgcaacgtccattgacactaccgcagtggtcaccctcaataaaaccgacggcggctttgcgattaccgatatcgcgctgcaaagccagatcgtcctgccggacgtgtctccggcggcgttcgatgagatcatccagaaagcgaaagcaggctgcccggtatcgcaggtgctaaaggccaacattaccctcgattaccagctgaatccgtaa

SEQ ID NO: 136910 - DNA, 147 bp, Enterobacter cloacae
atgagcaccttttctcactcgcaagacgaagagcgcggtaagcaacctgcccgtgaggcgcccggagagcagggcgaagttccgcgtaaacgggacgacagcaaggatgacaaatccgatccctggcatccgcaggatggccgatag

SEQ ID NO: 136911 - DNA, 405 bp, Enterobacter cloacae
atgaaaaaactagcattggccatggcatgtctgtttgccgtaggtgtcgcgcaggcggacgataagggagggtttagtcaggatgccgcgccgccgccgccgcacaaactcgatgacggctatcgcggcgtcgaggatggccggatcatgaccgttgagcaggcgaaaaccatgcacgatggcgcgaccgtttcgctgcgcggcaatctgctcaagcggcagggagatgaccgttatcagtttcgtgataaaagcggcaccatcaccgttattatcccggtcgccgcgtttaacgaacaacacgtagagccagacgatctggtcaatatcaacggcagtctggatcgcaaaatgacgccgccggtcgtgcgaatcgatcgtctgctcaagcagtcgcctaagtaa

SEQ ID NO: 136912 - DNA, 747 bp, Enterobacter cloacae
atgccggggcgctgcagcgcgccgccgccgaggtggaaaccaccctcggggcaatttcgccgggtgacggaggtgacctatctcgggtacgtgaacggcacccgcgcggcgctggaggtcatgatcccccgggatcggggggtgattattcaggccggctcggcgctggcctggcgttcaatcccactgcagtcggcttactgcggagcgaaagcggcgatccgcggctttaccgatgccgtgcgaaccgaactgatgcatgagaaaagccacatccagttgaccatggtgcaactgccggggatgaacaccgcccagtttggctgggcgcgaaacaaaatggatcaggccatgcagccggtgcccccggtctatcagccggaagtcgccgccgaggctatttacagcgtcatccagcgcccggtcaacgagctgtgggtcggaaaaagcaccatccagtcgatcctcggccaggtcttcttccctcgcctgctcgatcggctgatggtgaaaaaagcgtgggagggacagtttaccggtcagccaaagtcgtcagaccaacaggacgacctgttcacgccggtgcgcggcaatcatccgggccacggcccctttaacgatggcgcacggcgtaaagcagtcaccatcagcgccgatctcccgggtaaagtcgccgccggcgtcggggtagcggtggcgacgatggcgctgcgggcgttgttccgtcgttccggaaaacggcgctaa

SEQ ID NO: 136913 - DNA, 1626 bp, Enterobacter cloacae
atgcaacgggaagagtggtttcacagagcggtcatctatcaggttgacagttcgctcttttatgatgccaatggcgatggttttggcgatctcgcgggcattcgccaaaagctacactacattcgcagcctcggagcgacggtgctctggctgactccgttctatctcactcctctgcaggatgatggctatgatatcagcgatcatctgcagcccgatccgcggttcggcactatcgctgacgtgattgagctgattgcccgcgcccgcgagctgggactgcgggtgatcgttgagctggtgatccagcacacctccgcgcagcacctcctcaacgccgggaaacatgggaggatcgtcgttttccggcggccgtattatctgtgggccgatcggccgccggaaaacgacgatcctcccatgtttcccggcgttgaggagagcgtctggcgctgggacgaacaggctgggcaatattatcgccacatgttttatcaccacgagcccgacctgaatctcgcccatccgccggtgatcgctgaaatcgaaaacattatcaccttctggctgcaggctggggtgtctggctttcgtctcgatgccgcgtcacatctggtcaagcaggccggaaagggcgacgagacgcgcggctacccgctgctgacccatctccggcaggttgtacagcgcctcaatcccgatgcgatactcctgggtgaagtggacgtcgcggtagaagattaccgtcattatttcggccagggcgatcggctgcagatggtgcttaatttctggcttaacaaatacctctacctcagcctggcgcagcagcgcgccgcgccggtggtgaaggccctgcaggcgatggtgaccccgccggacgggtgctgcttcgtcaactggctgcgcaaccatgatgaactggatcttgaggggattggcgagcgcaacaagcgccaggttatccgcacctttgcccctgataaatcgatgtccgtttaccagcgcggcgtacgccgaagactggcgccgatgctggacggcgatacccgacgcatagccttagcccatgctatcctgctggcgctgcccggcgtgccagtgatgcgctatggcgacgagattggcatgggtgatgatctctccttaccggagcgctacgcggtcagaacgccgatgcagtggtcggccgcggccaacgccggcttttcccgggcggcgcgggatgatttgccggtaaaaccggtggccagcgggcggttccgctaccaacggatcaatgttgaaacggcgctgcgccatcccaggtcgctgctgcatcgggtacgcaatatggtattggcgcgcacggaatatactgaaccgggatccctcccttttactctccttaccctaaagcccgactcggtgctgggcttgctctatcgcagcgaatcgcgggaggtactgatgctggccaactgcagccagcaggcggtagaggtcctgctcccgccgctggccgagggctactggagcccaattctggaagataagctctatcaggatgggctgcacggcgggaaagatgcgcggctggcactctccgagtatggttaccgttggttcagccgcagcctgagttag

SEQ ID NO: 136914 - DNA, 183 bp, Enterobacter cloacae
atggtcaaacggcaaaccatcgcgctcctcgccgccgaggaagaggttccgctggtattaaccgccaggcagcaggcgctggtggacgcggtagcgaacaggatgctaccagcggaacgcaatcccgtatcgcctgtcgacaaaccgcgcgcgaaggccagggcggggtccggatcgcgctga

SEQ ID NO: 136915 - DNA, 507 bp, Enterobacter cloacae
atgacggatattgaaaattatcacaactggcttcgcgatgcgcatgccatggaaaaacaggctgagtcgctgctggtggccaccatcagacgcctcgataatgaaccgcagttacgcacccgccttgaacaacatctctatgaaacccgacggcaattgtccgccctgcaggatatcatcgcccgcaaccatatttcccgctctgcgctgaaggatgcgatgagccgggtggcggcgttaggacagaccattggcatcatgctgcccggtgatgaggttattaaagtgattatcactgcctacgtttttgcccattttgaggtcgcctgctataccgctttattaacggcggcgaaaagagtaggcgaccacagcgcgatgcatacactggagggtatcctggctgaagagagaggaatggctgattggctgctccattatctgccagcgctgaccgggcaatatcttatggataccgatatgcctggcgttgaggccgggcattaa

SEQ ID NO: 136916 - DNA, 216 bp, Enterobacter cloacae
atgaagttgacgccagtgtttattaagcgctgtcatcttgtcgccgccgttatgtgggtgggtctggcgataccctcgttgatctggtggaaagacagcgtactgtgggtcattctcatcagtatttatgccaatattgttggccatttatccggatatagcgcagcgcgagctgaccaggcggcggaagagagtgaagattccacgtcaaaataa

SEQ ID NO: 136917 - DNA, 186 bp, Enterobacter cloacae
atggcagagcatagaggcggttcaggtaattttgcagaagatcgtgagaaagcatccgaagccgggcgtaaaggcggacagcacagcggcgggaactttaaaaatgatcctgagcgtgcatccgaagccggtaagaagggtggtaagaacagtcatggcggcggccgtaaatccggtgacagctag

SEQ ID NO: 136918 - DNA, 246 bp, Enterobacter cloacae
atgagtaatgacatccccctgaaattttatgacatcgtggacgaatacgagaccgaagcggctgcgccggtaaaggatgaagaacgcgatgcgctggcgcgctatttccaactgctgattgcgcggttaactaataacgaagagattgacgaagaggcgcagcgagaaatggcccgcgaggcggccattaacgaagaccgcattgacgatatcgctaatttccttaatcagtggggcaacgaataa

SEQ ID NO: 136919 - DNA, 627 bp, Enterobacter cloacae
  misc_feature (563)..(572): n is a, c, g, or t
gtggtggtggagaacgtcgagcgcattatgcgcgacgaagggctccccgctcgcgaagccaccgaaaaatcgatgggcgaaatctccggcgcgctggtggcgattgccctggtgctgtcggcggtgttcctgccgatggccttcttcggcggttcgactggggtcatctatcgccagttctcggtaaccattatctcggcgatgatgctgtcggtagtggtagcgctgaccctcaccccggcgctgtgcggcgcgctgctcagccactccaaaccgcacaccaaagggttcttcggcgcctttaaccgcctgtggggacgtacggaggcgggctaccagcgccgggtgctcggcggcctgcgccggggcgcagtgatgatgggcgcttacgcgctgatttgcggggcgatggcgctggcgatgtggaagctgccgggcagcttcctgccggtggaggaccagggggagatcatggtccagtacaccctgcccgccggggcgacggcggtgcgtaccgccgaggtgcgccgccaggtcaccgactggttcctcaccaaagagannnnnnnnnnccaaagagaaagccaataccgatgtcattttcaccgtcgacggcttcagctttag

SEQ ID NO: 136920 - DNA, 1245 bp, Enterobacter cloacae
atggccttcgtgtcgctgaaaaactggtcgcagcgcaaaggggacgataataccgcccaggccattgccctgcgcgccaccaaagagctggggacgatccgcgacgccaccctcttcgccatgaccccgccgtcggtagacggtctcgggcagagcaacggcttcaccttcgaactgatggccagcggcggtaccgaccgtgacagcctgatgaagctgcgcagccagctgctggcggcggccaaccagagcagcgaactgcagtcggtgcgcgctaacgatctgccgcagatgccgcagctgcaggtggatatcgacaacaacaaagccgtctcgctggggctgtcgctgagcgacgtgaccgatacgctctccagcgcctggggcggtacctacgtgaatgactttatcgatcgcggccgggtgaaaaaggtctatatccagggcgaaagcgacgcgcgcgcggtgccgtcggacctcggcaaatggttcgttcgcggcagcgataacagcatgacgccgttctccgccttcgccaccacccactggcaatacggcccggaaagcctggtgcgctacaacggctccgccgcctttgagatccagggcgaaaacgccgccggcttcagctccggcgcggcgatggacaagatggaaaagctggccgacagcctgccggcgggctccacctgggcgtggagcggcatttcgctgcaggaaaagctggccagcggccaggcgatgagcctctacgccatctcgattctggtggtgttcctgtgcctggcggcgctgtatgagagctggtcggtgccgttctcggtgatcatggtcatcccgctcggcctgcttggcgcggcgctggcggcgacgctgcgcggcttaagcaacgacgtctacttccaggtggcgctgctgaccaccatcggcctgtcgtcgaaaaacgccatcctgatcgtggagttcgctgaatccgccgtggatgaggggtattcgctctcccgggcggcgatccgcgccgcgcagacccgtctgcgcccgattgtcatgacctcgctggcgtttatcgccggggtgctgccgctggccatcgccaccggcgccggagccaacagccgcgtggcgatcggcaccggcatcatcggcggcaccctgacggccaccctgctggcggtgttcttcgtaccgctgttcttcgtgctggtgaaacgtctcttcacccgccaacgtccttctcaggagtaa

SEQ ID NO: 136921 - DNA, 1332 bp, Enterobacter cloacae
atgtttcgtttgagttttatgtttatcgcgctcctgaccgcgggctgcgtctcgcttgacccgcattatgatcgcccggccgcgccggtgccggccaccctgcccggggcgcacggcgaatcgacggcggtggtcggcgactggcagaaagtggtcaatgacgcgcggctgaaaaaagtggtcagtctcgcgctgaacagcaaccgcgatgtgcaaaaggcgctggctgatatcgaggccgcgcgcgcccagtacggcgagacgcgggcgtcgctgtttcccactgtcgatgccgagctgagccatacccgcagcaaaacggtggccagcggcctgagctccgcttcacaggccgacggcacggtctccagcttcgagctggacttgttcgaaacctggcttgccagcgaattcaccgcgcagaatacccggctgacgatgattgccgatttgaccaccgcctgggtgacgctggcgacggataacagcaatctggcgctggcgcagcagaccatggacagcgcggcaaactcgcgcaatatcgtcgcccgccagatggcggtgggtaccgcttccgccggcgatgtaagctcggcggaaagcgtctatcagcaggcccgcgccagcgtcgccagctatcgcacgctggtggcgcaggataaaaacgccattaacctgctggcgggggaaaccgtgccggagagcctgctgcccggcaccctcgagagcctcggggataacagcatcgcgctggtgccggcgggcgtgtcgtcgtcggtgctgctgcgccggccggacattcaggaagcggagcacaatctgaagagcgccaatgccgatatcggcgcggcgcgggcgaacttcttcccgtcgatttccctgaccgccagcgccggggtcggcagcgactcgctgtcgtcgctgttcagtcacgggatgcaggtgtggtcgttcgccccctccatcagcctgccgctgttcaccggcggcagcaacctggcgcagctgcgctatgcggaagcggagaaaaaggggctgatcgccacctacgagaaatcgattcagagcgcctttaaggacgttgccgatgcgctggcgcgccgggaaacgctgagcgaagagctcgatgcccagcggcagtacgtcgccgccgagcagacatcgctggatatcgcgatgaagagctatcaggccggggtcggcgattatctgtcggtgctcaccgctcagcgcacgctgtggtcggcgaaaacgacgctgctgtccctgcagcagaccgacctcaataaccggatcaccctctggcagtcgctgggcggcggcgccagttaa

SEQ ID NO: 136922 - DNA, 1164 bp, Enterobacter cloacae
atggcacgtgtttccctctcctgggcgctgatcctcggcctgctgtcgggtatcggcccgctgtgcacggatttttatctaccggcgctgccggagatcactcagcagctgcaggccaccagcacccagacccagctgtcgttgaccgccgcgctgattggtctcggcctgggtcagctgtttttcggcccgctgagcgaccgcattggccgcctgaaaccgctggcgctgtcgctgctgctgtttatcttctcttcggcgatgtgcgccctgacccgcgatatcaacatgctgattttctggcgctttttacaaggctttgccggcgccggcggctcggtgctgtcgcgatccatcgcccgcgataaataccagggcaccctgctgacccagtttttcgccctgctgatgaccgtgaacggcattgcgccggtgctgtccccggtgctgggcggctacgttatcaccgccttcgactggcgaattctcttctggacgatggccgccatcggcggcgtgctgctggtgatgagcctggcgatcctgcgggaaacgcgcccggccacagcggcgcatgccagccgccaacggcccggccagccggtgctgaaaaatcgccgctttctgcgcttctgcctgatccaggcctttatgatggccgggctgttctcctacatcggttcttcttccttcgtgatgcagagcgaatacggcatgagcgccatgcagttcagtctgctgttcggtctgaacggtatcgggctgatcatcgccgcgatgatcttttcccgtctggcgcgccgctttagcgccgaaaggctgctgcgcggcggcctgacgctggccgtgagctgtgcggcgatcatgctgctgtttgcctggctgcatctgccggtgctggcgctggtcggcctgttctttaccgtgtcgctgatgagcggcatcagcaccatcgccggcgcggaggcgatgagcgccgtcgacgccgcgcagtccgggaccgcgtccgcgctgatgggcaccctgatgtttgtcttcggcggcatcgccgcgccgctggcgggtctcggcggcgaaacgatgctgaaaatgagcctcgcgatggccatctgctacctgctggcgctgctgctgggcctcagcaaaccgcgcgacgcacgctaa

SEQ ID NO: 136923 - DNA, 903 bp, Enterobacter cloacae
atgagtatcgacctgagcaaactgctgaccgagcgacgtaacgccaacagcgccaacattgacaccctctccaccctcgagatgctgacggtgataaaccaagaagaccagcaggtagcccaggcgataacgccctatctgccgcagattgccgaggtggtggataaggtcgcggcggcgctgcaggccggtggccgcttgatttacattggcgcgggtacctcagggcgtctggggatcctcgatgccagtgaatgcccgccaaccttcggcacccgcccggagcaggtggtgggtatcatcgccggcggacataaagcgattctcagcgccgtggaaaacgtggaagacaacaaagcgcagggggcgatggatctgcagaacctgaacttcagcaaccgcgatgtgctggtgggactggcggccagcggacgcacgccgtacgtcattggcgccatggaatacgcccatggtcagaatgcctttgtcgccatcgtcagctgtaacccgcatggcgaaatggcccagctggcggacgtggcgatcaccccggtggtcggcccggaagtggtcactggctctacccgcctgaaagccggcaccgcgcagaagctggtgctgaacatgatctccaccggggcgatgatccgcgtcggcaaggtgtacagcaacctgatggtcgacgtcgaagcgaccaacgccaagctgattgagcgccaggtctctatcgtgatggaggctaccgactgcgatcgcgccaccgcccagaaggcgctggaggcctgcggccgccactgtaaaacggcgatcgtgatggtgctggcggacttaagcgccgcagaggcgcagtcgctgctggcgaaaaacaacggctatatccgcaaggcgctcagcaacacctga

SEQ ID NO: 136924 - DNA, 1434 bp, Enterobacter cloacae
atggcaaaaataacgaaagagatgatagcgcggatcctcgcccacgtgggcggcgccgcaaacgtcgcgcaggcgggcaactgcatgacgcgcctgcgcttgaccctgcgcgatgaaagtctggccgacagcgccgccatccgccagattgacggcgtgatgggggtgatcgtcagcgacgagcagttccaggtggtgctcggccccggcaaggcgcaaaccgccgccgaaatgatgaacggcctgctggaggcggcgcccgccgccgcgccgacgctggccgacgtcgcggcggagaaaaagcaggcgctgaagggcaggcagaccagcgcggtgcagaagtttctcgccaaattcgccactatctttacgccgctgatccccggctttatcgccgtcgggctgctgctgggcttcgccaccctggcggaacaggttttcgtactggagaacgcccatccgaacgccagcctggtggcgctgattggctatatgaaggtcttcagcaaagggatgttcacctttctgagtatcctgattggctataacgcgcagaaggcgttcggcggctccggcgtgaacggcgcgattatcgcctcgctgttcgtgctgggctacaacccggaggcaaccagcggcttctacgccggcatttccaccttcttcggccatggcatcgatccgcgcggcaatatcatcggcgtactgatcgccgctatccttggcgcgtgggttgaacgccaggtgcggcgggtgatgccggccaacctcgatatgatcctcacttcggcggtgacgctgctgatcatgggcgcggtgacctttacggtgatcatgccgattggcggctggttgtttaccggcatgtcatggctgttcctgcatcttaacggcaacccgtttggctcggcggtgctggccggcctgttcctgctggcggtgatgttcggcgtccatcaggggtttgtcccggtctattttgcgctggtggacgcccagggctttaactcgctgttcccgatcctggcgatggccggggccgggcaggtaggggcggcgctggcgctgttctggcgggcgaagcgcgattcgctgctgcgaacccagattaaaggggcgattattccgggcttcctcgggattggcgagccgctgatctacggcgtcaccctgccgcggatgaagccgtttgtcaccgcctgcctcggcggctcctgcggcgggttcttcgtcggactgatcgcctggctggggctgccggtcggcctgaacacggtgttcggtccgtccggtctggtggcgctgccgctgatgacctccggcagcggaatttacgccgggatggcggtctacgccggtgggctggcggtctcctacctgtgcggctttgtcctcacctggctgttcggcagtaaaaatgtcgatttaagctag

SEQ ID NO: 136925 - DNA, 903 bp, Enterobacter cloacae
atgggctccagcaaaaaagggatgctgaacgtactgattgccgccgtgctgtggggcagttccggggtgtgtgcgcaatttattatgcaggaaagccagatgtcgtcgccgtttctgaccatgacgcgtctgctgttcgccgggctgatcctgctgatgctcggctttgttcacggcgaccgcattttccgcgtgctgcaaaaccgccgcgacgccctaagcctgctgtttttctcgctgtttggcgcgctaaccgtgcagttcacctttctgatgaccattgaaaaatccaatgccgccacggccacggtgctgcagtttttgtcgccgacgatcatcgtcgcctggttcgccctcgcccgcaaagcgcgtcccacaccgctggtgctgggagctatctgcacctcgctggcgggcacctttctgctggtgacccacggcaacccaacgacgctgtcgatttcgccggcggcgctgttctgggggatcgcctcggcgtttgccgccgccttttataccacctatccttcaacgctgattgcccgctacgggacgctgcccatcgtcggctggagcatgctgttcggcggcgcgatgttattgccgttttacggcggccagggcaccgattttgtggttaacggcagcctgctgttagcttttttctacctggtggtgatcggtacttcgctgaccttcagcctctatctcaacggcgcgcagaagattggcggcgcaaaggccgggatcctaagctgcgccgaaccgctgagcagcgccctgctgtcgctcctgctgctggggatcaccttcacgctgccggactggctgggcactctgctgatcctcgcgtcggtggtgctgatcgccatcgactcgcggcggcgggtgagagccgcctga

SEQ ID NO: 136926 - DNA, 291 bp, Enterobacter cloacae
atgaaagcatgttggatggtatgcctggtcaccgccctgagcgccacgtcggcgtgggccgaatcaccgctgcaaagcctgcagttcgagcagcaaaaacagcaggtgctcaaagcggtgaaggaaaaatgcgcgccagcaagccacctcagcgacaacgattttgccaataaagtgctggcgaccgacggtaacaagaacgcggtccgcgaagcaacgctggcgaaggagcgcaataaccagaaaagctaccaggccgcaatcgacaaaatcgtctgtccggccaaatag

SEQ ID NO: 136927 - DNA, 864 bp, Enterobacter cloacae
atgacaatcgcgtttattggttttggcgaggcgggtggcattctggcggcggatctggcccgtgagcatgcggtgaccatttgggattgcaagctcaatggcccggagcgagaggcgatgggcaaaaaagcccgtgattcgcgcgttcaggtgggaaattcgctggcgcaggcgctggagggggccacgctggttttttctactgtgaccgccggtgaggcgctaaaggtggggcagcaggcggccgcgctgctgcagccgggacaatatttcctcgatctcaactccgtggcgccggagacgaaacggcaggcggctgaacattttctgccgggcgcctacattgatgtcgcggtgatggcgccggtaccgccggcccgattgcagacaccgttattgatcggcgggccgcaggcggaggcgatcgcgccgcgtctgcaggggctggggctgaatgcccgctatggcgccagtacggtgggccaggtgtcggcgataaaaatgtgccgtagcgtgatgatcaaaggtcttgaagcgctcaccacagaatgcctgttcgcggctcgtgaatacggcgttgaggaggaggtgcttagctccttgcatcatagttttccctctctgggctggacaggcgcgttccccgactatctgatcagccgggtggcggaacatggcattcggcgcagcgaagagatggaggaggtggtgaaaaccctgcgtgacgtggggagcgccgggataatgagcgaggcgatcgcgaaaagccagcgccagctgccggagcagatggccgcccgtagcctgagctacaggcagcttacgccgtttgactggaaaacgctggtcgcgaggctgaaataa

SEQ ID NO: 136928 - DNA, 1086 bp, Enterobacter cloacae
atggcgcaacgcggaatcccctgtctatggatgcgcggcggcacctctaaagcggcctgttttctggccgacgatctgcctgccgatccggtgcgacgtgatgcggtgctgctggcggtgatgggctcgcctgatccccggcaaattgacgggatcggcggcgccgatccgctgaccagcaaagtggcgattatccgccgctccgcacggcctgacgccgatgtggactatctgtttgcccaggtgaacgtggcggcggctaccgtggattatggccaaaactgcggcaatattctcgccgccgttggccctttcgccatcgagcgcggtctggttcgtcacgatgcgccgctcactcgggtgcgtatttttatggagaacacggggcaactggcggtggcagagatcccctgtgacgccgacggggtcaactacgtcggcgagagccgtatcgatggcgtgccgggcagcgccagcccgatcctgctccattttcttgatgtcgccggctccagctgcggggcgctgctgccgaccggccgggttcgtgaccgttttgacggcgttgaggtgacctgcatcgataacggtatgccggtgatcctgttgcgcgcgtgcgacctcggttgcaccggctatgagacgcgcgaacagctggataatgacgacgcgcttaaacgtcgcctggagtcgattcgcctgcaggccgggccgctgatgcagcttggcgacgtcagccagcgcacggtgcccaagatgaccctgatcgccgagccgcgacacggcggcgccatcagcagccgcacctttatcccccaccgctgccacgcgtcgatcggcgtatttggcgcggtgagcgtggccagcgcttgtctgctccccggctctgtcgcgcagggcctggcgcaggtagcgccaggcgatacgccgctgctcagcgtcgagcatccgacaggcgaatttagcgtgacgcttcagcttgatgctgacggcgccctggctggctgcggcctgttacgcacagcgcgactgctgtttgctggcgaggtttttattccggcccgcgtctggccgcgtgaggagtga

SEQ ID NO: 136929 - DNA, 714 bp, Enterobacter cloacae
atgaacctgttaaataaaaaaggccttgtgatccgccacctgccgcgccatgacgaggcggttttgcgccgctgtgaggcggccggggtggcgacgctccatgaagcctgggatcgtcaggggctgatggggccggcaatccgtccgattcagcagggcgtcagccgggcgggcaacgcggtaaccgtgctggtgacgcctggcgacaactggatgtttcatgtggcggtcgagcagtgccgcgccggcgatattctggtggtggccccgacctcgccgtgcggcgatggcttcttcggcgatctactggcgacgtctctccaatcgcgcggcgtggttgggctggtgggcgatatcggcattcgtgattcgcaaacgttgcgggaaatgggattcgccgtctggtcccgtcaggtttatgcccaggggacggtgaaagagagcctcggttcggttaacgtcccggtgatatgcgcaggtcagcttgtacagccgggcgatgtcgtagtggccgacgacgatggcgtcgtggtgctgcctcacgcccgggtccgtgatgtgctccataaagcggaagcccgcatgagcaatgagcttgcgaaacgtgagcggatgcgccatggcgagctggggctggatatttacgctatgcgtccgcgtctggcggaaaagggcctgcggtattacgaccgcgcagacgaggtggaggaataa

SEQ ID NO: 136930 - DNA, 741 bp, Enterobacter cloacae
atgtctcatccggttagcgaaaaaagtgcccttgtcgtcagcgcccactcggccgatttcgtctggcgcgcgggcggtgcgatagcgctgcatgccctgcagggctatcaggtccatgtggtctgtttatcctttggcgagcgcggcgagtccgccaaactgtggcgtaaaggcaacatgaccgaggaggcggtgaagcaggtgcgtcgcgaagaggcgcaggccgccgccgcgatcctgggcgccagcgtcgaattctttgatatcggcgactatccgctgcgcgccgataaagagacgctatttcgtctggcggatgtgtatcgccgtatccagccccactttgtcctgacgcactccctgcaggatccctataactacgatcaccccctggcctcccatctggcgcaggaagcgcggattatcgcccaggcagagggctatcgccccggtgagaaaattgtcgctgctcccccggtttactgtttcgaaccgcaccagccggagcagtgcaactggaaacccgatgtgttactggacatcaccgctgtctgggagaaaaagtatcaggccattcagtgcatgcagggtcaggagcatctgtgggaatactacacccgcgtggcgctgcagcgcggggtgcaggccaagcgcaatatcggcatcacggccgcgcgcgatatcgttcacggcgaagccttccagagcatcttcccccgcgtaacggagaacctggcatga

SEQ ID NO: 136931 - DNA, 1227 bp, Enterobacter cloacae
atgctaaagagaaagcacgataaaattataaatatcatgcagctgcgctttttctgtcaggtcgcgctgcgcggtagcgtctcacgcgcggccgatgacttattccgcacgcagtcagcgataacccgggctattcgcgatcttgaagccgcgttgaacgtcacgctgttcgaacgccattacagcggcatggtgcccaccgagtatggcaagtgcatcctgccgcgcgcccggcgggcgattgacgacctgcaggccatcccggcgctgctgcagaagcaccatacccgcagcagcggcccgctggcggacgccggctggctgttcaatacccgccgcttagccatttttattcagctctatcacgtcaaccatacccaaaccgtcgcgcaacagttggggatcactcagccggcggtcagtgccgcgctgaaggtcctggaaaaaggagcggattcggcgctatttcgccggacgccagagggggtgcgtcccacgcctgccgcagagctactctatcccccggtgagcagagcgctcaacgagctggaaaacatctggagcgatctcgctgcccgtcgcggggtgctggagggcaccgtgcgcattggcgccctgccgctgagccggacccggctactgccctccgccatcgccgcctttctggcccagcacccgggcatcaccctcatgaccaatgaaagcccgtatgagtcgctggtcgccgatatgcgggcaggtaatatcgattttattatcggcgccctgcgccaggatgaagatctcccggacctctgtagcgaagcgttattcgaagaggatatgttgattttactgcgtaataaccacccgctgctgcgccatccggacccgcgcagccagctggcgacagcgcaatgggtgctgccgcgcgccaacgcgccggcgcgcaatttgctggataaggcgtttgtcaccctggggctgccgctgccccagccgacggtggagaccggggatgcggcgatggtgcgaggattgctgcagggctccgacatgctggcggcggtctccgccagccagatgcgttttgaaactgacaatgggctgctcagcgtgttgccggttcccctgcccgataccacccggcgtatcgggctgacgtttcgcgccggcagcctgccctccccggcgacgcaggcgctgttgcgttttatttatcagcaggttcaggacggggccgtttaa

SEQ ID NO: 136932 - DNA, 1263 bp, Enterobacter cloacae
atggctaacattctcggcggtatcgccgtctctcataccccgactatcggcttcgcggtcgatcatcataaacagcaggatccggcgtgggcgccgatcttccagagcttcgaaccgctgcagcgctggctggaggagaaaaaaccggatgcgctggtgtacatctttaatgaccatgtgaccgcctttttcttcgatcactattcgacttttacgctgggaatcgacagtcaatatgacgttgccgatgagggcggcggaccgcgctgtctgccgccggtccagggcaacgcggcgctctcaaggcacattggcgccagcctgatggccgacgagtttgatatgtcgttctttatggataaaaagctcgaccacggccttttctcgccgctttcggcgctgttgccctgggatgaagcgcaggggtggccgacggcggtgatcccgttacagatcggcgtgctgcaatttccggtaccaagcgcgcgccgttgttacaaactcggccaggcgctgcgccgggcgattgaaagcttcccggaagatatcaatgtggcgattgtcgcaaccggcgggctctcgcatcaggttcatggcgagcgctgcggatttaataatcccgactgggatgcccagtttgttgatatgctggttaatgacccggaaaagcttaccgaaatgacccttggcgaatatgccgagctgggggggatggagggggccgaagtgatcatgtggctggtgatgcgcggcgcgctatcagccaatgtcaccgaaacctggcgcgactattacctgccgtcgatgaccggtatcgccacgttgatccttgagaacaatgcgcgcctgccccccgtcgataccctgacgcgccatcgccagcatatggcgcagcagctggccggggtggagaaactgccgggaacctatccttttacccacgagcgcagcctgaatggcttgcggcttaaccgtttcctgcatcggctgattgagcctgcctggcgcgaacgttttctgcagtcgcctcagtcgctttatgccgaagccggactgagtgaggaggaacagcagttgctcaacgcgcgcgactggcggggattaattcagtatggcgccagcttcttcctgctggagaaaatgggcgcggtggtcggcgtatccaacctgcatatttacgccgcgatgcgcgggcagacgctggaggcgtttcagcaaacgcgcaaccagcaggtaacctattcggtggcgggtaaacgttaa

SEQ ID NO: 136933 - DNA, 1371 bp, Enterobacter cloacae
atgaatcacacgaacgttgtcgatgtgaaagcgtggatagatacccgcccggtctcgcgctttcaatggaacgtgctgctgctctgtttcatcatcattatgctggatgggtatgacgccgcggtgatgggctttgtcgccccggcgctcatcgaagactggggcatcagccgggccgaaatggggccgattcttggggcggccatgttcggcgtcgccattggcgccctggtagcgggtccgctttctgaccgctacggccgaaagcgaattttactctggtcggtggcgctgtttgcgctgttcagcctggccggcgccgtggcgcaaagcccgacgcagttggcgctgatgcgttttctcaccggccttggccttggcgccgtaatgcccaactgcgtcacgctggtggcggaatatatgccggagcggcgtaaaggggtgatgatcaccctgatgtacagcggttttaacgtgggttccggcctcggcggctttatcgccgccggtttgttatcgcattacagctggcactcggcgctggtttttggcggcgtgctgccgctcgtggtgctcccctttatgatcgtgatgttgccagagtcggcgatgaacatggtggcgcgccgactaccgggcgagcagatcgccagggcgcttaaccggcttgggggccagtttacggctgaaaccgttttccagctgaatgcgccgcccatcacgcggagcagcaaagtggcgcagctgttccggcatggctatgcccgcggcacgatagcgctgtggttaacctattttatggggctgttcgtgatttacctgctgaacggctggctgccaaccattctccgctccggcgggctgtcgctgcagcaggcggcgatgatgaccggcttgttccagctcggcggcccgctgggcgggatccttgtcggtatgctgatggatcgcgcttcggcgaaagccgtgattgcggcaacctatttcctcggctgtctgtgcctgttgtcccagggggtaatggatttcggttcggcggtgctgtcggtgctgatttttatcagcgggatgtgcattaacggcgcgcagaacggtctgcaggcctattcgcccgcctattatcaaaccgagatccgcgctaccggagtcagctggatgcatggtatcggccgtaccggggctatcctcagctccacgctgggcgggatgctgatgctggccgtgccgggacactcgtcgatctttttggtgcttgcgctgccggcctgcctggcggggatctgtattttgttgcaccgtatgaatcacgctaagcctcgactcacagaggcagaacttgacgctttgtcatcccccctcgaacaccgataa

SEQ ID NO: 136934 - DNA, 945 bp, Enterobacter cloacae
atgatgtcgacaatcaatgatgtttcacgacttgccggggtttccaaagccacggtgtcgcgagtgttgagcggctcacgtggcgtgaaggaagccagtcgtcaggcggtgctgcaggcggcggaagcgctcaattaccggccaaacatgatagcccagtcgttgctcagccagtccaccggctgcatcggcgtcatctgcgcccaggacaacatcaaccaaaccaccagctatctctacgccctggaaaaacagctcagccagcaccagaaacacctgctgctgcgcttcgccaacaccagcaacggcgtgatgaactctctggaggagttgacctgcgggctgtgcgataacgtgctaatcatcggtgcgcgttttcctctgaatattaaccgcccggacgtggtgctggtggactgcctcgatagcgaaggcgacaacagtattcagttcgatcatgctttcgccgccgaaaccgcctgtcactatctgattagccaggggagacggcagattgcgctgattcatccgcagagcagcggctttgccgaccaggtgctgctgggctacaagcacgcgctggaaaaaaactttttgccgtttaatcgcaacctggtgtttctggataatacgtcgccgtcggtggcggtgcaggagctggtcaataacgccacgacgctgaactttaacgcgctgctggtgagcgatgaacagcaggcgcagcgcgtggtgccgcagctgcaggcgtttaaccgcgccgttccgcaaaatgtcatggtgtttagcctcgccggatcgttacagctgcccggtatcccgactatcccggcgattgaatattccatggacgcgatggcatcgcggatcgtcaactggctgaccgagaaaacggacaacccgggcggcagcccgctgcgcggcgatttaattattccgaagcactaa

SEQ ID NO: 136935 - DNA, 315 bp, Enterobacter cloacae
atgtacaagattatgctgtgctgctctgccgggatgtccaccagtctgctggtcagaaagatggttgaggcggcgaatgaacgtgacctgccggtgcagattgacgcctatggcgtttccgaatttgacatgcagtttccgcagtatcaggtggtgttgcttggcccccaggtgaaatacatgttgaaaaccctgtctgacaaagcggcttccctgaacattcccgttcagcccatcgatacgatggactacggtatgcagcggggagacaacgtcctgaattatgctctgtcgctgatcccagcggcgcactga

SEQ ID NO: 136936 - DNA, 771 bp, Enterobacter cloacae
  misc_feature (755)..(764): n is a, c, g, or t
atgagttctctgtatcagtccatgattgccgtgatcgagcaatctattactccgctggcaggacgccttgggcagcagaaatacgttatcgctatccgcgatggcttcactgccgccttgccgtttatgatcatcggctctttcatgctggtatttatctttccgccgttttcacccgataccaccaacggctttgcccgcggctggcttgatttctcccagcactaccgcgaacagctgatgctgccgtttaacctcagcatgggcgtgatgaccttctttatctcggtcggcattggcgccagcctcggtcgtcagtttcagctcgatccggtgatgtccggtctgctggcgtttatggctttcctgctggtcgccgcaccctatgccgatggcaaaatttccactcagtatctgtccggtcagggcattttcaccgcgctgatcaccgccatctactccacccgcgtttacgcgtggctgaagcaaaacaacattacgattcgtctgccgaaagaggtccccaccggcgtcgcccgttcgtttgaaatcctgatcccggtgctggtggttattgcgactctgcatccgctgaatctgtttatcgaagcgcagaccgggatgatcctgccgcaggcgatcatgcatctgctggagccgctggtttccgcctccgactcgctgccggcgattttgctctctgttctgatgtgccagattttctggttcgccggtatccacggctcgctgattgnnnnnnnnnnttgttaa

SEQ ID NO: 136937 - DNA, 558 bp, Enterobacter cloacae
atgaacccgttctggatggccaacctgtcggcaaaccaggcggcgctggcggctggcacggtactgccgcacgtctacctgcagggcttctgggatcactatctgctgattggcggcgtcggttctaccctgccgctggccttcctgctgctgcgtagccgggccacccatctgcgcaccatcggcaagatgggcatcgtgccgagcttctttaatatcaacgagccgattctgttcggggcgccgatcatcatgaacccgatgatgtttatccccttcgtctgcgtaccgatggtcaacgcggtgctggcttacggcgcgacgcgtcttggctggctgagccaggttgtgtcgctgacgccgtggactacgccggccccaattggcgcgtcgtgggcggctaactggaccctgagcccggtggtgatgtgtctcatctgcatggtgatgtcggcggtcatttacctgccgttcctgcgcgcttatgaacgttccttaatgaaaaccgaagttgacaaagccaaaaatagcgttccggtagcagaaaccgttagctaa

SEQ ID NO: 136938 - DNA, 303 bp, Enterobacter cloacae
atgattgaattagaagatgcggtaatggaaattatcgttaatgcgggacagtcacgctcattatgttttgaagcgctgcatgcggcccgaaccggaaatatcgacgaagcgcgcttactcttaaacgaggccgacggctacgcccgccgggcgcatcagatgcaaacccagctcatcgggcaggatgccggtgaagcgcgtcagcccatgacgctgattatggtacatgcccaggatcatttgatgaattcgctgctggcccgcgagttctcagaagaattaatccatctgtaccagcgttaa

SEQ ID NO: 136939 - DNA, 606 bp, Enterobacter cloacae
atggcggcgaaagccaccagcgacgcggtcgccagctgcaccaccgtcacccggcggacatcgactttcccggcccaggcgctgataaggataatctccgccgcgatcgccaccgcgcttgccagagtgatcatctcccccacgccaagcgccagcagattattttccggcccggccagcagaattaaaccaataaaggccagcacaatccccacgcaggacatcacccccggcatacgtcccaggcacagccactgcagcagcggcaccagcggcacatacatcgcggtgataaaggcagatttactgctggagatggtctgtagtccccaggtctgcaggccataccccagcgcaatcgccacgccaatcgctaccccggccttcacctccagccacgtcagaccgcgcagagtgcgcagcgaaagcaggcccaccgccagcgcggcagtcgcaaaacgcaaaccgacaaaaaacagcggcccgctgaggctcaccgcgtactgtacggcaaggaacgtccctccccagaacatggtgatcatgataaggagcgcttcctggcggctaacggagaattttaacgaagacataagacagccatga

SEQ ID NO: 136940 - DNA, 597 bp, Enterobacter cloacae
atggctaaaattctggtgctttattattccatgtatggacacattgaaaccatggctcacgccgtcgccgatggggcgaaccgggtggacggcgttgaggtggttgtgaagcgcgtgccggaaaccatgcaggctgaagcattcgccaaagcaggcgggaaaacgcaaaacgcgcccgtcgccacgccgcaggagctggcagagtatgacgccatcatctttggtaccccgacgcgcttcggcaacatgtccggtcagatgcgtactttcctcgatcaaaccggcggtctgtgggcgtccggcgctctgtatggcaaaatcgccagcgtatttagctcaaccggtaccggcggcggccaggaacaaaccattacctcgacctggacgacgctggcccaccacggcatgatcatcgtcccgatcggctatggcgcccaggagctattcgatatctcccaggtacgcggcggtaccccttatggcgcaaccaccatcgccggcggcgacggctcgcggcagccgagcgaggaagagttagccatcgcccgctatcagggtgaacatgtcgccaaactggccgttaaactgcacggctaa

SEQ ID NO: 136941 - DNA, 228 bp, Enterobacter cloacae
atgccaactcaagaagcaaaagcacatcgcgtcggcgaatgggcaagtttacgtaacacctcaccggaaattgccgaggcgattttcgaagtcgcccactacgatgagaaactggcggagcaaatctgggaggaaggcagcgacgaagtgctggcgctggcctttgccaaaaccgataaagacagcctgttctggggcgaacagacgattgagcgtaaaaacgtctag

SEQ ID NO: 136942 - DNA, 1248 bp, Enterobacter cloacae
atgaaaaaacgtctacttgccgccgccgttgccggcgcggtgatgttatccgctggcgctcaggcgcaggacacggccgccccggaggggtatcagctgcagcaggtgctgatcatgagtcgtcacaacctgcgtgcgccgttggccaataacggcagcgtgctggagcagtccaccgccaaggcctggccgcagtgggatgtgccgggcggccagctgaccaccaaaggcggtgtgctggaggtgtatatgggccactatatgcgcgaatggctggcgcagcagaagctggtgaccagcggcgagtgcccgccggaaaacgcggtttatgcctacgctaacagcctgcagcgcaccgtcgccaccgcgcagttctttatcaccggcgcgttcccgggctgcggcatcccggtgcatcaccagcctcagatgggcaccatggacccgaccttcaacccggttattaccgacgactccccggcgtttcgcgagaaagcgctgcaggcgatggaaaaagagcgccagggaatgcagttgaccgagagctacaagctgctggagacgatgatcgattaccgcaactcaccctcctgcaaagagaagaaggtctgttccctgagcgagggtaaagatacctttagcgccggttatcagcaggagccgggagtgtccggaccgttgaaggttggcaactcgctggtagacgccttcaccctgcaatattatgaaggcttcccgaaagatcaggtggcgtggggggagatcgccagcgataagcagtggcaagtgctgtcgaagctgaaaaatggctatcaggatagtctgtttacctcggtggcggtggcgcaaaacgtcgccaaaccgctggttaaatatatcgataacgcgctggtgggcgagggagccagcaaggcgaaagtcacgctgctggtgggacacgactcgaatatcgcttcgctgctcaccgccctggactttaagccctatcaactgcccggccagtatgagcgcactcctatcggcggcaaactgctgtttcagcgctggcatgacagcgccggcaatcgcgatctgatgaagattgagtatgtctatcaaagtaccgagcaactgcgtaacgccgacgcgttaaccctgcaggccccgccgcagcggatcactctggcgcttaacggctgtccggttgatgaccagggattctgcccgctggagacctttaaaaaggtgatcaacgaggcggcgaaataa

SEQ ID NO: 136943 - DNA, 450 bp, Enterobacter cloacae
gtgaaacgtacccgtctggaaaacagctgttgccctatcgcccgctccctcgacgttatcggcgactggtggtcgctgctgatcgtccgcgatgctctgcgcggggtgcgccgttttagcgaattccagaaaaacctcggtatcgccaaaaacatgctcgccgggcggctgaaaatgctggtggatgaaggcatcctgcgcctgcagccggcctccgacggcagcgcctggcaggagtatgtcctgaccgataagggccgtgccctgcaaacggtgctggtcgccctctcccagtgggcagacgactatctgttcgatcctgacgaaccggcgacccggctcattgaccgccagcagcgccagcccctgcgtaagctggtcctgcaggcggcagatggccgtgagctggccccggcggacatcaccatcgctatcccgctgaacgactaa

SEQ ID NO: 136944 - DNA, 789 bp, Enterobacter cloacae
atgacccaaccatcgcacacagcttttatcaccggcgcgtcctcaggtatcggcgcgatctatgccgaacgactcgccgcccgcggctacaacctgatcctcgccgcccgtcgtgaagaccgtctgcaggcgctcgccgaccagctgcaggcgcgctacgccatccaggcaagcatcctcaaagccgatcttagcgaagagcacgggattgccgccgtagagcagcgtctgcagcaggatcccgccatcgacctgttcattaacaacgccggcaccgcgaaattggcgggttttctcgccagtacgccacgcgagcaccaggcgattcatacgctcaacaccaccgcgctgctgcgtctgagctatgccgcgctggccgctttcaccccacgacgccgggggacgctgatcaatattgcctctatcctcgcgctgcatacgctgccgggcagcgcagtctacagcgccagcaaagcctgggtgttgagcttcacccgcggcctgcaggaggagtttgccgacagcggcgtgcgtattcaggcggtattgccggcggcgaccgctaccgatctgtggccgacctccggcgtggcgctggacgctctgcccagcggcacggtaatgaccaccgaggatctggttgacgccgctctcagggggctggagatgggtgaacaggtcaccttaccaccggttcatgacctgggactgtgggagacttttgagcagtccagagtggcgctgtttaccagcgcgcgaaccggacagcctgcgccgcggtatcgataa

SEQ ID NO: 136945 - DNA, 222 bp, Enterobacter cloacae
atgtataagaaaaccctcagcctgctgggcgtagcgttggcgctgtctgccttcgccagtcaggctgaaagtgaacgtcaggcgagccgcgagcggatcgtggagcaggtcctcaagccgtgtgaaggcaaaaaggcgggcgataaggtggtgattaccgatcgccgcggcggcgagcacgaggcgatctgtaccctgacggcggttccgctaccggagtag

SEQ ID NO: 136946 - DNA, 123 bp, Enterobacter cloacae
atgtcgggtcttattctctttatcgtcgcggtggcgctgctgggcgtcgccatctacagcctggtgtcgtacctcaaagagcggcgcgccagtcagttacctgtccataaaaagaagaaataa

SEQ ID NO: 136947 - DNA, 192 bp, Enterobacter cloacae
atgatgcagatgttcaaatatccgcagggagagggaggccgctcaggccgcattggatgccagccagctaccgcttaccggtccgtcttacccttttatctacgccttacccctttgctaagcaggtttgtcacgcggacgttgggcccgcaaactgttaacagcaagggggggatgggcgatggctattaa

SEQ ID NO: 136948 - DNA, 1464 bp, Enterobacter cloacae
  misc_feature (845)..(854): n is a, c, g, or t
atggaaaccaatatcgtagaagttgagaattttgttcagcaaacggaagagagacgggttagcgcgttcgcgaaagaagtgaagcgctacctcgaaacctaccctgatacccagtatgtcgatgtcctcctcactgacctgaacggctgcttccgcggcaagcgcatcccggttgccggcctgagcaaactggagaaaggctgttatttcccggcctcggtgtttgcgatggatattctcggcaatgtggtggaagaggccggtctgggccaggagatgggcgagccggatcgcagctgcatcccggtacccggcaccttaaccccttcggcggctgacccacaatcgatagcccaggtacagctaaccatggttgatgaagatggcgctccctttgacgttgagccgcggaacgtactcaaccgcctctggcagcagttgcgccagcgcgggctgttccccgtggtagcggtagagctggagttctatttactggaccgcaaacgcgatgccgaaggctacctgcagccgccgtgtgcgccgggcaccgacgatcgcaacacccaaagccaggtctattcggtcgataaccttaaccacttcgccgacgtgctcaacgacatcgacgagctggccaaactgcagctgatccccgccgatggcgcggtggcggaagcctcgccgggccagtttgaaatcaaccttcaccataccgataacgtgctggacgcctgcgatgatgcgctggcgttaaaacgtctcgtgcgtttgatggcggagaagcataagatgcacgccacttttatggcgaagccttatgaagagcatgccgccagtgggatgcnnnnnnnnnngccttatgaagagcatgccggcagtgggatgcatatccacatcagcatgctgaacaataaaggggaaaacgtgctggtggacggcgatggggaagactctgcgctgctcaaacgcgcgctggccgggatgatcgatctgatgccggcctcgatggcgctgctggcgccgaacgtgaactcgtatcgccgcttccagccggggatgtacgtcccgacgcaggcttcgtgggggcataacaaccgcaccgtcgcgctgcgtattccttgcggcgagcggcagaaccaccgcgtggagtatcgcgtcgcgggggcggacgccaacccgtatctggtgatggcggcgatttttgccggcattctgcacgggctggataacccccagctgcctttacaggaagaggtggaaggtaacggtctggaacaagagggcctgccgttcccgatccgccagagcgatgcgctgtgggagtttatgcagaacgatcacttgcgtgagcgcctcggcgagcgtttctgccatgttttccatgcctgtaagcatgatgaattactgcagtttgagcgtcttatcacagaaaccgaaattgagtggatgttgaaaaacgcctga

SEQ ID NO: 136949 - DNA, 1488 bp, Enterobacter cloacae
atgaattttcagcacctggcttactggcaggaaaaagcgaaaaacctagccattgaaacacgcttatttattaacggcgaatattgcgccgcggccgataataccacctttgagactatcgaccctgccgcgcagcagacattagcccaggtcgcccgcggtaaaaaagccgacgtcgaacgggcggtgaaagccgcgcgccaggcttttgataacggcgactggtcgcaggcctcccccgcacagcgtaaagcgatcctcactcgctttgctgatctgatggaggcccatcgtgaagagctggcgctgctggaaacgctggataccggcaaaccgattcgccacagcctgcgcgacgatattcccggcgccgcccgcgccattcgctggtatgccgaagcgctggataaagtctatggcgaagtggcccccaccggcagcaacgagctggcgatgatcgttcgcgaaccaattggcgtgatcgccgcggtggtgccgtggaacttcccgctgctgctggcctgctggaaactcggcccggcgctggcggcgggcaatagcgtaatcctcaaaccctcggaaaaatcgccgcttaccgccctgcgtctggccgggctggcgaaagaggccggcctgccggacggcgtgttgaacgtggtcagcggctttggccacgaggccgggcaggcgctggctctgcatcctgatgttgaagtcatcaccttcaccggctccacccgcaccggcaagcagctgctgaaagacgccggcgacagcaatatgaagcgcgtgtggctggaagcgggcggcaagagcgccaacattgtcttcgccgactgcccggatctgcaacaagcggttagcgccaccgccggcggcatcttctacaaccagggacaggtgtgcatcgccgggacccgtctgctgctcgaggagagcatcgctgacgagttcctggcgcggctgaaagctgaggcgcaacactggcagccgggcaacccgctcgatccggacaccaccatgggcatgctgattgacaatacccatgccgacaacgtgcatagctttattcgcggcggcgaaagtaaaaacacgctgttcctcgacggacggaaaaacccgtggcctgccgccgttggcccgaccattttcgttgacgtcgacccggcatcaaccctcagccgggaagagatcttcggcccggtgctggtggtgacccgcttcaaaagcgaagaagaggcgctaaagctcgccaatgacagcgactacggcttgggcgccgcggtgtggacccgcgatctctcccgcgcccaccgcatgagccgccgcctgaaggccggctcggtcttcgtcaacaactataacgatggtgatatgaccgttccgttcggcggctacaagcagagcggcaacgggcgcgataaatcgctgcatgcactggaaaaattcaccgaactgaaaaccatctggattgccctggagtcttga

SEQ ID NO: 136950 - DNA, 942 bp, Enterobacter cloacae
atgaataatctgccgctgctaaatgatttacgcgtctttatgctggtcgctcgccgggccgggttcgccgccgccgccgaggagcttggcgtatcgccggcgttcgtcagcaagcgggtttcgctgctggagcaaaccctgaatgtgatgttgctgcaccggaccacccgccgggtcaccattaccgaagagggggagcggatctatgaatgggcgcagcgcattttgcaggatgtcgatgagatgatggatgagctttccgacgtgcgccaggtgccgcagggaacgctgcgtattatcagtagcttcggctttggccgtcgggttgtcgccccggcgctgtcggcgctggctctccagtacccgcagctggagctgcgtttcgatgtccaggaccggctggtggatttagtcaatgaaggggtggatctcgatattcgcgtcggcgacgatatcgcaccgaatctgattgcccgccagctggcggccaatcaccgcgtactctgcgcctcgccgcagttccttgcccgccatgcgccgccgaaacagctgagcgatctggccgcgttaccctgcctggtgattaaagagcgcgatcatccgttcggcgtctggcaattgcatagcaaagagggccagcacgccatcaaggtaaccgggccgctctcctccaaccatggtgaaattgtgcatcagtggtgtctggacgggcaggggattgcgctccgttcgtggtgggacgtccgggagaatatcgccagcggacatctggtgcaggtgctgccggactactggcagccggccaacgtctgggcggtttacgtctcccggctggcgacgtcggccaaaatccgcaccaccgtggagtttctgcgccactactttcagctgcactatccgcagcatgagccgacggccagcgccgtcggcagaggcgattaa

SEQ ID NO: 136951 - DNA, 1086 bp, Enterobacter cloacae
atgaaaaaaacctgtcgtattgccgccatcccgggtgacggaattggcaaagaagtgctgcctgaagggattcgcgtgctgcaagccgccgcacagcgttgggatctgtcattgagcttcgagcagatggagtgggcaagctgcgaatattatgcccatcacggcaagatgatgccggacgactggcgcgagcagttgcagggcttcgatgccatctacttcggcgccgtcggctggccggataccgttcccgaccacatttcgctatgggggtcgctgctgaagttccgccgcgagttcgatcaatacgtcaacctgcgcccggtgcgcctgttccccggcgtcccctgcccgctggcgggtaaaaaggccggcgatattgatttttacgtggtgcgcgaaaataccgaaggcgaatattccgcccttggcggccgcgccaatgaaggcaccgagcatgaagtggtgattcaggagtcggtcttcacccgccgcggcgttgaccggatcctgcgctacgccttcgaactggcgcaaagccgcccacgcaaaacgctgacctccgcaaccaaatccaatggcctggccatcagcatgccctattgggatgagcgggtggaagagatggccaaaaactatcccgaaattcgctgggacaagcagcatatcgatatcctgtgtgcccgtttcgtgctgcagccggagcgtttcgacgtggtagtgggttctaacctgttcggcgatattctctccgatctcggcccggcctgtaccggcactatcggtattgcgccatcggccaatctcaatccggagcgcaatttcccgtcgctgttcgaaccggttcacgggtcggcgccggatatttacggtaaaaatatcgccaacccgatcgccaccgtttgggccggggcgatgatgctcgatttcctcggcaacggcgatgagcgctaccacgccgctcacgatggcattctggcggcgattgagcagacgatcgcctgcggaccgaaaactccggacatgaaaggcagtgcctcaacgcagcaggttggcgaggctatctgcaaggccattttggcgtaa

SEQ ID NO: 136952 - DNA, 1608 bp, Enterobacter cloacae
atgttgagcaacgtaaagaaaaaagatgtgccgctgattgccatcagcctggcggccattgttttcatcgccgctacattaagtctcttcccccagcaaaccgcgcaggcggctgattcgatttttaacggcgtgacccgcctgctgggttccacggtacaggtactggtgctgctggcgctgggactggtgttgtatctggccaccagcaaatacggcaatatccgtctcggcgaaggtaaagtcgaatacagtaccctctcatggctgtttatgtttatctgcgccggtctcggctcctccacgctgtactggggcgttgccgaatgggcttattactaccagaccccgggcctgaacattgccccgcaatcgccgaaagcgctggaatacagcatcccttactctttcttccactggggcgtaagcgcctgggcaacctataccctcgcctcgctgatcatggcctatcacttccacgtgcggaaaaataaaggcctcagcctctccgggatcgtttcggcgatcaccggcgttaatccgcaaggtttctggggccgtctggtcgatctgatgttcctgatcgctaccgtcggcgcgttaaccatttcgctggtagtcaccgccgccaccttcacccgcggcctgtcagcgctgaccggactgccggataacttcaccgtgcaggcatttgtgatcctgctctccggcggtattttctgcatgagttcgtggattggcatcaacaacggcctgcagcgcctgagcaaaatggtcggctggggggcgtttctgctgccgttggtggtattactggttggcccgaccgaattcatcaccaataacgtcattaacgccgtcggcctgacgacccaaaacttcctgcagatgagcctgtttaccgacccgctcggcgacggcgcctttacccgcaactggaccgtcttctactggctgtggtggatctcctataccccaggcgtggcgatgttcgtcacccgcgtctcccgcgggcgcaaaatcaaagaggtgatctggggactgctcctcggtagcaccgccggctgctggtttttcttcggggtgatggaaagctatgccatgcatcagttcgtcaacggcgtgattaacgtaccacaggtgatgcagactctcggcggcgaaaccgccgtccagcaggtcctgatgtcgctgccggcaggtaagctgttcctcgccgcctatctgttcgtgatgattgttttcctcgcctcgcacatggatgcggtggcctacaccatggcggcgaccagtacccgcaacctgcgcgaaggcgaggatccggatcgcggcatgcgcctgttctggtgcgtggtgatcaccctcatcccgctgtcgattctgtttaccggcgcttcgcttgagaccatgaaaaccaccgtggtgctgaccgccctaccgttcctggccattttactgattaaaaccggcggcttcgtgcgctggttaaaacaggactacgcccacgttccggtccatcagatagaaacccatacccccgagcccattattaaagccgagacgctgccggttggcgcggtactcaaaggcgacggccagtcgctgtaa

SEQ ID NO: 136953 - DNA, 1125 bp, Enterobacter cloacae
atgagcaatttgagccctgacttcaccctgccgattaacttttgcgctaatccgcaggatgcctggaccattccggcccgtttttataccgacagccaggcgtttgagcacgagaaagagcgcatcttcgccaatagctggatttgcgtcgcccacggcagcgaggtcgcccggccgaacgattacattacccgggagatcatcggcgaaaatatcgttatcgtccgcggccgcgacaacattctgcgcgccttctataacgtctgcccacaccgcggccaccagctactgagcggcgagggcaaagccaaaaacgtgattacctgcccctatcacgcctgggccttcaagctggacagcaatctcgcccacgcccgcaactgcgaaaacgtggcgaatttcgatagcgaaaaggcaacgctagtgccggttcgcctggaagagtatgccggctttgtgtttatcaatatgaatccggaagcggagagtgtggaaacgcagctaccggggctgcaggacaaagtgctggaagcctgtccggacgtgcatgatctgaaactggcggcgcgctttaccaccctcaccccggcgaactggaaaaatatcgtcgataactatctggaatgttaccactgcggtccggcgcacccgggcttctcggattccgtccaggttgaccgctactggcacaccatgcacggcaaatggacgctgcagtatggcttcgccaaaccgtccgagcagtcgtttaaattcgaagagggtaccgacgccgcgtttcacggtttctggctgtggccgtgcaccatgttcaacgtcacgccgatcaagggcatgatgaccgttatctatgaattcccggtggatgaagagaccactctgcagaattacgacatctatttcaccaacgaagagctgactgacgatcagaaagcgctgattgagtggtatcgcgacgtgttccgcccggaagatttacgcctggtggaaagcgtgcagaaggggctgaagtcccgcggctatcgcggccaggggcgcattatggcggataacagcggcagcggtatctccgagcacgggatcgcgcatttccacaatctggtcgcccaggtgttccagccgtaa

SEQ ID NO: 136954 - DNA, 414 bp, Enterobacter cloacae
atgaaagagaatgatattgctggcatcctgacctcgacacggacgattgcgctggtcggagccagcgacaagcctgaccgtccgagctaccgggtcatgaagtatctgctggatcaggggtatcacgttatcccggtttcgccgaaggtggcgggcaagacgctgctgggacagcaggggtatgcgacgctcgccgacgttccggaaaaggtcgacatggttgatgtcttccgtaattcagaagcggcgtggggcgtagcgcaggaagcgatagccatcggcgcgaaaacgctatggctgcagctgggggtgatcaatgagcaggctgcggtgctggccagggaagccggattgagcgtagtgatggatcgctgcccggccattgaactaccgcgactagggttggcgaaataa

SEQ ID NO: 136955 - DNA, 474 bp, Enterobacter cloacae
atgtggaatgaaaatatggaactgacaacacgtaccctgcctgcgcaaaaacatatcgcgctggtggctcacgatcactgcaaagatatgctgatgaaatgggttgctcgccatcaggcgctgctggcgcaacatattttgtatgctaccggcactaccggtaatctcgtctcccgggctaccggcctggaggttaatgccatgctgagcggtccgatgggcggcgaccagcaggtgggtgccctcatttcagaaggcaaaatcgacgtgctgatcttcttctgggatccgctgaacgccgttccccacgacccggatgtcaaagcgttgctgcgcctggccaccgtctggaacattccggtcgccactaacgtctccaccgctgactttattatccagtcgccgcacttcggtcaaccgctagatattctgatcccggattatccacgctatcttgccgagcgcctgaaataa

SEQ ID NO: 136956 - DNA, 2121 bp, Enterobacter cloacae
  misc_feature (1116)..(1125): n is a, c, g, or t
atggaacttaaagcgacaacattgggcaaacgcatggctcagcacccttatgatcgggtgcagctactgaacgccggggtaaaagtatccggcgatcgtcatgagtatcttatccctttcaatcagttattgtcagtgcattgtaagcgtggtctggtctggggcgaactggagtttgtgctaccggacgggaaagtcgtgcgtttgcacggtaccgagtggagcgaaacgcagcgcttttatcatcatttacacacactctggcagcagtggagcacggagatgagcaatatcgccgccggcgtgctgaagcagcagctggcgacgatcgagcacactcgcgcagaaggcaagtggctaacccgtcagcaggtggcggatgttcaggataatatacgccatgcgttgactggtttgccgatgcccaccagtcggcttgatgcctttgataactgccgggagctgtggcgggagtgtcagcgctggttaggcgatattgaagcgacgcgtctggcccataaccaggcctttaccgaggcgatgctggagcaatatcgcgaattttttgatagcgttgagtcgtccccgctcaatgcgtcacaagcgcgtgcggtagtgaacggcgagcgctccctgctggtgctggcgggagcgggcagcggtaaaacctcggtactggtggcgcgagcgggctggctgctggcgcggggagaagccgcggcagatcaaattttgctgctggcattcggccgccaggcggcgcaggaaatggatgagcggatccgcgagcgtctggcatcagatgatattaccgcgcgtactttccattcgctggcgttgcatattattcagcagggcagcaaaaaagtgcccactatcagtaagctggaaagcgatactgcggcccgccacgcattgctgctgaaaagctggcaaaagcagtgccaggagaaaaaagcgcaggcgaaaggttggcgcctgtggctggaagaagagatgggctggcaactgccggagggggacttctggcaggacaaaaaggtgcagcggcggatggccagccggcttgaccgctgggtgagcctgatgcgcatgcacggcggctcccaggcggannnnnnnnnnagccggcttgaccgctgggtgagcctgatgcgcatgcacggcggctcccaggcggagatgattgccggggcgccggaagcggtacgcgacctgttcagtaaacgggtgaagctgatgtcgcctctgatgaaagactggaaggcggcgctcaaggccgagaatgcggtcgatttttccggcctgatccatcaggcggtcaatattctcgataaaggccgcttcgtcagcccatggaaacacattctggtggatgaatttcaagatatttcgccgcagcgagcctcgctgttggccgcgttacgccggcagaatagccaaaccacgctctttgccgtcggggatgactggcaggcgatctaccggttcagcggggcgcagctttctctgaccaccgcattcaaccactactttggcgaaggggattgctgtgcgctggataccacctatcgctttaacgggcgtatcggcgaaatagccaatggctttatccagcaaaatccgcatcagttaagcaaaccgctgaacagccttatggcaggtgataaaaaggccgtcacgctgttagccgacgacaagctggacgatcttctggataagctgagcggttacgttaagcccgagcagcgcatcctgctgcttgcccgttatcaccatctgaagcctgaggcgctcaacaaagcggcgacgcgctggccgcacctgcagcttgattttatgaccattcatgccagcaaaggtcagcaggctgactttgtcattgtgttgggactgcaggagggggaggatgcgtttccggccccggcgcgcgagtcgattatggagcaggcgctcctgccgcagccggaagattttccggatgcggaggagcgtagactgttgtacgtggcgctcacccgcgctcgtcaccgggtatggctgttatttaacaaggcgcaaccttcgccgtttgtcgagatcctgcaggcgctggatgtgcccgtggccaggaagccgtaa

SEQ ID NO: 136957 - DNA, 447 bp, Enterobacter cloacae
atgcgtaccattctgaatattttgaactttatccttggcggtttcgccaccactctaggctggctactcgccaccctggtcagcatcattctgattgtcacgctgccgctgactcgttcctgctgggaaatcactcgcctttcgttatttccctacggtaacgaggcgattcatgttgacgagctcgagccggggcgcaaaaacggtctactgaacgccggcggtaccgttctgaacattctgtggttcatttttttcggctggtggctctgcctgatgcacattttcagcggtatagctcagtgcctgactatcataggcatcccggtggggatcgcgaatttcaaaatcgccgccatcgccctctggccggtgggtcgccgggtcgtttctgtggaaaccgcgcgtgctgcgcgtgaagccaatgcgcgtcgtcgctttcagtaa

SEQ ID NO: 136958 - DNA, 2136 bp, Enterobacter cloacae
atgattagccccctgctacgccgctacacctggaacagcgcctggctttataacgtacgaatttttatcgcgctctgcggcacaacgctgtttccctggtggatcggcgaagtcaaactgaccatccccctcaccctgggcgtcgtggctgcggctctgaccgaccttgacgaccgtctggccggccgtctgcgtaatcttgccattactctggtttgcttttttatcgcctccgcctccgtggagctgctgtttccgtggccgccgctgtttgcccttggtttgaccgtgtctaccatcggctttattttgcttggcggcctcggtcagcgctatgcgaccattgccttcggcgccctgcttatcgccatctacaccatgctcggcgtcacgctgtacgatcattggtatctgcagccgttgttcctgctggcgggggcagtgtggtacaacctgctgacgctgtccgggcacctgatctttccgattcgtccattgcaggacaacctggcgcgtagctatgagcaactggcccgctatcttgagctcaaatcccggctgtttgatcctgaccttgaggatgagagccaggcgccgctgtacgatctggcgctcgctaatggccagctggtagctacgcttaaccaaaccaaggtctcgctgctaacccgactgcgaggcgatcggggtcagcgcggcacccgccgcaccctgcagtactactttgtggcccaggatattcatgaacgcgccagctcatcgcatattcagtatcaaaccctacgcgatcaatttcgctatagcgatgtgatgttccgtttccagcgtatgctttcgatgcaggcgcaggcctgccagaaactgtcgcgggcgattctgttacgcgaaccctatcagcatgatgcccattttgaacgggcgttcatgcatctcgatgcggcacttgagcgcgtgcgcgccggcggcgcatccgacgagcagctcaacgccctcgggtatttactgaataacctgcgcgctatcgatgctcagctggccaccattgaatcggtgcaaaccaccgcgcctgccgggagtaataccgagacgctgctggccgacgacagactcggcggtctgagcgatatctggctgcgcctgcagcgcaatatgtcgccagagtcggcccttttccgccacgcagtacgtatgtcgttggtgctctgcgccggctatgcctttatccagtttaccgggctccagcatggctactggatcctgctaaccagcctgttcgtctgtcagccgaactataacgccacccgccatcgcctggcgctaaggattatcggcacgctggttggggtggcgatcggcctgccggtcctgctgctggttccctctgttgaagggcaactgctgttgatcgtcctgaccggcgtgctgttttttgccttccgtaacgtgcagtacgcccatgccacgatgtttattacgctgctggtgctgctgtgctttaacctgcttggcgagggctttgaagtcgcgctgccgcgtatcattgatacgctgatcggctgcgccatcgcctgggcagcggtcagcttcatctggccggactggaaattccgcaacctgccgcgggtgctggaccgggcaatgaacgcgaactgccgctatctggacgcgattctggagcagtatcatcagggccgcgacaaccggctggcctaccgtgtcgcgcgtcgtgacgcctacaaccgtgatgctgagctggcctccgtcgtctcgaacttatcgactgaaccacgcgcggatgccacccagcgagaaaccgcctttcgtctgctatgccttaaccacacgttcaccagctacatctccgctcttggcgcgcatcgggaaaaactgtccacgccggaaatcctcgccctgctggatgatgcagtctgttatgtggatgatgccttgcatcatacccccgcggatgaacagcgggtgcaacaggctttgaacagcctgcaaagccggatccatcatctggaaccgcgcgcggacagtaaggaacccttggtcttacagcagattggcctgctgctggcgctgctgcctgaaatctgccgcctgcagcaacgggtccacgcccaaaccgaataa

SEQ ID NO: 136959 - DNA, 597 bp, Enterobacter cloacae
atgagaaaactagtttgtccgcggctcccgcaatttcaggcctgcgtctcaccgctgggtcaactgcatactcgtccgctctttggcggctacagcctggctattgatgatacggtgtttgcgatggtggccgaggggaacatttatctgaaggcctgcgagcagagcgctgcttatcgggtggaacatcgtaatcctctgttaacgctgcgccgacacggccgcatagtgccgctgaagtattatcaaattgacgacactttatggcgcgatgagcagcagctttttcggctatcgctactgtcgtggcagagtgcgcagcgcgaaaagaactaccgacgggcgtcgggccgcctgaaggatttacctaatatcagctttcatatggaattgcagctgattcacgcgggcataccggacgttaggacgttgcgggaagttggtgcgcaggaggcatggctgaggctacgcgtaaataatgcttctttatcgctgagcgtattgctggcgctggagggggcgattgccggggtacatgccgccgcgctcccgacgccacggcgtcaggagcttctcgaatgggcggctacccggtag

SEQ ID NO: 136960 - DNA, 510 bp, Enterobacter cloacae
atgtttacttcagctcacgcaaaccgttcagcacaggcttctgctccggcaggccactacgctcatcgttctggcgaacagaacaccaatgggctgatcagtgaaattgtctatcgtgaagatcaacccatgatgacgcagttattgctgctacctttattacagcagctgggtcaacagtcgcgctggcagctgtggctcacgccgcaacaaaagctcagccgcgaatgggttcagtccgccggtctgccgctgtccaaggtcatgcaaattagccagctctctcccagccataccatagactcaatgatccgtgccctgcgcacgggtaattatagtgtggttatctgctggctggcggaggagttaaccgctgacgaacacgaacgtctcgttaacgctgcccaggtagggtccgcgatgggattcatcatgcgcccggtgcgaaatcagggcacgctcggcagacaactcagcgggctaaaaattcactcaaatttgtatcattga

SEQ ID NO: 136961 - DNA, 1071 bp, Enterobacter cloacae
atgaaaaagacagctatcgcgattgcagtggcactggctggcttcgctaccgtagcgcaggccgctccgaaagataacacctggtatgcaggtggtaaactgggttggtcccagtatcacgacaccggtttctacggtaacggtttccagaacaacaacggtccgacccgtaacgatcagcttggtgctggtgcgttcggtggttaccaggttaacccgtacctcggtttcgaaatgggttatgactggctgggccgtatggcatataaaggcagcgttgacaacggtgctttcaaagctcagggcgttcagctgaccgctaaactgggttacccgatcactgacgatctggacatctacacccgtctgggcggcatggtttggcgcgctgactccaaaggcaactacgcttctaccggcgtttcccgtagcgaacacgacactggcgtttccccagtatttgctggcggcgtagagtgggctgttactcgtgacatcgctacccgtctggaataccagtgggttaacaacatcggcgacgcgggcaccgtgggtacccgtcctgataacggcatgctgagcctgggtgtttcctaccgcttcggtcaggaagatgctgcaccggttgttgctccggctccggctccggctccggaagtggctaccaagcacttcaccctgaagtctgacgttctgttcaacttcaacaaagctaccctgaaaccggaaggtcagcaggctctggatcagctgtacactcagctgagcaacatggatccgaaagacggttccgctgttgttctgggctacaccgaccgcatcggttccgaagcttacaaccagcagctgtctgagaaacgtgctcagtccgttgttgactacctggttgctaaaggcatcccggctggcaaaatctccgctcgcggcatgggtgaatccaacccggttactggcaacacctgtgacaacgtgaaagctcgcgctgccctgatcgattgcctggctccggatcgtcgtgtagagatcgaagttaaaggctacaaagaagttgtaactcagccggcggcttaa

SEQ ID NO: 136962 - DNA, 453 bp, Enterobacter cloacae
atgaaatatcaacaactggaaaatcttgaaagcggctggaaatggaaatatctggtaaagaagcaccgggaaggtgagctgattacccgctacattgaggccagcgctgcgcaagctgcggtagatgacttgctgacgctcgagaatgaacctgtgctggtgcatgcctggattgagcagcatatgaatccggcgctgatgaaccgcatgaagcagactatccgcgcgcgacggaaacgccattttaacgctgagcatcagcatacgcgtaagaagtctatcgaccttgagtttgtcgtttggcagcgtcttgctggcctggcgcagcggcggggcaaaaccttgtctgaaaccatcgtccagctgattgaagatgccgagcacaaagagaaatatgccagcaaaatgtcgagcctgaagcacgatctgcaggtactgttagggaaagaatag

SEQ ID NO: 136963 - DNA, 1758 bp, Enterobacter cloacae
ttgaccattacgaaactgacccgaaccgaccttgcgcctgatctggaagcttaccaggcgctgtttgctcaagctgaactttcccatccggccccctccctctcgggcgatctgcagccgcgtttgttctatgggcttgagcagctgctgtacacgccggcagtctcctccttcatgctggtgaaagcccctgaagagccggaatatctgcaatggctggcggctgaaacccggactctgcacgagcctgccgcaccgctttacggcgtccgctatgaggtaaccgacgctcaggtgacgctcgcaccggcgcagggcgctgaggataatttcgccagcactgccccggtcatgatggccgattgggtagaagcggaacagctgtttggctgcgtacgccagtttaacggtgcaatcaccctccagcctgggctggtccatcaggccaacggcggcgtgcttgtgctttcgctacgtacactgctggcgcaaccgctgctgtgggtgcgtctgaaaaatatggtgactcgtcagcgctttgactggctttctatggatgaatcgcgtccgctgccggtcagcattccctctatgccgctgagtctgaaaatcatcctggtgggcgaacgcgaatcgctggccgatttccaggaaatggagccggagctggctgcgcaggcgatctatagcgagtatgaagacactctgcagtttgctgacgccgacacgctaaaggcctggtgccagtgggtatggcagaatgcgcagcagctggcgctgccgggcccggcagccgatgcctggcctctgctgatcgatgagggaacgcgctataccggcgatcaggagaccctgccactcagtccgctatggataacccgccagctgcgggaggctgccgccttctgcgaaggcgaggagattaccggtgaagcgatgcaaaccatgctggcgcgccgggtatggcgtgaaggctacctggcggagcgtatgcaggatgaaatcctgcaggaacagattctgattgaaaccgaaggcgaatgcgtcgggcagatcaacgccctgtcggtgatcgaattccccggtcatccacgcgcgttcggtgaaccttcacgcatcagctgcgtcgtgcacattggcgatggcgaatttatcgacgtcgaacgtaaagccgagctgggcggtaacattcatgcgaaaggcatgatgatcatgcaggcttttctgatgtccgagctggagctggagcagcagcttcccttcactgcttcgctgacctttgagcagtcctacagtgaagtggatggcgacagtgcctccatggcggaactctgcgccttaatcagcgccctggccaatgtaccgataaatcagagcatcgcgatcaccggctccgtcgaccagtttggtcgcgtgcagccggtcggcggcctgaacgagaaaattgaaggcttcttcactatctgtcagcagcgcggtttaaccggcaaacagggagtgattatccctgccgccaacgttcgtcatctcagcctgagccacgagctacgtcaggccgttgccgacaaccagtttgctatctgggccattgacgatattaccgaagcgctgccgatgttgacccagctgatgtgggacggtgaaggacagacgctgcgacaaaccattcaggagcggatagcgcaggcgacccagcaagagactcgccatcgttttccgtggccgctacgctggttaggtgggacaagttctaactga

SEQ ID NO: 136964 - DNA, 519 bp, Enterobacter cloacae
atggtagataaacgcgaatcctatacaaaagaagatcttcttgcctctggtcgtggtgaactgttcggcgcgaaaggcccgcagttaccggcaccaaacatgctgatgatggaccgcgtcatcaaaatgaccgaaaccggtggtaactacgataaaggttatgttgaggcagaactcgacatcaatcctgacctgtggttcttcggttgccactttatcggcgatccggtgatgccgggctgcctgggcctggatgctatgtggcagctggtcgggttctatcttggctggctgggcggcgaaggcaaaggccgcgcgctgggcgttggcgaagtgaaattcaccggtcaggttctgccgaccgcgaaaaaagtcacctaccgcatccacttcaagcgcattgttaaccgtcgtctgattatgggacttgcggatggtgaagtgctggttgacgatcgtctgatctacaccgcgaacgatctgaaagtgggtctgttccaggatacttccgctttctga

SEQ ID NO: 136965 - DNA, 564 bp, Enterobacter cloacae
atgaaaaaatggttactggcggcagccgtatgcgtactgacggcgtgcagtagcggcggggaaagcaagacatactatcagctaccggttgtgcagggcggcgcgcagagcgccgccagtcagggggcacgtctgctgtgggtagagcaggtcagcatcccggattatctggcgggtaacggggtggtctatcagaccaccgacgtgcagtatgtgatcgccaataataatctgtgggccagtccgctggatcagcagctgcgcactacgctggtggcaaatctcagccagcagttgcccggctgggtagtgtcgtcccagccgctggggagcgagcaggataccctcaacgttgcggtcaatggctttcatggtcgctatgacgggcgggttatcgttagcggtgagtggctgctgaagcatcagggacagctgattaagcgcccgtttaacatcgtcctcaggcaggaacaggatggttatgacgcgatggtcaagaccctggcgcaggcgtggagccaggaggcggctgccattgccagcgagcttaatcgtctgccataa

SEQ ID NO: 136966 - DNA, 1638 bp, Enterobacter cloacae
atggaaaataagagcggagaagcgaaagtgcagaaggtgaagaactggtcaccggtgtggatcttccctatcgtcactgcgctgatcggggcatggatcctgttttatcattacagccatcaggggcctgaggtcacgctgatcaccaccaatgcggaagggattgaagggggaaaaacccggatcaagagccgcagcgtagacgttggggtggtggagagcgcgacgctgaccgacgatctcacccacgtggaaatcaaagcccgcctcaattccgggatgcagaagctgctgcacaacgattccgtcttctgggtggtaaagccgcaggttgggcgcgaggggatcagcggtcttgggacattgttgtccggggcctatattgaactgcagccgggaacgaaaggttcggtgccagcgcagtatccgctactggattctccgccgctggcctcgccggatgccaaggggatccgtattctgctggaaagcagcaaggcgggccagctgtcgccgggcgatccggtgttgttccgcggctatcgcgtggggtcagtggaaaccagcaccttcgacacgcagaaacgtcgtataacttaccagctgttcatcaatgcgccgaacgatcgcctggtgaccaccaacgttcgtttctggaaggacagcgggatcgctgtagatttgacctcggcggggatgcgcgtcgagatgggctcgctgtcgacgctgtttggcggcggggtgagcttcgatattcctgaaggactggacctcggcgagccggtggcgaataaaacggaataccatctgtttgacgatcagaagagcatccaggattcagtctttaccgagcatatcgattacgtcatgttcttcaaagactcggttcgcggcctgcagccgggcgcgccggtggagttccgcggtatccgtctgggcaccgtcggcaaagtgccgttctttattccggggctgaagcagcgtttgaacgatgactatcgtattccagtggaagtgcgggttgaaccgcaacggctgattaatcagcttggcggcgatccgaatattcgcgcccacattgacgatctgatcaaccgcggactgcgcggctcgctgaaaaccggtaacctggtgaccggcgcgctgtatatcgatctcgacttctatccgaaggcgcccccgcgcgggaaaatacaggagtttaacggctatccgattatcccgaccatcagcggtggactggcacagatccagcagcgtctgatggatgcgctggataagattaataacctgccgattaatccgctgctggagcaggcgaccagcaccctggcgcagagcgagaagacgatgcagcacgtgcagaccacgctggataatctgaataagatcacctccagccagtcaatgcagcagctgcccgccgatatgcagacgacgctgcgtgaactgaaccgtagcatgcagggcttccagccgggctctgcggcctacaataagatggtggccgatatgcagcgtctggatcaggtgctgcgtgagctgcagccggttctgaaaacgctaaatgataagagcaatgcgctggtatttgaggcgaaggataaaaaagatccacagccgaagggagcgaaataa

SEQ ID NO: 136967 - DNA, 1269 bp, Enterobacter cloacae
atgtgcgatcatcatcatgctgcgcgacatattctatgtccccaatgtgatttgctggtggctttgccgcagcttgagcatcgccagaaagccgcctgcccgcgctgcggtacaacgttaaccaccacgtgggacgcgcctcgccagcgtcccacggcgtatgcgctggtcgcgctgtttatgctgctgctggccaacctgttcccttttatctatatgaaagtgggcggcatcagtagcgaaatagagctgctggaaattcccaacgtactgtttaccgaggattacgccagtctcgggactttctttttactctttgttcaattagtgccggcgttttgcctggtcaccattttgctgctggttaatcgggtcagaatgcctgccggcctgaagacgttccttgcgcgaattctctttcaactgaaaacctggggcatggcggagatctttcttgccggcgtactggtgagcttcgtcaagctgatggcctacggtgatatcggcatcggtctgagctttgttccctggtgtatgttttgcctgctgcagttacgtacttttcagtgcgtcgaccgccgctggctatgggatgatattgcccccatgccggccattacccagccgctgaaggtcggggtgaccggtatccgtcaggggctgcgctcctgtgcctgctgtacggcggtgttgccggtcgatcagaccgtctgcccgcgctgtaacagtaaaggaacggcgcggcgcaaaaatagcctgcagtggacgctggcgctgctggtgacgtcatttatcctttatctccctgccaacattatgccgatcatgatcaccgatctgttgggcgataaaatgccatcgaccattatggccggggtgattttactgtggagcgaaggttcttatccggtggcgctggtgatctttatcgccagtattatggtgccgacgctgaagatgatcgctatcgcctggttgtgctggaacgccaacggcaacggcgcgcgagattcggagcgcatgcatctgatctatgaggtggtggaatttgttggccgctggtcaatgattgacgtttttgtcatcgccgtgctctctgcgctggtccgcatgggagggttaatgaatatctatccagccatcggcgcggtcatgtttgcgctggtggtggtgatgaccatgttttcagccatgacgtttgatccccgtttactgtgggatcgtgagccagattcaagccatgaggaaatacaacaacatggaaaataa

SEQ ID NO: 136968 - DNA, 1905 bp, Enterobacter cloacae
  misc_feature (1103)..(1112): n is a, c, g, or t
atgtcactgattagtatgcacggcgcctggctttccttcagcgatgcgccgctgctggataatgccgagctgcatattgaagataacgaacgcgtctgcctcgtcggacgcaacggcgccggtaaatctaccctgatgaagatcctcaaccgcgaacaggggctggatgacggacgcatcatttatgaacaggacctgatcgtggcgcgtctgcagcaggatccgccgcggaacgttgctggtacggtgtacgattttgtcgccgaagggatcgccgagcaggcggcttatctgaaagcctaccatgacgtgtcgcatcaggtgatgaccgatccgagcgacaaaaatttaaatgaactggcgcgcctgcaggagcagctcgataacctgggactatggcagctggacagccgcattaacgaagtgattgagcagctgggccttgacgccaatgcgcagctggcgtcgctgtccggtggctggctacgtaaagcggcgctgggccgcgccctggtcagtgggccgcgcgtgctgctgctggatgagcccactaaccacctcgatatcgaaaccatcgactggctggaaggtttcctgaaaacctttaaaggcacgattatctttatttcgcatgaccgttcctttatccgcaatatggcgacgcgcattgtcgacctcgatcgtggcaagctggtgacctatccgggaaattacgatcagtatctcctcgataaagaagaagccctgcgggtcgaagaactgcagaatgcggaatttgaccgcaagctggcccaggaagaggtgtggatccgtcagggtatcaaagcgcgccggacccgtaacgaaggccgagtccgcgcgctgaaggcgatgcgccgcgagcgcggtgagcgtcgggaagtgatgggcagcgcgaagatgcaggttgaggaggcttcccgttccggcaaaatcgtctttgagatggaaaacgtcaactatcaggttgacggcaaagtgctggtgaaggatttctccgcacagatccagcgcggcgacaagatcgccctgatcggccccaacggctgcgggaaaaccacgttgctgaagctgatgctcggccnnnnnnnnnncagcgggcggatccatgttggcaccaagctggaggtcgcctacttcgaccagcaccgcgcggagttggatccggataaaacggtgatggacaacctggcggaaggcaaacaggaggtaatggttaacggtaaaccacgccatgtgctgggttatctacaggacttcctgttccatccaaaacgagcgatgaccccggtacgtgcgctttccggaggggaacgtaaccgcctgctgctggcccggctgttcctgaaacccagcaatctgctgatccttgatgaaccgactaacgacctcgatgttgaaacgctggagctgctggaagagctgatcgatggctatcaggggaccgtgatgctggtgagccacgatcgtcagtttgtcgacaataccgtgaccgagtgctggatcttcgaaggcggcggtcgtattggccagtacgtcggcggctatcacgacgcccgcggtcagcaggcccagtctttggcgcaaaagcagacggccgttaaaaaaacgacggaagtcgctcagccaaaagcagaaactgtcaaacgcggcgggaacaaactaagctataacctgcagcgcgagctggaacaactgccgcagaagctggaggctctcgaggccgaactgcagacgctgcaggatcaggttgccgatcccgatttcttcgggcaaccgcacgatcgcacgcagcaggtgctggcgcagctggccgaagcggagcaggcgctggaagcggcctttgaacgctgggaatatctcgaaggattaaagaacggcgcctga

SEQ ID NO: 136969 - DNA, 990 bp, Enterobacter cloacae
gtgcagaagaattatcacctggcggagagcgaaggcggcaagccggcgatgctggcggaggattttgctaaccgtctgcgtaaaaacctgaagaagtttgaaaaatgggcccgccaggaaggaatcgaatgctatcgcctgtacgatgctgatctaccggaatacaacgtggccattgaccgctatgccgactgggtggtggtccaggagtatgccccgccgaaaaccgtcgacgcgcataaggcgcgccagcgtctgttcgacatcatcgctgcgactatcgccgtactggacatggcgcctaacaagctggtgctgaaaacccgtgaacggcagaaggggaaaaaccagtatcagaagatggcggagaagggcgactttattgaggtacaggagtataacgcgcgcctgtgggtcaacctcaccgactacctggatactggtctgttcctcgaccaccgtatcgcccgtcgcatgctcggccagatgagtaaaggtaaggacttcctgaacctgttctcctataccggcagcgccagcgtccacgcaggcctcggcggtgcgcgatccaccaccacggtggatatgtcacgcacctacctggagtgggcggaacgcaacctgcgtctcaatggcctgaccggccgcgcgcatcgcctgatgcaggcggacgtgctgggttggctgcgggagagcaccgagcagttcgatctgatctttatcgatccgccgaccttttccaactccaaacgaatggaagatgcgtttgacgtccagcgcgatcacattcgcctgatgaccgatctaaaacgtctgctgcgtaaaggcggcaccattatgttctcgaataacaaacgcggtttccgtatggatcatgacgggctggcggcgcttggcctgaaggcgcaagagatttcgcaaaaaacgctgtcgcaggattttgcccgcaaccgtcagatccacaactgctggctgattaccgcagcctga

SEQ ID NO: 136970 - DNA, 258 bp, Enterobacter cloacae
atggggtctaaagacagtaattatcaggttatttatcgctatgagccgctgccgaagtttgttccgggtggttgggtgctttttcagcggccaaaatcctgcggcggcgggttctggctgggtaaaacctatgatggtgtttttatgcttgaacttgatcgcccagttcccttggatgaggggattaagtacatcatcctttcatcgcgagtagctgaaaactttatggattttgacgaggatttcaggctaacctga

SEQ ID NO: 136971 - DNA, 888 bp, Enterobacter cloacae
atgagcaccatcctgaaatgggcgggaaacaaaaccgccatcatgcccgaactgaaaaaacacctcccagctggcccgcgattggttgaacctttcgcgggttcctgcgctgtgatgatggcgacagagtatcctcattatcttgtcgctgatatcaattctgacctgattaatctttataagcagattgcatttaactgcgagaaatttatagctaacgctaaagggttctttgcaagtacaaatagcgaaacctcttattacaatatccgccaggattttaatcattcctctgaaactactgatttctggaaagctgtatttttcatttatcttaatcgccactgttatcgtggattgtgccgttataacaggaaaggtgaatttaacgttccatacgggaattataaaaaaacatatttcccggaagacgaaatcagagcatttgcagagaaagcaaaacgcgccaccttcatttgtgccagctacgaggaaactttagcgatggtcaaaacaggtgatgtgatttattgcgacccaccttatgacggtacatttaccgattatcacactgatggtttcaatgagcttgaacagcgtcgcctggcgacgactcttgatgtactggcatcagcaggtcatcaggttgttgtgtcgaacagtgaaaccgagctgacgaacgcgatttaccagaattttacccgccaccgtattaacgcaaaacgcagtatgggtgttgccggtggtgatggtaagtctgcaactgaaattatcgctgtttctcaacctctgatctggtcagggtttgatctggcagcgtatccagtcgtgagtgcgtcttacgaaactttccaaagagagtatttgtgtgagccatcacgacgttaa

SEQ ID NO: 136972 - DNA, 234 bp, Enterobacter cloacae
atgcgaaatatagaaacccgttccaacaaaatcggcccggatgatgcaggtcttaaccagatactgacagaggcccgcatggaagaacgccgtgcacgtgctgcggcaatggccgcccgccttgatagcctggcgtgtcacatcacatcgcgccagcttaatcacgttgaggcggcggagctgctgcgcgttacagcggaaaacatccagaacgaagcgcaggagatccactga

SEQ ID NO: 136973 - DNA, 342 bp, Enterobacter cloacae
atggctattgaaggcgattctgcgactgttccactaagtccggggcatcggctggatggcctgaatcatattgcagagctaagggcgaaagtgttcggcttgaatatagaacctgaactggagcgttttattagcgatatacgggaccagcgagatattaaccataaacagaatgagcgtgccttagccgccatattctttatggctaagattccggcggatcgtcataacgtcaatatgaatgagctgacgactgacgaaaagcgggagctgataaaagcaatgaaccattttcgtgcagtggtgagcttatttccaaagcggctaaccatgccgaattaa

SEQ ID NO: 136974 - DNA, 201 bp, Enterobacter cloacae
atgttgactaaacaaccatcactcgcatcgctgctcgttaagcaaagcccatcacctcatttcgggcatggctggatcatggggaaggatggcaagcgctggcatccgtgccgctcgcaggatgcgctgctggctgaactgcgtactactaaacaggggaaaccatggctattgaaggcgattctgcgactgttccactaa

SEQ ID NO: 136975 - DNA, 510 bp, Enterobacter cloacae
atgtttgatttcaggatttccaaacatccacactttgaagaggcctgccgggctttcgcgctgcgtcataacatggcgaaactggcagaacgcgcgggaatgaatgtccagacactgcgcaataagctaaacccggaccagccgcaccaacttaccgcaccggaaatctggctgcttactgatctgacagaggattccgcattggttgatggtttcctggcgcagatccactgcctgccgtgcgtgccgctaaacgaagtcgctcgggagaaaatgccggactacgtactgaaagccacggcagaaatcggccgcgtagctgctggcgctgtttccggcgaagcgcacacaacggcagggcgccgccagattgttgatagcatcaattcagttactcgactgatggcattaaccgcagtgacgttgcaggcgcgcctgcaggcaagcccggcgatggccagcaccattgatacagtcactggcctgggtgcctcgttcggtttgatctga

SEQ ID NO: 136976 - DNA, 615 bp, Enterobacter cloacae
atgtcaaacacaaataaaaccccacatggggtgtcaaaatttaatttctcatctcagagcggaggcaaagaggcaataacacgcatccttcaagcctatggattcagcactcgccaagctctatgtgaccgtcttgggatatcgcaaagcactatggcgaaccgatggatgcgcgacactttcccgcatgactgggttatcgcgtgtcatcttgatactggcgcctcactattgtggttagcaactggtcaaggcagccccggaatgaacaacgcttctgaaaatgggttgcgtttgcaatataaagaaatcaaaaacgggattatttcagactcaatagctgttcattacgattcgcatctaatccctaataatgcaacaagcccctctttagtgaagtttgaaggcgatgtgtatctagtggatgaatataagggtgaagtaaacgatggagtatggttcatagagattgatggattttacagcgttagacgaatttacagattaccaggctcgcggttgcgggttgagaatgggcctgcgtctttcgaatgcgaagtgtccgggattttagttttaggaaagatcataggaaaaacaactttcacggagtga

SEQ ID NO: 136977 - DNA, 252 bp, Enterobacter cloacae
atgcttacattaattgagttagcgttggtacttatttccggcctcacaatggctcacttaacatccaaagagaagcaaaaaggaccttttgccagcttcatatctctatgtatcgggcctgcgttcctactcactcttatgtttgttgcaatgtatctctcaccaacggtacagcatatctatacagtggttatctgcttacttgccgctgggaaaattaaagactatcgagataatgcgagcaatcaataa

SEQ ID NO: 136978 - DNA, 273 bp, Enterobacter cloacae
atgaaagaggccgccgcgtttgcttttaatgtcgatgcttcgcaggtgacaatttccgatgcgaggcagcaggatgtgaaaaccaactttgtggccaccatcggcaaaaccagccatcgctgctatgtgacgaaggccgccgagccgaagctttacgggctgatcccgctgggcggcggtagcaccgtctcgaatgccatctgcgccggcgccaacccgacgctagcgagcaaaacctgcgacgccctgtcgcaaaaagcgggccgctgctga

SEQ ID NO: 136979 - DNA, 291 bp, Enterobacter cloacae
atgagtagcgccgcggtgggaaaggatgtcgtccccgatgaggcgcggacccgagatatgatgcgctgtcaggattatctgcaactggatccgcgcgcctggacgccgatggtgatttggctgatgaacgatcctttttcactggagccgccggagtggaccgacttccatgaagccgagctggtgctgacgccgatccttaccgaaatctgccgtcaggagccggatgtctggctcacctcgctgcgggaacggctcaattcttatcagcaggtgcggtcgctgaactaa

SEQ ID NO: 136980 - DNA, 615 bp, Enterobacter cloacae
atgaatgcgataatcattgacgatcatccattggcacgtatcgccattcgcaaccttctcgacagcaacggtattaccgtcgcggcagagctcgacagcggcgctcatgccgtgcagaccgcggaaagcatgcagcctgacctgctcatcgtcgacgtcgatattccggagctcagcggtatcgaggtgctggagcagctgcgcaaacgccgctaccagggaacaatcatcatcatttccgctaagaatgaactgttctacggcaaacgcagcgccgactgcggagcaaatggttttgtgagtaaaaaagagggaatgaataatatcctcgccgcaatcgacgcagccaataatggctacagctatttccccttttcactggaacgcttctgcacccacggcatcaccgatcaggaccggctggatacgctgtcaacgcaggagatgaaggtgttccgctatattctcagcggcgtcgactacaccaccatcggcagcaaaatgaacatcagcaataaaacggtaagtacctataaggtccgtctgatggataaattaggctgcagcaccctgcttgagctatatgactttgcgcaacgcaataaaatagggtga

SEQ ID NO: 136981 - DNA, 1905 bp, Enterobacter cloacae
atggcggttcgtcttattttatccgtcgttgtcgggctggcgctcagcctctcgcctgccgcgtatgccatgaaacagctggagctgaagagccattctcatatcgcggcgatcgatatcccgcttagcggtaaggagaaagcatggctggcggcgcagccgacgctgaccgtcgggacctggcttcccgagaggacgcccatcgtctatgacggcgacgagaaaagttatcagggcattaacgccgactatctggcgctgatggcgcacagcctcggactgaaggtaattatccgccagtatgacaccgagcagcaggcgctcaccgccctggccgaccgccaggtggataccctgctcactcaggtggcgcaccgggatgcgctcgccccgggcctggatcaatccgcgccgctgcttaaaacctggccgacgctggtcacctcgctgaaatcccctctgccgccgctgaccactgaccgccgcgtcacgctggcctgcacccgcgattgcgcttttttcgatattattcagcaggcgtttcccaacgccaaaatcaccctttatgatagcgactatcaggctctcgcctcggtggtcagcggcgagaatcagtattttatcggcaacaacatcaccactggccactgcatctcgaaatatttctcgcaatcgctggttatcgcgcactattttcgtcagcaggagcaacacaaccgctttgtcacccgtgacgatcggccagagctgcatcaactcctcgaccgttttatccatgccgtcgacagcgacaccgcgatgcggatcatgcaaaactggctcaaccgtggcgatctgtcgtttctcaataccccgcttacctttagccccgaagagcagcgctggctgcagaagcatcgtcgcgtccgcctgctggtgaacccctattttccgccatttaccctggtggataacgaggatgaactgcgcggcatcatggccgatatgctgaatattgtctcactccagaccggcctgcagtttgaccctattctggtgcgcaaccgtcaggctctggcaaagcgcatggaaaaagaggactgggcgatcatgcccgccgccaccctgaccccacagccgcaggcctacgtcaccctcagcgatccgctcattaacgtggcctttgtgctggtcgcccgcggcagcgcccccgatcagcatctgctgacgcgctcggcgcggatcgccctgccggtcgggcctatcgccgcccatgatctgaaagcgcgttttccgctgattaactgggtggaaacggataacgttggcgtcgccatgaagatggtagaggaaggcgaagtggatgccgccgtagcctcggagctttccgcccgctatatgattgaccactactatccacagggtctgcactacacccgcattgatggactccccgtcgcggccattcggctggccatcccgcgcgatgaaccggtgctggccgccattcttaacaaagcgctgcaggttattccgccacgggatattctgcagatgaccgagaagtggtcgaaaatctccagtcagcaaatagagaactggagccagtacagccgccagttttaccagctgatcgcctttgcgctggtgctgatcgccatcagcctcggctggggactctccctgtgtcgggaagtgcgcaaacgcaaagactcccagcagcggctcgaggaggagctggcgcagaaggaggccctctcctgtgcgctggaacgcgaaaaagacaaagcgattcaggcgacaaaagccaagagccgctttctggccagcatgagccacgagctgcgcacgccggtgagcgccatcgtcggctttctggagctgctggcgaaacctgagctgaacgtcagccggcaggagacctga

SEQ ID NO: 136982 - DNA, 1215 bp, Enterobacter cloacae
gtgtcgcagcagtgtcataccttcgatgcgctggcgcagcaaaagggcatcgatctgcactaccataacgcgctgcaggaagggaccatgctgtgggtcgacccgcaggcgctacggcaaatcctcaataatctcatcggcaatgcgctgaagtttaccgtcgaaggcgcaattcaggtctcctgccggctgacgccggcgaatgagacacagggagagttggccctcatggttagcgacagcggctgcgggatcagtgaagcagagcaggccatcctcttccaccgctatgcccaggcgcgccagggacgacagcagaccggctccggactggggctggtcatttgcaaagagctggttgcgctgatgcagggtcgcctggagatggtcagccgtccgggcgtggggaccactttcactatcacgctgccggtcaaggcgagccgctgcgcgatccacgcgccgcaggcgtcgcccgccagaccgcaggctctaccagggctggcgatactgatagcggacgatcaccccaccaaccggctactgctcaagcgccagctcagcactatcggctatagcgtcgatgaagcctgcgacggtgaagaggcagagaataagctcgccagcaaacattacgatctgctgataacggacctcaatatgccgaagaaagatggcctggcgctggcggcctcgctacgccgtcgctatccgggcctggtaatttggggcgtgactgccagcgcgctgccgcagtcgcgggaggcgtgtctggccagcggcatgaatatgtgtctgtttaagccggtgtcggtccagacgctgagtcatgagctcagccgtttagcggtgggccgcgcatcacctcacgctacccggcacctgaagctcagcgtgctgagcgagaatacggggggagaccaggcgctgatgaatgagatgctggagacgttccgcgatgcgtcggccgcggatttacaggctgccggacaggcaatcgcccggcatgagccgcagatttttctgcgggcgctgcaccgtctgcacggttcagcacaaattctggggattactgcgctacaacaactgtgcgccccttttgaggcaaagcggcctgattcgctgacgccggcaagctgtctggaggtggtacagcgcatcaccggcgtcatgcgcgagatcgatggcgaaatcgacgccctgatcggccgctag

SEQ ID NO: 136983 - DNA, 633 bp, Enterobacter cloacae
atgaaaaaagtcattctggcgagcctgctggcaaccatgatgagtacctctccggtatgggcaacagatagcgcgacggcagcgccagccgcggcagccacgacgcaggtacagaaagaagccgccgatgtgctgcaggtggcggtgcagggcgcgaatgcgatgcgcgacatccagttcgcccgtctggcgctgttccatggccagccggatagcgccaaaaaactgacagacgacgccgccgcgctgctggccgccgatgatgccagctgggcgaagtttgtgaaaactgatgctaaagccaaaatgatcgccgatcgctatgtgatcattaacgcctctatcgccctgtctgaagactatgtggccacgccggaaaaagagagcgctatccaatccgccaacgaaaagctggcgaaaggcgatcagaaaggggctatcgataccctgcgtctggccggtattggcgtgattgagaaccagtatctaatgccgcttaaccagacccgtaaggcggtagcgcaggcgcaagaactgctgaaagccggtaaatattacgaagcgaatctggtgctgaagggcgctgaagagggcattgtggtggatagcgagatgctggtggcaggcaactga

SEQ ID NO: 136984 - DNA, 576 bp, Enterobacter cloacae
atgtttatgtttagccattacactttaaatgcgtttagcccacgcgtcttcattcgatataaacggcatgcctgcctgatggcggtattgctgttcatctgcggagcctgttgtctggcctggccgttggtcgccggctggtatctcgccacagtaaccggcatgttattgatgatctgcggcttctattcgctgtacagcctgattgtcttccgccagcagcactggaaatcacgcctggtggcgctgatcttcgccatcgcctggatcgtgctcggcctgagctttgtcgtcaatcccctcaacggtatgagcagtctggccattttatttggctttttatttgttctcggcggtatttcccgcatcgttaacggatgtcaaacccgcaaacaaagcggcgctggctggaatatttttatcggcctgttggatttacttatcgcctgcctgtggctggccatgaacccgcagcaaagctggttatttattaccgcctttatcggcgttgaaatgatatttagcgccatcggcttgttggtcctgcgcaataaaatgaagcacgctgaggcttaa

SEQ ID NO: 136985 - DNA, 378 bp, Enterobacter cloacae; identical to SEQ ID NO: 101384

SEQ ID NO: 136986 - DNA, 348 bp, Enterobacter cloacae
atgatcccgctaccaacaggcatcaaaatctggctggttgccggtattaccgatatgagaaacggcttcaacgggctggctgcaaaagtgcagacggcgctgaaagacgaaccgatgtccggccatgtcttcatcttccggggccgcagcggcagtcaggttaaacttctgtggtccaccggcgacgggctgtgcctgctgaccaaacggctggagcgcgggcgcttcgcctggccgtcagctcgcgatggcaaagtgttcctgaccccggcgcagctggcaatgctgctggaaggcatcgactggcgacagccgaagcggttgctgacctccctgaccatgctgtag

SEQ ID NO: 136987 - DNA, 975 bp, Enterobacter cloacae
atgaatgacatctcttctgacgacatccttctgctgaaacagcgccttgccgaacaggaagcgctgaaccgtgccctgctggaaaagctggcagaccgggagcgcgaaatagaccatctgcaggcgcagctggataaacttcgccggatgaacttcggcagccgttccgaaaaagtctcccgccgtatcgcacaaatggaagccgatctgaaccggcttcagaaagagagcgatacgctgaccggtcgggtggatgacccggcagtacagcgcactctgcgtcagacccgcacccgcaaaccgttccccgaatcactcccccgcgatgaaaaacgcctgcggccagcgggttcctgctgcccggagtgtggtggtgcgctgagttacctgggtgaggatgccgctgaacagctggagctgatgcgcagcgccttccgggtgatccggaccgtacgggaaaaacatgcctgcacaaaatgtgatgccatcgtgcaggcccccgcgccttcgcgccccattgagcggggtatcgccggaccggggctgatggcccgcgtgctgacctcaaagtatgcagagcacacaccgctgtatcgtcagtctgaaatatacggtcgccagggcgtggaactgagccgttcactgctgtcgggctgggtggatgcatgctgccggctgctgtccccgctggaggaggcgcttcaggactatgtcctgactgaaggtaaactccatgccgatgataccccggtccaggtgctgttgccgggcaataagaagacgaagaccgggcggttgtggacgtatgttcgtgatgaccgcaacgccgggtcagcgctggcaccggcggtgtggttcgcctacagcccgacagaaaaggcatccatccgcagacccatcttgcggggttcagcggtgtgctacaggcggatgcgtacgccgggttcaacgagctgtaccgcgatggccggataa

SEQ ID NO: 136988 - DNA, 609 bp, Enterobacter cloacae
atgaaactgatcggcagctacaccagtccctttgtgcgcaaaatatcggtgatcctgctggaaaagcgcatcccatttgagtttgtcaacgaatccccctacagcgaaagcaacggtgtggcgcgctataacccgctgggcaaggtaccggcgctggtgacggacgacggtgagtgctggtttgactccccggtcatcgcccagtatctggagctgctgggcgtggcgccgccgatgatccccgccgaccccagagccgctctcaggatgcgccagctagaggcgctggcggatggcgtgatggaggccgcccaggcgctggtgcgtgaaaaggctcgcccgggcgcgcaacagtcagagcaagaactgctccgccagcgggagaaagtggctcgcggtctcgacaggctggaagcctgcgcggcagacggaacgctgcgcggcgacgaggttaatctggcgaccatttccacggcctgcgccattgcttatctgaactttcgccgggtcgcgcccggctggtgcgccacccggccgcagctggtgaagctggtggatgcgttgttccagcgcgccagctttgcgcgcactgaaccgccgcggacttga

SEQ ID NO: 136989 - DNA, 1392 bp, Enterobacter cloacae
  misc_feature (1248)..(1257): n is a, c, g, or t
atgactaccgaaattcgtgcgctttatacccggcttccggccattgaccgcttactacgcgaccccgctttttctcccctgctggcgcagcacggccattcgcaggtggtggcgcagctgcgccagatgctggatgaggcgcgggaacagattagccaacggcagacgctccctgactggagccatgactggcagcacgcctgtgagcagcggctcaccgccggccagcggagcgccctgcgtccggtgtttaatctcaccggtacggtattgcataccaatctggggcgcgccattcaggcggagtcggccgtggaggcggtcgccagcgcgatgcgcgcgccggtgacgctcgaatatgatctcgacgacgccgggcgcggccatcgcgatcgcgccattgccgatctgctgtgccagatcaccggcgcggaagatgcctgtatcgtgaacaacaacgcggcggccgttctgctgatgctggcggccaccgccagcggtcgcgaagtggtggtctctcgcggcgaactggtggagatcggcggggcatttcgcatccccgacgtgatgcgccaggcgggttgccagctgcaagaagtgggtaccaccaaccgcacccatgccaaagattatcgccaggcggtgaatgacaataccgcgctgctgatgaaggtccacaccagcaactacagtattgagggctttaccaaagccgtcgacgaagcggagctggcggccattggtcgcgaactggatgttccggtggtagccgacctgggcagcgggtcgctggtggatctcagtcagtatggcctgccaaaggagccgatgccgcaggagatgatcgccgccggggtgagcctggtcagtttctccggcgacaagctgctcggtggcccgcaggccgggattatcgtcggcaaacgcgcgctgattgcccagctgcaaagccacccgctgaagcgggccctgcgcgccgataaaatgaccctcgcagcgctggaggctacgctgcgcctctatcagcacccggaggcgctgagggagaaaatgccgacgctgcgcctgctcacccgtccggcggaggagatccgccggctggctgaacgcctgcagcctgacctggcggcacactatgctgattttgccgtcagcgtggcagcctgccagtcgcagattggcagcggctcgttacccgtcgaccgcctgcccagcgcggcgttgacctttaccccgcatgacggccgnnnnnnnnnncggctggaggcgctggcggcccgctggcgcgcgctgccgtgtccggtgattggccgcatttatgacggtcggctctggctggacctgcgctgtctggaaaatgaaacccgctttatggagatgttgttacgatga

SEQ ID NO: 136990 - DNA, 1842 bp, Enterobacter cloacae
atgattattgccaccgctggacatgttgaccacggcaaaacgacgctgctgcaggcgataaccggcgtgaatgccgatcgtctgccggaagagaaagcgcggggaatgacgatcgatctcggctatgcctactggccgcagccggacgggcgggtgctgggatttattgacgttcccgggcacgaaaagtttttgtccaacatgctggcgggggtgggcggtattgaccatgcgctgctggtggtggcctgcgatgatggggtgatggcgcaaacccgcgaacacctggcgatcctgcagctgaccggaaagccgacgctgaccgtggcgctgaccaaaacggaccgcgtggcggccgccagggtggcggaggttcaggcagaggtcgagcagaccctgggcgagctgggctttgacgccgtcgctttctttcccaccgcggcggcggaaaacatcggtattgcggaactgcgcagccatctgctgcagcttgcggagcgcccccgcccgcagcagcagcggtttcgcctggcgctggatcgcgcttttaccgtcaaaggcgcggggctggtggtcaccggaacggcgctctccggcgaagtacgggtcggggataccctatggcttaccggcgtcaacacgccgatgcgcgtccgcggcctgcatgcccagaatcaagcggttgagcaggcgtacgccggacagcgcattgcgctgaacattgtcggcgatgcgcaaaaagaggcagtgcaccgcggcgactggctgctctcctcaccaccgccggagccagcagaacgggtgattgtcgagctgcagtgccatacgccgctcagccagtggcagccgctgcatattcaccatgctgccagccacattaccggccgggtgtcgcttcttgagggcaacctggcggagctggtgctggatactccgctgtggctggcggataacgaccggctggtgctccgcgatatctctgctcgcttgacgctggcgggcgcacgggtggtgacgctggatcctccgcgtcgcggcaaacgtaaaccggaatatctgcagtggctgcacgccctggcagcggtcggcgctgacgatgcgcaggcgctggagctgcatctgcagcgggatgccgtccggcttgagcacttcgcctgggcgcggcagctcagcgaagccggaatggcggccctgatccagcgaccggactatctgcaggccggacagcgcctgcttagcgcgccgcttgccgcccgctggcagcgaaaattgctggatgcccttgcgcgttaccatgagcagcatcgagacgagccgggccctggccgggagcgcctgcgccgcatcgcgctgccgatggaagatgaagcgctggtgctgctgctgattgagcagatgcgcgagagcggcttagtccacagtcatcacggctggctgcatttgccggagcataaagccgggtttaccgacgagcagcaggcggtctggcataaggtggagactctgttcggcgacgatccgtggtgggtgcgcgatcttgcgcgcgaagtccatgttgaagagtccctgatgcgcgcggtgctgcgccaggcggcgcagcaggggatgattaccgcgatcgtcaaggatcgttactaccgcaacgatcgcattgtgcagttcgcccagcgggtgcgcgagctggatcggctgcgcggttcaacctgcgcggcggatttccgcgataccttaaacgtagggcggaagctggcgatccagatcctggagtatttcgatcggattggcttcacccgccgtcgcggcaacgatcatatcctgcgcgataaggcattgttccggtaa

SEQ ID NO: 136991 - DNA, 486 bp, Enterobacter cloacae
atgaaccagtttcttattgccaatgcccagcggtgcatcggctgtcgtacctgcgaagtggcctgcgcggtggcgcaccagcaggcgcaggatgtcgccgccctgtcgacgaaccatttcgcgccgcgtatccgggtggtgaaaagcggcgagatatcaacggcgacggcctgtcggcagtgcgaggatgcgccctgcgccagcgtttgcccacagggggcgattcagcgcgacaatgacgtctggtgggtcgatcagcgctgctgcatcggctgcaaaagctgcatggtggcctgcccgtacggcgcgatgaccgttacggtaatgaaccagcaggcgcaggcgttgaaatgcgatctatgccatcaccgcgccgaaggaccggcctgcgtggccgcctgcccgacgcaggcgctgcgggtgatggttcccgcggagctggaagcgctatgcgcgcaaaaacgccagcggctggcgctggcgtga

SEQ ID NO: 136992 - DNA, 2034 bp, Enterobacter cloacae
atgaaactcgctgcgcttgccacgttattcgtgcctgggatggcctttgccgcctggactaccaccgactttcctgcttttaccgaagaagggaccggccgattcatcagccagaaagtggttgagaagggtacacgtcccctgcagctaaattttgaccagcagtgctggcagccttccggcggcattaagctcaaccagatgctgtccatggagccctgtcgcggcacaccgccgcaatggcgcatcttccgccagggtctgtataccctggaggtggatacccgttccggcacgccaacgatgatgatttcgctggaggaaaaagagaccagcgccgcggcgccgcagatccgccagtgtccgaaatgggacggaaaaccgctgaccatcgacgtcagcaaaaccttcgccgagggcagcaaggtccgcgatttctacagcggcaatgtcgcgaccgtcagcggcggcaaaatcaccctgcagcccgccttcggcagcaatggcctgctgctgcttgagcgcgccgagacggccgccccggcgccgtttgactggcacaatgccaccgtctacttcgtcctgaccgatcgcttcgtaaacggtaacccggccaacgacaacagctatggtcgccataaagacggcatgcaggagatcggcaccttccacggcggcgacctgcagggattaaccagcaagctggattatctgcagcagatgggagttaacgccctgtggatcagctccccgctcgagcagatccacggctgggtcggcggcggcacgaagggcgatttccctcactacgcttatcacggctattacacccaggactggtcgaaactggacgccaacatggggaccgaagcggatctccgccgactggtggatgaagcgcataagcgcggaatacgtattctgttcgacgtggtgatgaaccatgccggctacgccaccctggccgacatgcaggagttccagttcggctccctgtatctgcaaggagatgagctgaaaaaaactctcggcgagcgctggacggactggaagccgggcgctggacagacctggcacagctttaacgactatatcaacttcagcgacaaagccgggtgggagaaatggtggggtaagaagtggatccgcaccgatatcggcgattacgacaatccgggctatgacgatctcaccatgtcgctggccttcctgccggacctgaaaaccgaatcgaaggaggtctcaggcctgccgaacttctataaccataaaccagacaccgcagcgaaagcgatcccgggctatacgccgcgcgactatctgacacactggctgagccagtgggtacgtgactacggcatcgatggcttccgcgtcgataccgccaaacatgtggagatggacgcctggcagcagttaaaaacccaggccaccgccgcgctggcggagtggaagaaagccaatccggataaagcgctggatgcggcgccgttctggatgactggcgaagcctggggacatggagtgatgcagagcgattattatcgccacggttttgatgcgatgatcaatttcgactaccaggaccaggcggcgaaagcggcgacctgtatggccaatattgacctcacctggcagcaaatggcggacaagctgcagagctttaacgtcctgagctacctctcctcgcacgatacgcggctgttccgcgaaggcggcaccaccgcggcggagctactgctgctggcccctggcgccgtgcagattttctatggcgacgaatcatcgcgcccgttcggccccaccggctcggacccgctgcagggtacccgctcggagatgaactggcaggatgtcaacggcaaggcggcccgcagcgttacccactggcagaagatcggccagttccgcgctcgccatccggcaatcggcatgggcaaacagacaacgctgtcgatgtcgcgtggttacgggttcgtgcgtgagagcggtgaagacaaagtgatggtcatctgggccggacagcagcagtaa

SEQ ID NO: 136993 - DNA, 564 bp, Enterobacter cloacae
atgccttatattaccaagcagaatcaggcgattactgcggatcgtaactggcttatttccaagcagtacgatgctcgctggtcaccgactgagaaggcgcgcctgaaggatatcgcttcccgttataaggtgaagtggtcaggcaatacgcgtcatgtgccctggaacgcgctgcttgagcgtgtcgacattattccgaacagcatggtggcgaccatggcggcggcggaaagtggctggggtacctccaggctggcgcgcgagaataacaacctgttcggcatgaagtgcggcgccggtcgctgccgcggcgcgatgaaaggttactcgcagtttgagtcggtagagcagtcggtgcaggcttacgtaacaaacctgaacacccacccggcctattcttctttccgcaagtcgcgcctgcagctgcgcaaggcggatcaggaagtaactgccagcaccatgatccataagctgaaggggtattcgaccaaagggtcgagctacaacaactatctcttcgcgatgtatcaggacaatcagcggctcatcgccgcccatctgtaa

SEQ ID NO: 136994 - DNA, 1179 bp, Enterobacter cloacae
atgtttgaaaagcgtcaccgtattacgctgttatttaacgccaacaaagcttatgaccgccaggtagttgaaggtgtcggcgagtatctgcaggcctcccagttggaatgggatatctttattgaagaggactttcgggcacgcatcgaaaacatcaaagagtggttgggcgatggcgttatcgccgactatgacgatcccgaaatcgaaaagctgctggccgatgtccacgtgcccatcgtcggcgtcggcggatcttatcatcagccagagcagtacccgccggtccactatatcgccaccgacaacgccgcgctggtggaaagcgcttttctccatttgaaggaaaaaggggtgcaccgcttcgcgttttacggactccccacctccagcggtaaacgctgggcggtagagcgcgagtatgccttctgccagctggtcgcgaaggagaagtatcgcggcgtggtctaccaggggctggagacagcgccggagaactggcagcacgcgcaaaaccggctcgccgactggctgcaaaccctgccgccgcaaaccggcatcatcgccgtcaccgacgcccgcgcccgccacgtcctgcaggcctgcgagctgctgcatatcccggtgccagagaaactgtgcgttatcggcatcgataacgaggagctaacccgctatctctctcgcgtcgccctctcctctgtcgcccagggcacccgccagatgggttatcaggcggcaaaattactccaccggctgttgaataacgaggccctcccgctgcagcgccagctgatcccgccgatgcgcgtcgttgagcgacgctccaccgactaccggtcgttaaacgatccctccgtgatacaggcgatgcattacattcgcaacaatgcctgcaaaggcatcaaggtggaacaggtgctcgacgccgtgggcatctctcgctctaatctggaaaaacgcttcaaagaggaggtcggggagaccatccacacggtgatccacagcgaaaaactggaaaaggcgcgcagcctgctggtgtccactagtctgtcgatcaatgagatttcgcagatgtgcggctatccgtcgctgcaatatttctattcggtgtttaagaaggagtacgacgtgacgccgaaggagtaccgcgatcggcacagcgaggtgatgctgtag

SEQ ID NO: 136995 - DNA, 483 bp, Enterobacter cloacae
atgtcgaagaacacgtcgtctgaaatcaaactcaccccaaccgcccccgcggccctgccggcgctgaaggggctgaatctccaggtcttcgtgatgatcgccgccatcgtcgtcattatgctgtttttcacctgggttaccgatggcgcctacctgagcgcacgcaatatctccaacctgctgcggcagacggccatcaccggcatcctcgccgtcggcatggtgtttgtgattatttcggcagaaatcgacttgtccgttggctcgatgatggggctgctgggcggcgctgcggcgatctttgacgtctggctcggctggccgctgccgctcaccattctggtgacgctggtgatgggcctgctgctcggggcgtggaacggatggtgggtagcctatcgcaaagtgccctcgtttatcgtcacccttgccgggagtttatcgtctggcagtggcgcgggcggatgcgccggcaggcgttag

SEQ ID NO: 136996 - DNA, 996 bp, Enterobacter cloacae
atgaagataaagaacctttgccttacgctttgcgccagctccctcctgctcgccagcatggcggggatggcgaaagaagtgaagattggcatggccatcgacgatctgcgtctggagcgctggcagaaagaccgtgatattttcgtcaataaagcggaatccttaggcgccaaagtttttgtccagtccgctaatggcaatgaagaaacgcagatgtcgcaaattgaaaacatgatcaaccgcggcgtcgatgtgttagtcattattccttataacggccaggtactcagtaacgttattaaagaagccaagcaggaaggtattaaagttctggcctatgaccgtatgattaataatgccgatattgatttctatatatctttcgataatgaaaaagttggtgaaatgcaggcgcaaagtctggtcgacaaagtaccgcagggtaattatttcctgatgggcggctcgccggtggataataacgctaaactgttccgcgccggacagatgaaggttctcaagccgtatgtcgatgatggcaaaattaagattgtcggcgatcagtgggttgacggctggctgccggagaacgcgctgaaaataatggaaaacgcgctaacggcgaataataacaagatcgatgccgtggtcgcctccaatgacgccaccgccggcggcgccatccaggccttaaccgcccaggggctggccggcaaagtggcgatctccggtcaggatgctgacctggcgggcgtgaagcgcattatttccggtacccagacgatgaccgtctataaaccgattaccaccctggccaccaacgccgctgaaatcgccgttgagctgggtaacgataagcagccgaaggccgataccacgctgaataacggcttaaaagacgtcccttcgcgcctgttaacaccaattgaggtgaataaagagaatatcgacgccacggtgattaaagacggtttccataaaaagagtgaactgtaa

SEQ ID NO: 136997 - DNA, 1323 bp, Enterobacter cloacae
atgcagacctatttcgatcaactcgatcgcgttcgttacgaaggcccgaaatccactaacccgctggctttccgtcattacaacccggatgaactggtgctgggcaaacggatggaagatcatctgcgttttgcggcctgttactggcacaccttctgctggaatggcgccgatatgtttggcgtgggctcctttgatcgtccctggcagcagcctggcgacgccctggagatggccaaacgcaaagccgatgtggcgttcgaattcttccataaactcaacgtgccttactactgcttccacgacgttgacgtctcgccggaaggcgcttcgctcaaggagtacagcaataacttcgcccggatggtcgaggtgctggctgagaaacagcagcagagcggcgtgaagcttctgtgggggaccgcaaactgctttaccaacccgcgctacggcgccggcgcggccaccaacccggatccggaagtatttagctgggcggccacccaggtggtcaccgccatgaatgccacccatcaactgggcggtgaaaactatgtgctgtggggcggtcgcgagggctatgaaaccctgctgaataccgacctgcgccaggagcgtgagcagattggccgctttatgcagctggtggtggagcataagcataaaatcggctttaaaggcacgctgctgattgagcccaaaccgcaggagccgaccaagcatcagtatgactatgatgcctctaccgtttacggcttcctcaaacagtttggtctggaaaaagagattaaactgaatattgaagctaaccatgccacgctcgccggccattcgttccatcatgaaattgcgacggccattgcgctggggctgttcggctccgttgacgccaaccgcggcgatccgcagctgggctgggataccgaccagttcccgaacagcgtcgaagagaacgcgctggtgatgtatgaaatcctcaaagcgggcggcttcaccaccggcgggctcaactttgatgcgaaagtgcgccggcagagcaccgacaaatacgatctgttctatggtcatattggcgcgatggataccatggcgctatcgctgaaggtcgcggcgcggatgatcgaggacggcgaactggataagcgcgtggccagacgctacgccggctggaacggtgagctggggcagcagatccttaacgggcagatgaccctgagcgatattgcccagtatgccgctcagcatcagctggcgccgcagcatcgcagcggccagcaggaacaactggaaaacctggtcaaccattatctgtttgacaagtaa

SEQ ID NO: 136998 - DNA, 546 bp, Enterobacter cloacae
atggagcgccgtcaggcggcttaccagacgctgctgaagcaaaatccggggattaaagagctggagtcgatcggcgccgtgtcatccgatgtgcagggcgacactgccaacaaggtgggggcgatcctcgccaagtatccgaaagggaaaattgacgcgatctggggcacctgggatgcctttagccagggagcctataaagcgctgaaagagaacggccgcaccgagatcaaactctacagcattgatatttccaaccaggatttgcagctgatgcgcgaggccggcagcccgtggaaggtgagcgtggcggtggatccgaagcttatcggcgcgaccaacgtgcggctgatcgccaacaagatcgccggcgagccgacgccagccacctacgacttcaaggcggcggcgattccccaggcgctgctggcggcccagccgggagcggtaaacgtggcgtcgctggggaaaattatccctggctggggccagaccgaagactttatcgcgccgtggttcgcgacgctggaagcgaagaacaaataa

SEQ ID NO: 136999 - DNA, 870 bp, Enterobacter cloacae
  misc_feature (768)..(777): n is a, c, g, or t
atgtcagcattaccttcccccgaatacagccgcaatatgcggctgattggccatagcgatcagggcggtcgtccggacggcgtgcagctgatggtgcaccgcggattcgcctatatcggccatatggtgtcgcagggtttttccgtggtcgatgttcgcgatccgacccggcccaccaccgtcaactatattgccgcgccgccgggcacctggaacgtgcatctccaggcgcatgacgatctgctgctggtgatcaacgcccgggatctgtttgctgacgcccgttttgctgatgagaaggtgtactacacccgctcggtgggtgacacggtcagcgatgtgcaggacaaggggtggagcgccgggctgcgcatctttgatatttccactcccgcgcagccgcgggaaatcagtttcctgtcgcttaacggcatcggtattcaccgcatctggtacgtcggcgggcgctgggcgtatgtgtctgcgctgatcgacggttttaccgactacatcttcctgaccatcgatctggccgatccgcgtaagcccaaagtggccgggcgctggtggctgccggggatgcaccaggcgggcggtgaaacaccggactggccgcagggcaaacgctatgcgctgcatcacgccattattgccggggataccgcctacggcagctggcgcgacggcggcctgacgctgctggatgtcaaagaccgtacccagccgaggctgattagtcatcgcaactggagcccgccgttcggcggnnnnnnnnnngaacgcataccgcgctgccgctgccggatcgtgacctgctggtggtgctggatgaagcggtgctcgacaaccaggaggacggcgagaagctga

SEQ ID NO: 137000 - DNA, 432 bp, Enterobacter cloacae
gtggtgctggatgaagcggtgctcgacaaccaggaggacggcgagaagctgatctggctgtttgatatccgcgagccaaccaacccggtgagcatcgccaccttcccgccgccggacgaagcggattacgtggcgaaaggggcgcatttcggcccgcacaacctgcatgagaatcgtcccggcagctttgtcagctcaacgctgatttttgccacgtatcagaatgccggcgtgcgggcttacgatatttccaacccgtatcgtccgctggagaccggggcgctggtgccggctgcgcctgagagaatgatggatacccgtcccggccgcccgcgggtgatccagtcctgtgacgtgtttgtcgatgcgcaaggcattatctacagcaccgattacaacggcgggctatcggtgattgagtatctggggtga

SEQ ID NO: 137001 - DNA, 630 bp, Enterobacter cloacae
  misc_feature (38)..(47): n is a, c, g, or t
atgtcgccgccctgcgtgacgacgcccagcttaagctnnnnnnnnnngcttaagctggcggtggcggcgctgaagcaccgtttctttgcccatgcggaagcgctgctgcacggcgatatccacagcgggtcgatcttcgttgccgaaggcagcctgaaggccatcgacgccgagttcggctacttcggccccattggcttcgatatcggcaccgccatcggcaacctgctgcttaactactgcggcctgccgggccagctcggcattcgcgacgccgccgccgcgcgcgagcagcggctgaacgacatccaccagctgtggaccaccttcgccgagcgcttccaggcgctggcggcggagaaaacccgcgacgcggcgctggcttaccccggctacgcctccgcctttctgaaaaaggtgtgggccgacgcggtcggcttctgcggcagcgaactgatccgccgcagcgtcggactgtcgcacgtcgcggatatcgacactatccaggacgacgccatgcgtcatgagtgcctgcgccacgccattaccctgggcagagcgctgatcgtgctggccgagcgtatcgacagcgtcgacgagctgctggcgcgggtacgccagtacagctga

SEQ ID NO: 137002 - DNA, 642 bp, Enterobacter cloacae
  misc_feature (627)..(636): n is a, c, g, or t
atgtcgcaataccataccttcaccgcccacgatgccgtggcttacgcgcaacagttcgccggcatcgacaacccatctgagctggtcagcgcacaggaagtgggcgatggcaacctcaatctggtgtttaaagtgttcgatcgccagggcgtcagccgggcgatcgtcaaacaggctctgccctacgtgcgctgcgtcggcgaatcctggccgctgaccctcgaccgcgcccgtctggaggcgcaaactcttatcgcccactatcagcacagcccgcagcacacggtaaaaatccatcactttgatcccgagctggcggtgatggtgatggaagatctttccgaccaccgcatctggcgcggagagcttatcgctaacgtctactatccccaggcggcccgccagcttggcgactatctggcgcaggtgctgtttcacaccagcgatttctacctccatccccacgagaaaaaggcgcaggtggcgcagtttattaacccggcgatgtgcgagatcaccgaggatctgttctttaacgacccgtatcagatccacgagcgcaataactacccggcggagctggaggccgatgtcgccgccctgcgtgacgacgcccagcttaagctnnnnnnnnnngcttaa

SEQ ID NO: 137003 - DNA, 1029 bp, Enterobacter cloacae
atgcagatattacagaccaccagcctgcgggtgagtgaaaatcagctttttattctcgaccagcaggccttgccgcaggaaaaacgctggctggcggcggataacgttgcgctgctggtggaccatattcataccctgcgggtgcgcggcgcgccgctgattggcctgtccgccagcctgctgctggctctgctggcccagcgcggcctgaaccgggatgcactccagcaggcgctggagacgctgcgcgcggcgcggccgacggcggtcaacctgatgaataatctggatcgcatgaagcaggcgctggcccgggaggattacccgcaggcgctggaagcggaagccttgcgtctggtcgaagaagataaacagctgtgcgaccgcatcgctgaggcgggcagtgcgctggtgaagcccggcagtcgactgctgacccactgcaacaccggtggcctggcgaccgccggggtagggaccgccctcggcgttatcgcgctggcgcaccggcagggaaaagtgaccaacgtatgggttgatgaaacccggccgctgctgcagggcggtcgtttaaccgcctgggagctgggcgagctgggcgtgccctatcagctgatcgccgattcaatggccgccagcctgatggcgcaggggcaggtggatgcggtgtgggtcggcgccgaccgtatcgccgccaacggcgacgtggcgaataaaatcggcacctattctctggcggttttggcccattatcaccagatcccgttttacgtcgctgccccgcagaccaccctcgaccgccattgcccgaacggggcggcgatccccattgagcagcgcgcggcggcggaagtgaccggagtggcgggcagcttcggcgcggtacagtgggcgccgacgggggccgccgtttacaatccggcgttcgacgtcacgcctgctgggctgataagcggctgggtgctggacagcggggtggtcaccccggcgcaggtcgccgccggggcgtttgcgccggacaacggataa

SEQ ID NO: 137004 - DNA, 1269 bp, Enterobacter cloacae
atgatgcctgcaagacatcaggggctgttacgcctgtttatcgcctgcgcgctgccgctgctggcgctgcaatctgccgccgccgcggactggcagctggagaaagtggtcgagctcagccgccacggtattcgtccgccgacggccggcaaccgggaagccatcgaggccgccaccggccgaccgtggaccgagtggaccacccatgacggggagctcaccggccatggctatgccgccgtggtcaacaaagggcgtgcggaaggccagcattaccgccagctcggcctgctgcaggccggatgcccgacggcggagtcgatatacgtgcgcgccagcccgctgcagcggacgcgagcgaccgcccaggcgctggtggatggcgccttccccggctgcggcgtcgctatccattatgtcagcggggatgccgatcccctgtttcagaccgacaagttcgccgccacgcaaaccgaccccgcccgccagctggcggcggtgaaagagaaggccggggatctggcgcagcgtcggcaggcgctggcgccgaccatccagctattgaaacaggcggtttgtcaggccgataagccctgcccgatcttcgataccccgtggcaggtcgagcagagcaaaagtgggaagaccaccattagcggactgagcgtgatggccaatatggtggagacgctgcgtctcggctggagtgaaaacctgcctctcagccagctggcgtggggcaagatcacccaggccaggcagatcaccgccctgctgccgctgttaacggaaaactacgatctgagtaacgatgtgttgtataccgcgcaaaaacgcgggtcggtgctgctcaacgccatgctcgatggcgtcaaaccggaggcgaatccgaacgtacgctggctgctgctggtggcccatgacaccaacatcgccatggtacgtacgctgatgaactttagctggcagctgccgggctacagccggggaaatatcccgccgggcagtagcctggtgctggagcgctggcgcaacgcgaagagcggagaacgctatctgcgggtctatttccaggcgcaaggcctcgacgacctgcgtcgtctgcagacgccggacgcgcagcacccgatgctgcgtcaggagtggcgtcagccgggctgccgtcagaccgtcgtcggtacgctgtgtcccttccaggcggctattaccgccctcggtcagcgtatcgaccgatcatccgccccggcggtagccatggtcctgccgtag

SEQ ID NO: 137005 - DNA, 1359 bp, Enterobacter cloacae
atgtctggaattatcgcttttttccgggcgtcgccgccgaaagcgggcgccgcgtttgatgaacaccgttttcgccgggtgcgctggcaaacctttatcgccatgaccctggcctacgtcaccttttacgtctgccggttatccttcaccgtcgccaaaagcgcgctggtggagctggggatcaccccgacggagctcggcatgatcggctctaccctgttcttcagctacgccatcggcaaactggtcaatggttttatcgccgatcacgccaacgtggtgcgctatatgagcctcggtttattgctcagcgccgggatgaacctgatgatggggatgaccaccaacgccctgctgctggccatcttctgggggatcaacggttgggcgcagtcgatgggcgtcggcccctgcgcggtctcgctggcgcgctggtacggcgttaaggagcgcggcaccttctatggcatctggtcgacggcgcataatatcggcgaggcggtgacctatatggtgatcgccgcggtgatcgccgggtttggctggcatatgggctacctgtccaccgccgcgctcggcgccgccggcgtggtgctgctggtgctgttcatgcacgattcgccgcagagcagcggcttcccgtccatcaacgtcatccgcgatgaaccgcaggaggaggtcgaagcccgcggctcggtgtttaaaaaccagctgctggcgctgcgcaacccggcgctgtggaccctcgccctcgcctccgcctttatgtacatcgaccgctacgccgtcaactcctgggggatcttctttctcgagcaggataaagcttattccaccctggaggcgtccgggattatcggcgtcaacgctatcgccggcatcgccgggaccatcatcgccggcatgctctccgaccgctttttcccgcgcaaccgcagcgtgatggccggattcatcagcctgctgaacaccgccggcttcgccctgatgctctggtcgccgcacaattactacactgatattctggcgatgattatcttcggggccaccattggcgctctgacctgcttccttggcgggctgatcgccgtcgatatctcttcgcgcaaggccgccggggccgcgctcggcaccatcggcatcgccagctacgccggcgccggcctgggcgagtttctcaccgggatcattattgataaaacggctatccttgagaacggcaaaacgctgtatgatttcagcacattggcgctgttctgggtgggtaccggtctgggttccgcgctactctgttttaccactgccgccatcgtcgcccggcgccatgccgtcgaacggcagacctcgttctcctcataa

SEQ ID NO: 137006 - DNA, 810 bp, Enterobacter cloacae
atgcaatctcaggaatcagaagcgctacaggcccgctaccgtctggcctgcgagctggcgaaagcgggggctgaactggcgtttgaatactatcaacagcgcgaggcgttgaccgtcgaccataagggcgacgacctgcaggatgtggtcagcgtggccgataagcgggtggaggcctttgtcaaacagcgcattcagagcgcgtttccggaggatggttttctcggcgaagagagcggcgcccgcctgcccgacgcgcgagtgctgtgggtggtcgaccccatcgatggcaccagctgtttcctcaacggcctgcacacctggtgcctgtcgctggcgatcgtcgccgacggcgaaccggtcatcggcgtggtctacgaccccaaccatcgcgagctgtttcacgccctgcggggccatggcgcctggctcaacgacgctccgatccgtccgcaccccgcgacgacggtcaaagagggcgtgatgggcgtcggcacctcgcatcgcgtcaccccggcggactttctgccgtttctgcaggcgctgctcagcgacggcggcatgtttatccgcaacggctccggggcgttgatgagcgcctgggcggcggcgggccggttgattggctactacgagccgcacatgaacccgtgggacgccctgccggggctggtgctgatgcgcgaagcgggcggcgccagcaacgatttcctggcgcaggaggggatccagcgcggcaatccgctgctgctggccagccagacgctctacccgcagctgaaaaagatgatcccacaaccattacattaa

SEQ ID NO: 137007 - DNA, 1041 bp, Enterobacter cloacae
gtgaccgacgcccgcccgggcgtcggcctcctggaaaacagacggcgcgaaacgacgatgagcgataaaaaatggattaaggccgaggacgtggccagactggccggggtctcgcgctcggcggtctcccgcaccttcacccccggcgcctcggtgtcggagaagacccggcagaaggtgctgagcgccgcggaagccctgggctatcaggtgaatatcatcgcccggacgatgatcaccggcagcagtaattttatcggcatcgtcaccgccggtttcgacaacccgtttcgcagcaaactgctggcgccgctggtccatcagctggcgctcaatggctttatgccgctgctgatgaacgctgacgatccgcagcagctcgccccctcgcttaaacaactgctgagctatcacgtcgccggggtgatcatcacctccggcgcgccgccgctgtcgctggcggaggagtatctggcgcgcaagatccccgtcaccctgatcaaccgccatgcggacctcgccggctgcgaccgggtgtgcagcgataacgcccagggggcgaagctggtggcggatctgttcagtcgtcgaggctggcggcaggttggctttattggcgaaaatcgcgagaacttcagcacccgccagcgctatgaggcttttatcgcccggacgtcggatatggcggtgagcagccgcttctgcgacggcggcggctatcaggccggctaccaggctgccagagaattggttgctgaaaaccccgggatgcaggcgctgttttgcgccaccgatatgctggcgctgggcgcccaggacggcctgcgggacgccgccgccccgctgccggccatcgtcggctttgacgatatcccgcaggcggactggcagccctatcagctcaccaccgttcagcagaataccgccctgctggcccaccacgcggtggatttgttaatgacgcggatcgcccgcttcagcctgccctcgcgccatcgcgaagtgccggtgaaactaattattcgccatagcgccaaatga

SEQ ID NO: 137008 - DNA, 1239 bp, Enterobacter cloacae
atgaaaattattaacgctcgcctgcgccgccaggaggcgctgtttacccttgacctgcaggacgggataattcaccgcatcaccgcccaggccgcgatgcagactgccgacgccggggctatcgacgcccagggccggctggcgatcccgcccttcgtcgagccgcatatccatcttgacgccaccctcaccgcgggtgagccggagtggaaccgcagcggcaccctgtttgaaggcatcacccgctggagccagcgcaaagcgagtattaccccggaggacacccgccagcgggcgctgaaaaccatcggcatgctgcgcgatttcggcgtccagcacgtccgcacccatgtggatgtcaccgacccgtcgctggcggccctgcaggcgctgctggcggtgaaacaagaggccgccgatctcatcgatctgcagattgtcgcctttccgcaggagggaatcgaatcgtatcccaacggccgggagctgatgacgcgcgccatcgagatgggcgccgacgtggtgggcggcattccgcactatgagaacacccgcgacaaaggggtcagctcggtgatgtttttgatggacctcgcccagcgctacggccgcctggtggatgtccactgcgatgaaatcgacgatccgcagtcgcgtttcctcgaagtgctggcggaagaggcgcgggtgcgcggcatgggggcgcaggtcaccgccagccacacctgcgcgatgggctcttatgataacgcctactgctcaaagctgtttcgcctgctgaaagcctcgggcatcaacttcatctcctgcccgaccgaaagcattcatctgcagggccggtttgacagctggccgaaacggcgcggcgtcacccgggtggcggagctggatcgcgccggcatcaacgtctgctttgcccaggactcgattcaggatccgtggtatccgctggggaacggcaatatcctgcgcattctggatgccggactgcacatctgccatatgctcggctatgacgatctgcagcgctgtctcgactttgtcaccgacaacagcgcccgggcgctctgtctgggcgataactacggcctcgccgaaggccgcccggcgaacctgctgatcctcgatgcggaaaacgactacgaggccgtccgccgtcaggcacgggtgctgacctccattcgccacggcagggtgattttgcagcgtgaggtggagcacatccgctacccggtatag

SEQ ID NO: 137009 - DNA, 1236 bp, Enterobacter cloacae
atgagcctgacggtcagcgaactgctggcccttgagggactctccgccctgcgtctgcgggcgggaaagcaagggctgcagcgggccgtacgctggtactatgtggcggaaaatgaacatatcgccgagtggatcatgggcggcgagctggtgtttatcaccggcatcaaccatccccgggatgaagccaacctgatccagttgctgatggagggcaaacagcgcggcatcgccgggatggtgatcctcaccggcgaggcctatatccacgccattcccaccacgctgatcgcccttgccgacgagctgggcatgccgctgatcgagcagccctacctgctgaagatggtgattgtcaccgagcgcatcggcaccgcgctggtccgcagcgaaaacgtcctgcagtcgcagcgcgacattctgatgcagctggtcaccggcgactatccggacctgcagatgctccatcagcgcgccctccaccagcagctcgattttacccgtcctctgcggctggcggcgctgcgtctggaggggctgtcccgcctgtttcgccagttcccgcccgagcaggccgaagcctggctgctgcaggcccaccgcagcgtgcgtcagcagctgcagcagcagctcaaccagcagggcaattcctttccgctgctggagcgcagcaacatgttccttttcctgctgccggatgaggagggggaagactttcagcagaaaaaatggttacagcagtggctgcaggcgctggcggacggagaggagagtttatcgctgctctgcggcctctccgcgccggtcaggcagctgcagggttacccgcgggcgctgtcgcaggcgcgccaggcgctggatctgtgcgataccctgcggccaacccagcgcatcagcgactatcagcagctggggtttatcaaactgctgtccgcggtcagcgacccggcgctgctcaacgattttatgcacgacaccctcggctgcctgatcgagccgggccgtaaagcgccgtggctgctgctggagaccctcgagacgctgctgcaggagaacggcaacgtggtgcgggccgccgaccggctgggtctccatcgcaacacgttgcatcagcgcatccagcgcattgaaaaactgaccggctacccggtcagccaccctcagtttcatctcaacgcctcggtcgcgctggtgatctggcgtttatcgcaaaaccctttacaggacccaccatga

SEQ ID NO: 137010 - DNA, 1263 bp, Enterobacter cloacae
atgtcaaacagcaatgattttcccctcgtcgaagcgcccgccgccggacgcaaaggcgtattttccatcgccatggtgttgttcagctttacctttttcaccggcacgatgttcgccggcggtaaactcggcgtctccttttccatcgtcaatctgctgtggatagccgtcatcggcaacgccttgctggccctctatgccgcgtcgctgggctggatcgccgcgcgcagcggcctgaatacggtgctgatgggccgcttctgcttcggggagattggcagcaagctggccgattttattcttggctttgccgagctgggctggtacgcctggggcaccgccacggtcgctatctcgttggtgaagatcctcgctctgcccgaggcgctgacccagccgttgatggtgctgtttggtattctgttctgcgtcaccgcgctggtgggctacaaggggctggacgcgctgtcgcgcctgtcggtgccattgatgtttgtgctgctgatggtctccatgtatctggcgctgcaccacgccggcggctggcaggcgatgacccgtattgcgccgagcgacaccatgacctggtcggcggccatcaccatggtcttcggcactttcgccagcggcgccacccaggcgacaaactggacccggctggccaactccagccggaccgccattctcgccagcatgggcagcttcctcatcggcaacgggctgatgatcgtcgccggcgcctggtgcgctatcgtctatcaacaggccgatatcgttgaagtgctgatcctgcaggggctgtcggtggccgcggtgatcatgctctgtctcaacctgctgaccatccagggccccaccatctataacgtctccgccgccgcctgccatctgctgcgcagcgaacgtcgccggacgctgaccctcgccgccgccggggtgggcattgtgctggccattggcgggatgtacgaaatgctgatccccttcctcgtgctgctgggcagtattattccgcccatcggcggggggatcctcgccgactactggttcgcccgcggcgggcgctatcccctgctgcagaacgcccgcctgccgcgttttaactggctgggactcggcgcctacgccgccggcgcggtggtggcctatctttcgccgtggatcgcgccgctggtggggatctccgtctccgcgctggtctatatcgccctgactctgctaagcaaacgccagcctgccgccgtcgcggagcaggagccatga

SEQ ID NO: 137011 - DNA, 609 bp, Enterobacter cloacae
atgtggcaagaaagactcgcgcaactggtcaccacctgtcattggatcggcgcgaaaggctgggcgccggcgaccggcggcaatatgtcggtgcgtcaggatgatacctggtgctggctaagcgagtcgggccgcgacaaaggcagcctgacaaccgaggattttctgcaggttgagatcgccaccaaccaggcgccttccggacggaagccgtcggccgagaccggtctgcacaccctggtgtatcgcctgttcccggaagccaacgtggtgctgcatgtgcataccgtcaacgccaccgtgctgtcgcgcatcgaaaaaagcgacacgctggcgctgcaggggtatgaaatgcagaaaacccttagcgggcagcatagccatctcgataccgttccgatcgccatcttcgataatgaccaggatattgacgccctggcggcgcggattgccgattatgcgcaaacccgcccgctgcgctacggctttctgctgcgcggccacggcctgacctgctgggggaaagatattcaggaggcccgccgtcaactggaggggctggagttcctgttcgagtgcgagctgatgcgccgccgctacgagccctga

SEQ ID NO: 137012 - DNA, 1497 bp, Enterobacter cloacae
atggatttttatcttggtatcgatattggcacctcgcgggtgaaagcggtgctgtttgatcagcatttcaccgcctgcgccagcgccgcggaaaatacctcaccccgcctgtcggccaatggctacgcggaacaggatatgacccagctgtggcattcggtgctggctattctgcgccagattgcccgccattcggcgctacaggcggggcggctgcgggctatcggcctcgccgggcaaggggagggggtctggctcagcgatgagcagggcgaaccggtgggcccggggatcctgtggagcgatacccgcagccacgagctaatgagcgacctgctgcgccgacccggcttcgaccgccgctatttcgccgataccggcacccacctgcagccctgcaataccagcctgcagctgtactggctgaaacagtatcagccggcgcggctggcggccgcgcgctatctgtttttcgccaaggactggatccgctttcgcctgaccggcgtggcggcgctggagctgacggacgccagcagctcgttactcaatcagcagaccggcagctggtcctcggtggtgatgaacgagatggggctgaacgaactgctgccgctgtttcccccgctgctggccccggatgccccggccggcacgctgagcgacgcggtggcggcgctgaccgggctgcccgccgcgacgccggtggccgccggggcgctggatgtctgtagcgccgcgctgggctgcggcgcggtcaacgaaggggatatctacacgatcctcggcactacctgctgcaccgggatcgtctgccgcggcccgcagacggtgaacgaggcgacgcgctttgtcacgcataccgaagccggacaggtgatctccctgtttccgatgcaggccggtacgccaaacattgactggctgcagcagcatatttcgctggacgccgatctggggcgcctggagcaggcgatcgcggcggtggagccaggcagcggcggcgtcttctggcagccgtacctcaatggcgaacgtgcgccgttttacagcccggacgcacgggccggctttttcggcattagcccgcacaccacccgcgccgaactgcagcgcgcggtgtttgaaggcctggccttcgccattgtcgatgcgctgcagggttatccgcagggcggcgagctgtatctgaccggcggcggcgcagcctcggcgacctggctgcagattatcgccgactgtaccggacgcacggtggtctccagcgcctttaacgaactgagcgcgcgcggcgcggcgatcctggcggcccgtagcgtcgcggcgctggccgagacgcctccgctggcgcagacccgctatcagccgcgccctcaggcgcatgcccgctacgcggcgctgtatcccgtttaccgcctgctgcgcgagcagatgctgccggtatggcaggccagacaggccgcccttcaacctttttctcaggacctacaaccatga

SEQ ID NO: 137013 - DNA, 1029 bp, Enterobacter cloacae
atgaaaatcgtttttaccgccgagcatgctggcgaccttagcgccttccaccagctgggcgagctgctggtggaggggtgggcgctgggcaaaccgaaactcagcgccggtcagctgattgagctggcccacgacgccgaggtgctggtgaccagctatgatgaggtgacggacgcggtgatggccgcctgtccacgcctgcaggtaatcgcctgcacccgcgcgaatccggtgaatattgatacccaggccgcccaggcgcgcggcatccgggtactctacaccccggggcgcaatgccgatgccgccgcggagctgacgcttggcctgatgctcagcctggcgcgccatattccgcaatcccatgcggcgctgaagcggggggaattcacgcaggctgacaatgccgccgccgccacccagcagggtctgcggcgggatgtggtctgggacgtgagcccggaaagtccctatgaagtgtttaaaggcactgaactgcgcaataaaacgctggggctggtggggtatggcaacattggccgccgagtggcgcgtatcgcccgggcgttcggcatggcggtgttggtggtggatccgttcgtcgccgcagaggatatcaatgagccagggctacagaaaacgaccctggaggcgctgttccgcgaggcggatatcgtcagcctgcacctgagcagcgggccgcacagcgacgggctggtgaatgccgcgctgttaaacagcatgaagcccggcgcgctgctgatcaatacctctcgcgcggcggtggtcgacgaggcagcgctgattgatgccctgcgccacggccctctgggcggcgcggcgctggatgtctatcaccgcgaaccgctgtggcgcgatcacccttttgtcatcgagttcgataacgtgattatcacgccgcatatcgccggtgccacccgggagagtatcgccaaacacacggcgatgattgccgccgatcttcagcgctatgtcgccggggagccgctgctgtaccagtggcgttaa

SEQ ID NO: 137014 - DNA, 519 bp, Enterobacter cloacae
  misc_feature (491)..(500): n is a, c, g, or t
atggaccagggacagagcgcgcggctgttgcaggcggccaaagcacgcggagtcaccaccagctttgaccttatcgccccgaatgaagagaccctcgaactactgcggcccctgttgccgtcggtggattatttcatgccttcgctggaggaagccgcctttctctccggagagacgcagccggaggccatcggccgcttcttcctggcgctcggcgtgggcacctgcattctgaaagacggcgagaacggctcctggcttatcggccgcgatggcgggccgcagcatattgcgccgtggccggtcgaggcggtggataccaccggctgcggcgacagctactgcggcgggtttattgccgcactggcgcgcggactcagcgtgaaagcagcgtgtgacgtcgcctcggcggtggccgcgctggtggcgaccgggatgggatcggatgccggggtagtggactgggaacagacccaggcttttatggcggnnnnnnnnnnggcggcccatcgcccctga

SEQ ID NO: 137015 - DNA, 285 bp, Enterobacter cloacae
  misc_feature (239)..(248): n is a, c, g, or t
atggcaacctttgacgccgtatttgtcggcctgactattctggatatcgccgggcgcccggtggtggcgatcccgccgcgcggcggcgtcgcctttattgagcaaattcgtctcaaccccgccggcaccgccgccggggctaatatcaacgccgcgaagctcgggatccgcaccgcagcggtggcctgcctgggcgaagatgaaaaggccgactttatcctcgccagctatgcccggcnnnnnnnnnnggcatcgactgctcgcttatccagcgcaccgcgctga

SEQ ID NO: 137016 - DNA, 762 bp, Enterobacter cloacae
gtgggcgtcgcgctcgatttcggcgccgccttcgccctcgtcgccctgaaaacctggcatctgccgtggcaggccgcggtgggctgcgctctgctcggcggcgtgctgattggcctgctcaatgcctttctgatcctcatctgccggatccgccccttcctcgccacgctcggcacctggtttatcgccagcagcgccgagcgcatctataccgacggcggcggcgcgatagcctatcggcggatggctccggagtatcacgacctggcggtgggcaaccttggtgggatccccacgccggtagcgatcgtgctggcgctgtggctggcggcctggctggttaccgagcgcaccctgtggggcaaatatgtccgcgccatcggccagaacagcgaagcggcgcgtatcgccgggatccgcgatcgcctgaccatgctcggcgtgctggtgaccgcctcggcgctctgcgccgtcggcggggtgatcctctccgccaacctgcggcagtttaccccgctggccgggcagtcttacctgatggacgccattgcggcagtatttatcggcactgcctttaaccgtctgggccgggtcagcatcctcggcaccctcggcggcgtgctgttccttgccattattgataacggcctgaacctgatggggctcaattatctggtgaaggacgcgctggtcggcgtgattctggtggtggccctcgccctatccttctggcaggcgcgcctgcgccaaacgcatcgctaa

SEQ ID NO: 137017 - DNA, 366 bp, Enterobacter cloacae
ttgctggataaagagatctacgccctaaagcgctggctggccattcgcagcagctggccgcaggccgccagcgaatggctgtttctctcccgcaaaggtaatcccctttcccgccaacagttttatcagattatcgcgtcctcagggggactggcggggctgccactggagatccacccgcacatgctgcggcactcctgtggctttgcgttggcgaatatggggatcgatacccgcttgattcaggattatctcgggcatcgcaatatccgccacaccgtctggtataccgccagcaatgcgggacgcttctatggcatctgggacaatccccgtgacaaacagcgatcgtcgctgatccaatag

SEQ ID NO: 137018 - DNA, 609 bp, Enterobacter cloacae
gtgaaccgacgtcgttttctaaccgccaaagaagttcaggccatgatgcaggctgctcgtcagggccctaccggcgaacgggactactgcctcattctgctggcctttcgccatggcatgcgcattagcgaactgctggatctgcattatcacgatctggatctccatgaagggcgggttaatgtgcggcgattaaagaatggtttttcgacgattcatccactgcgttttgatgagcgcgaggcgattgagcgctggagcctggtccgtgccggctggaaagcggcggacaaaacggacgcactgtttatctcccgccgcggcaccgcgctctcccgccagcaggcgtatcgtattattcgctccgccggggaaaatgcgggtaccgtcacgcacactcacccccatatgctgcgtcacgcctgcggctatgaactggctgaaagagggacagatacgcgtttgatacaggattatctaggacatcgcaatattcgtcatacagtacgttacaccgccagtaatgcggcacgtttcgctggcatctgggaaagaaataatcttttagaggaaaaagaccagaagaagaaaaatgaattaacagattga

SEQ ID NO: 137019 - DNA, 549 bp, Enterobacter cloacae
atgaaaatcaaaacactggcaatgattgttgtgtcagccctgtcactgagctccacggcagctctggccgataccaccacggtcaacggcgggaccgtgcattttaaaggagaagtcgttaatgcggcctgtgcggtggatgccggctctatcgatcaaaccgttcagttaggccaggtgcgttccgcgaaactggccacggcggggagcaccagttcggccgtcggtttcaacatccagctggatgattgcgacactacggtagccaccaaagcgtccgtcgccttcgccggtacggccatcgacagcagcaataccaccgttctggccctgcaaaactctgccgccggcagcgcaaccaacgtcggcgtgcagatcctcgacaataccggtacgccactggcactggacggcgccaccttcagtgctgcgaccacgctgaatgacggccccaacatcatcccgttccaggcacgttactacgcgaccggcgcagcgacggctggtatagcgaacgcggatgccacgttcaaagtgcagtacgagtaa

SEQ ID NO: 137020 - DNA, 537 bp, Enterobacter cloacae
atgcagggaatgaaatctggtctgctgctgctactgcctccgctggcgctggccggtaatcattggaacgtcacgctgccggggggcagcatgcgttttcagggcctgataatggcgagctcctgccgcgtcgaagccggcgatcggcagatgacggtcaatctggggcagatcagcagtaatcgatttcatgccgtcggcgaagacagcaacccaatccctttcgcgattcatttacaggattgcagtacggcggtcagccagcatgtgggggtgacctttcacggcgtggctgatggaaaaaaccccgacgtgctgtcggtgggtgaaggtccggggatcgccagtgggatcggtattgcgctattcgacagccagggccagcagctcccgctcaatcgtccagcggatcgctggatatcactctaccgcggaccgacgacgctaaatttcgtcgccaaatatcgggcgaccggacgccaggtcaccggcggtgcagccaatgcccaggcctggttctcattgacctatcagtaa

SEQ ID NO: 137021 - DNA, 705 bp, Enterobacter cloacae
gtgagaaaaacggcaacgatggcgcatggcttactggcaggatgtgtgcttttcgccgccagtatctttagcgccagcgcgcaggcgggcgttgcgcttggcgcgacccgggttatctacccggcgggacagaagcaggtccagctcgcggtgaccaataatgatgacaacagtacctggcttattcagtcatgggtggaaaatgccgatggtcagcgagacggccggtttgtcatcactcctccgctgtttgccatgcagggtaaaaaagagaacaccctgcgcattatcgacgccaccaataaccagctgccgcaggatcgggaaagtctgttctggatgaacgtgaaggcgatcccttcgatggataaatcaaagctcagcgacaataccctgcagctggcgattatcagccgcatcaagctctactaccgtccgggaaaactggccctgcctccggatcaagcggcggaaaagctgacctttagccgtagcggatcgtcgctgacgctgacgaaccccaccccctattacctgacggtgaccgaactgaacgccgggacacgcattctggagaacgccctcgtaccgccgatgggcaaaaccagcgtcaagctacccgcggatgccgggaacaccatcacctatcgcacgattaatgattacggcgcgctgacgccgaaaatgaatggcgtgctgcgctaa

SEQ ID NO: 137022 - DNA, 1461 bp, Enterobacter cloacae
  misc_feature (1309)..(1318): n is a, c, g, or t
atgtcacatcggaaatatggactggatcatttaggttgccgaactgcccggcgcctggtatctccggcgctggcgctgtggctctgctcacagccgtttgccgcgcgggcggacctctattttaacccccgctttttagctgacgatccggcggcggtggctgacctgtcgggatttgaaaaaggccaggaggttccgccaggcacctatcgcgtcgatatttatctcaacaatggttttatgaccacccgggacgtcactttccaggccgatgcccagggtaacggtctgtcaccctgcctgacgcgcggccagctggcgagcatgggtgtggataccggtcgggtgccgggcatggcgacgctggacagcacggcctgcgtgccgctgaccacgcttatcagcgaagctaccacgcgcttcgacgtcgggcaacaacgcctgtacctcaccgtcccccaggcatttatgggtaaccatgcgcgcggctatattccgccggagctgtgggataacggtatcaccgccgggctgattaactataacttcacgggcaataacgcccataacaccacaggtggcagcagccgttacgcctatctgaatctacagagcggcctgaacattggcgcctggcgtctgcgcgataacagcacctggagctacagcagcggcggtagcacctcatccaacgagaatcgctggcagcacgttaacagctggcttgagcgggacatcacgcctctgcgttcgcgactcaccctaggggacagctacaccaacggcgatgtcttcgacgggatcaacttcctcggcgcccagctggcctccgacgacaatatgctaccggacagccagaaaggctttgcgccggtgatccacgggatcgcccgcggcacggcgcaggtgtcaatcaggcaaaacggctacgaaatctaccagagcacagtgccgccgggaccatttaccatcgacgatctctacgccgcgggcaatggcggcgatctgcaggtcacgatcaaagaagcggatggctcccgccaggtcttcagcgtgccctggtcaacggtgccggttctccagcgtgaaggccatacccgcttcgccctcaccgccggggagtaccgcagcggcaacagtcagcaggaaacgcccgattttttccagggcacggccatgcatggcctgccggcaggctggacgctctacggcggcacccagctggcagaccgctatcgcgcctttaaccttggggtggggaaaaacatgggctatttcggcgccctgtcgctggatatcactcaggccnnnnnnnnnncgacagcgaacatcaggggcagtcggtgcgttttctctataacaaatccctggatgagaccggcaccaacctgcagctggtgggctaccgctactctacccgcggctattataactttgccgataccacttaccgccggatga

SEQ ID NO: 137023 - DNA, 1149 bp, Enterobacter cloacae
atgagcggctacagtgtggaaacccaggacggcgttatccaggtaaaaccgaaatttaccgactactacaatctggcttacagcaagcgcggcaaggtgcagctgagcgtgactcagcagttggggcgcaccgccaccctctatctcagcggtagccaccagacctactggggcaccgacgatgccgatgagcaactgcaggccggcctcaacgccgccgtggacgatatcaactggtcgctaagctacagcctgacaaaaaacgcctggcagcaggggcgcgatcaaatgctggcgatcaatatcaatatccccttcagccactggctgcgttccgacagccgctcggtctggcggcacgccagcgccagctacagcctgtcgcacgatctcaatggccgcatgaccaatctggcgggcctgtacggcaccctgctggaagacaacaacctcagctatagcgtgcagaccggctatgccggcggcggcaacggcgacaacgggagcacaggctacaccaccctcaactaccgcggcggctacggcaacgccaacgtcggctacagccgcagcgatggctttaaacagctctactacggggtcagcggcggcgtgctggcgcacgccaacggcatcaccctgagccaaccgttaaacgataccgtggtgctggtgaaagcccccggcgccggcggcgtgaaagtggaaaaccagaccggggtacgcaccgactggcgcgggtatgccgtcctgccttatgccactgagtatcgcgaaaaccggatcgcgctggataccaacaccctggcggacaatgtcgaccttgacgatgcggtggtcagcgtggtgcccacccatggggcgattgtccgcgccaactttaacgcccaggtggggatgaagatcctgatgacgctgacccatagcggcaaaccggtgccgtttggcgccctcgccaccggcgacagcaaccagagcggcagcatcgtcgcggacaacggccaggtctacctgagcgggatgccgctggcgggcaaagtgcgggtgaaatggggcgatggcccggacgctcagtgcgtggccgattaccgtctgccgccggagagccagcagcaggcgctcagtcagctttcggtcgcgtgccgctaa

SEQ ID NO: 137024 - DNA, 528 bp, Enterobacter cloacae
atgagaacactgcagtatctgctgggcgccctgttcaccctgggcgcaccggctgcgcttgccgccgatagcacgatcgccatcagcggctatgtccgcgataacgcctgcgcggtagccggcgaatcgaaggattttactgtcgatttacaggataacgccgcgaagcagttttatgccgttggggcgacgacgccgccggtgccgttccgcatcgtgctgtcgccctgcggcacttccgtcaccgcggtgaaggtcggtttcaccggcgtggcggacagcatcaacaccagcctgttaaaactcgatgccggggcctcggcggcggcaggaatgggggtggaaattctcgatcagcagcagtcccggctgccgatcaatgcgccgtcatccaccatgacctggaccacgctgaccccgggccagaccaatattctcaacttttacgcccggctgatggccactcaggtgcccgtcaccgccgggcatgtcaatgcgacagcgacattcaccctggaatttcagtaa

SEQ ID NO: 137025 - DNA, 501 bp, Enterobacter cloacae
atgaaatggactcatgtgggctggctgctggccggcctgttaaccgcgagcgcttccctgcgggcggccgacgtcactctcaccgtcaacggcaaggtggtggccagaccctgcacggtttccaccgtcaatgccaccgtcgagctgggcgatctctatacctttagcctgatcggtgcgggctcggcatcggcctggcacagcgtggcgctggatctgagcaactgccccgtgggtacttcacgggtgaaagccaccttcagcggaacggcggacagcaccggctattacaaaaaccagggaacggcgggcaatattcagctcgaactgcagaacgaggacggcaccacgctgaacaatggcagcagccagtcggtacaggtggatgaggccagccagtccgctcgcttcccgctgcaggtcagggcgctgtccgtcaacggcggcgccacgcaaggcaccattcaggcggtgattaacgtcacctatacctacgcctga

SEQ ID NO: 137026 - DNA, 909 bp, Enterobacter cloacae
atgatgaaaaaaataatccccctgttcaccaccctgctgctgctgggctggtcgatgaacgcctggtcctttgcctgcaaaacggccaccggggcgacgattcccatcggcggcgggtcagccaacgtctacgttaacctgaccccggcggtgaacgtcgggcaaaacctggtggtcgacctctctacgcagattttttgccataacgactatccggaaacgatcaccgactacgtgaccctgcagcgcggatccgcctatggcggtgtgctgtcgagtttttcaggcaccgtgaaatataacggcacctcttacccgttcccgaccaccacggaaaccgcgcgggtgatttatgattcacggaccgataaaccctggccggccgtcctgtatctgacgccggtgagcactgccggtggagtggccatcaccgcaggatcgttaatcgcggtgctgatcctgcatcagaccaacaactacaatagcgactccttccagttcatctggaacatctacgccaataacgacgtggtggtccccaccggcggctgcgacgtctccgcccgcgatgtcaccgtcaccctccccgactacccgggctcgatggccgtgccgctcaccgtccactgcgcgcaaagccagcagctggggtattacctctccggcaccaccgcggacagcgccaacgcgatcttcaccaataccgcctccgcctcgccggcgcaggggataggcgttcagctgacgcgcaacggcagcgccgtcccggcgaacagcacggtctcgctgggcaccgtcggcacctcgccggtcaatctcggcctgacggccacctatgcccggaccacaggccaggttaccgccggcaacgtgcagtcgatcatcggcatcacctttgtctatcaatga

SEQ ID NO: 137027 - DNA, 1413 bp, Enterobacter cloacae
atgatgaccgattatatcctctcgccctgctcgctggccgcccgcgggttgagccagctgatgctgaacgccgcgaggcggcccgttgagctgccggtcgagggcgtgtccctgcgcgagctggccgccgtgaagcggatcgtggtgtatctccctgacgatcccctgtggatgctcaccacgctgcgccaggcggcaaggctactcgacgaggccttgccgccgttaccgatgttgattctgagccgcagcccggccatctggctgtggcaaacgctgctctatcaggtgagtcatccggatcgtctgcgcaacgtccatactgcccccgccgatctgtcctgcgcggagctggcccatcggctggagaatgcgccgcggcttgagcggcttgccagcgaagccgccctgatccacggaaaacgggtcgccgggttgacccacgccgagctcaaggtgatcctcgccctactgcaagggcagacgataggcgagcaggcccaacgtctcggattgagccagaaaacgctctacacccagcggctggctggggtgaaaaagctggtggaatgtcatccgcatctggccccccgctttccgcgcacgctgctgccgcgctcatccgccagctcactgtcggcgtttgaacaggaatgggtacaagcgatccacgatcgccaggtcttcccggtttttcaacctatcgtcgatagtcgctcacagctacagggggtggagatcctgatccgctggcgccaccgcggccaggtacttcacccccagacctttctgccgcacttccgcgccgactacacctggctgctgcttacggcctttgttctgcaggaggccgtgcagaatattaatgagtatccaggcaccttctatttttcggtcaacataccctcctcactcgccgacagtgacagcctgctgcggatggtggaagccgctcgccagcagcttcggcagccagagggcgtggcaaggctggtgctggaatatgctgaaactatcgattttcgccatcagagccgctccgccgcccacgtggcgcagctgcaacgtgctggcgtgcgcgtgatgctggacgactgcttttctcaggggagcgttatctttccggcgcgtcgactgcacttcaatgcgtataaactggatatgagcatcgtcaatgacgcccagcacgatccaaaggcgcttgcgctaataaaaagcctggcctactactgccagttgagcggcagccgctgtgtggcggaaggtgtggattcactggcgaaatttacgcagttaaaatcgctggggattgatcgcttccagggctatctgttttcaccaccgatgcggcgcgaacatctcccggatctgatccgccgcttttcccaccagcgcgatccggcgaaacgttga

SEQ ID NO: 137028 - DNA, 273 bp, Enterobacter cloacae
atggaaatactggaagggcataacaaattttatgttaacgacgcgcagggaaaccaggtggcggagattgtttttgttcccaccggcgaacacctcagcattatcgaacataccgatgttgatcccagcctgaaaggccagggcgtggggaaacagctggtggcgaaggtagtggaaaaaatgcgccaggagcagcggaagattatccctctctgcccgtttgccaaacatgaattcgataacacccgcgaatacgacgatattcgcgcatga

SEQ ID NO: 137029 - DNA, 231 bp, Enterobacter cloacae
atggataaggaattactggaagccggctaccgggcctacaccggggagaaaatcgacgtctactttaatacggcgatctgtcagcattccgggaactgcgtgcgcggcagcgcgaagctcttcaacctgaagcgtaagccgtggattatcccggatgaagtggatgtcgcgacggtggtaaacgtgattgatacctgcccgagcggcgctctgcaatatcgtcataaataa

SEQ ID NO: 137030 - DNA, 273 bp, Enterobacter cloacae
ttgaatcatattgccaccatcgcccgcccggcgcggttactgctcgtcttgccgctttccggctgctcactttcgccagagatcccggtattgggcgctgcttttcccggctggtttttctgcttactgggcggtgcgtttttactgatcccctgccatatcctgattacccgtaaaggctggcagccgcgcttttctcccctggtcttcagctacgtcgcgctgatgttcctgttcgccacgttgctgtggtttctgttttttgttcactga

SEQ ID NO: 137031 - DNA, 1026 bp, Enterobacter cloacae
atgacaacttcccgcactcccctgttacgcaaaaagtggcctctgctggcgctggtccttgccgccatcctggcgctgatcctcgttatctggcagttgcaaacctcgccggagaccaatgacgcctatgtctatgccgataccatcgatgtagtgcccgaggtcagcggacgcatcgtggagatgcccattcgcgataaccagcgggtgagaaaaggcgatctgttgttccgcatcgacccccgcccctatcaggcaatgctcgatgacgcgaaagcccggctgacgaccctcgacgcgcagatcatgctgacccagcgcaccatcaaagcgcaagagtataacgcccagtcggtggcggccgccgtcgagcgcgccagagcgctggttaagcagaccacctccacgcgtatccgccttgagccgctggtgccgcaggggttcgcttcccaggaagatctcgatcaggcgcgcaccgctgagaaagcggcgcgggcggagctggaggccacgctgctgcaggccaaacaggcctcggcggccgtgaccggcgtggatgccatggtggcgcaacgcgccggggtcctggcgcaaatcgccctcgctgaactgcatctggaatttaccgaagtgcgcgcgccgttcaacggcgtggtggtggcgctgaaaaccaccgtcggccagtacgcctcggcgctgaagccggtcttcaccctgctggatgacgaccgctggtatgtgatcgcgaacttccgcgaaaccgacctgaacaacgtgcgccccggcgtggcggcgcggatcaccgtgatgaccaaccacaaccggacctttaacggggtggtggattcggtcggctccggggtcctgcccgaaggtgggagcgtcatcgaagggctgccgctgatccagaaaagcattaactgggtccacgtctcgcagcgcttcccggtgaaaatcgccgtcagcgatcccgacccggaactgttccgcatgggcgcctcggccagcgccgtgctgcagccgtag

SEQ ID NO: 137032 - DNA, 1890 bp, Enterobacter cloacae
atgtttcctctcgcccattttttacgccaggagctgcgcgacgcgccgggacgcgccagctacacgctgcgcctgacgctaagctgcgcggtgctcatcaccctgtttatgaccctgcagatccctttcctggccgttgcgctgatcgtcgtgttctacgtcagccagcctaacgtgttgatgattaagctggtcagcgtggtcttttttgtcaccgtcaccgtggcgctcggcggcgtgctgctgatcatcaagtggacctatgactacccgctgatccgcctggcggcctccgtggcgctctttttctgcgccctctatctgatgcgggtgctgggcaagctgggactggcctttttcgtggtggcgctggcggtgatttacgctcagaccttcccgtcgatgaccagccagagcgagatcctggtgcggctgctgctttggttgtgggtggcgatcgtcactatccgcctcgtctgcttgccgcgcctggccgggatgctgcacgaggtcgcccggcggctggcggccccggacgctgaagcgccaccgaccttcggcgagaccgccgcgcagttcaatcagctgcagtcgctgttcgcccaggccagccgggcgacaccggagatcgccgccgatcccctggcctggcgctcgcggctggccgccactttgcgctgctaccagctggcggccctgctgcaagcagacgaggcggatagtgacgatcgccagcagctgtcgcaggcggtacttcagctgaagaacgcccttcgcgaggggccgtttgacggcgctattcctcccctgacgctctgcggtcgcggcgtcaatcgcgctgttctgcaggagatggctaccactctgcagcggctggcgcagggtgagccggttgccctgccgcagggtgaggtggagaaggcgcccctactggcgccggacgcctggcgcaacccggcatatctccattttgcgctcaagaccctgctggcgaccctaatctgctatgtcttctataccgctgccgactggcagggtctacataccattatgctgagctgcgtgatcgtcgcccagcccgggctgggcgccacgatgcaaaagacatggctgcgcatcggcggggcgctgctcgcctccctgctggcgctgctgttaatcgtctttgtccagccctggaccgattcgctgacgggcctgctggcgatgtccctgccggtgctggcgctggcggcgtggattgccgccggctcggagcgtatcgcctacgccgggatccagattggtttcacctttgcgctggcctttctcagctggtttgctccgctgacgaacctcaccgagctgcgggatcgggtgctgggcatcctgctcggggtgctggtctcctccattgttcatttgtatctctggccggacagcgaagcgccgcagctgaaaacccgccttgcggcactttatcgccggctggcggactgcctcgccgccccgaaggaggcggttccgctggctcccctgcttgtcgccttcaccgacagcgaagcgctgatccaccgggttcgcgccgaaccgctgggcacgtatgctcacccctggccccaggcgaaaggctggccgatgcgcgccaccctcgcccaggccgaggagatcgcccgcctcagcgaaggctaccgactcaacgccgcgccgggagacccgaccctgacccgctgcgccgaacagctgcggcgctacgctgaacgtatcgaacaggaggcgacggcgcctggcgagcagctgaccgccgacctgactaacccctttggcccggcgctggccgccgcgctggccgccctgcccgactgggggccgacaccgatagcgactgagcaacaggctaaaacgtcatga

SEQ ID NO: 137033 - DNA, 1449 bp, Enterobacter cloacae
atgatgatccttcctttctccgcgcgcctgcgcggcactctttttaccctgacgctgacgctgctcagcggctgcgcgctgatccaggatgagcctgcccaggtcgccatcgtcaatccgcagcaggcccagctggcgcaggtgatccacctggcgaacagcgactggccggccgcccgctggtgggaggcctatgatgatcctcagctcaatatgctgatcaaccgggcgctgcagaactcgccgaccatgcaggccgcccggctgcgcatctcccagtcgcagtccacggtggaactcgcccggtcggcgatgggcctgcaggccaccgccgtcgcggcgcaaaaccgcctgcggatcaccgacaaatcctttagctggccctactcatactccctgccggtggataaaaacggcccctggtatacgctgaataccgttggcgtcggggcgcagctgaatatcgatctctggggggccgatcgcgcacgggtcgccgccgctattggcgagaaaaacgcccggctggcggagaccgccggcattgagctcgacatcgccagcagcgtggcgcagctctatttcgccatgcaggcgacgttccagaaaatcgcgctgctgcaggagctggagggcattgcccgattctcggtggaagcccacgagcaccggacccggcgcggcctggaagacagtgtggatgtggccaacgcccaggccgaacagctcgccgctcgccagcagatcattagcgccgaggggatgctgacccagtatcgtgaaaccctgcgggcgctgatcggcgccgatgcgcagagcatgccggccatccatccggtggcgctgccggcgctccaggagacgctgccgccgtcgctctctttcgagctgctggcccgccgtccggacctgcaggcgctgcgcggctacgtcaccgcctccctgagccaggtcgatgcggcgaaagcggccttctacccccattttgatatcaaagcgttctggggctataacgccctgagcgtcggggatctgtttaagtcctctttccagcagatcaacctgctgcccgggctgtatctgccgatcttcgacggcggtcgtctgaacgctaatctgcagtcggtacgcaccgccagcaacatcctgatcaaacagtacaaccaggcggtgctggatgcggttcgcgatgtcgccatcagctccagccagcttaacgacctgaatcagcagcgcgcgctgcagcagctaaaagtcaccgcggcgcagaccaccaccgatagcgctcgcgcccattatcagcgcggcctcctcagccgctacgccgccgaagaagcccgccgggcggtcctcgcccagcagctgttgctgctggacattgaggcccagcggctaagcaccgacattaccctgatcaaagccctgggcggcggctatcgagggcagtaa

SEQ ID NO: 137034 - DNA, 300 bp, Enterobacter cloacae
atgccagcagtcattgataaagcattggatttcatcggtggtatgaatacgtctgagccagtaccacagtctatggatgaaagtaccgcgaagggaattctcaaatatttaaaagaactgggcgtaccagccaccccggccgacgtcgctgcgcgcggccaacagcagggctggagcgctgggtttaccgacaaagtggcggagtgggctgaacgggtcgccgccggcgaacggctggtgattaagcatccggaattcttttccacctatatgcgggaagagctgcgcgccctggtgtaa

SEQ ID NO: 137035 - DNA, 1554 bp, Enterobacter cloacae
atgcattcctctgttaataaaaacgaaagccgtacctttttcggccatccttatccgctgggctccctgttcttcactgaaatgtgggagcgcttctcgttttacggcatccgtcctttactgatcctgtttatggcggcgacagtgtacgacggcggcatgggcctggcgcgagagaacgcctcggcgatcgttgggatttttgccggcagtatgtatctggccgcgctgccgggcggctggctggcggataactggcttggccaacaacgcgccgtctggtacggctctatcctgatcgccctggggcacctgtcgatcgctctgtcagcatggctgggcaacgatctgttctttatcggtctgatgtttatcgtcctgggttccgggttgtttaaaacctgtatctcggtgatggtcggcaccctgtataaaaagggcgacgcgcgccgcgacggtggtttttcgctgttctatatggggatcaacatcggctcgtttatcgcgccattgatctctggctggcttatcaaatcgcatggctggcactggggcttcggcatcggggggatcgggatgctggtggcgctgatcattttccgtgtctttgccgtaccgtcgatgaagcgctatgacgcggaggttggcctcgattccacctggaacagcccggtggcgaaaaagaatggcgttggagcgtggctgctggcgctggctctgggagtggcggtgctggtcacgcttatcagcctgggcacgatcgtgattaacccggtggcggtggccagcgtgctggtctatgtaattgccgcctccgtggcgctctatttcatctggctgttcgtcttcgccggactcaaccgtaaagagcgggcgcgcctgctggtatgctttattttgctggtctcggcggcctttttctggtccgcgtttgaacagaaaccgacctccttcaacctgtttgctaacgactacaccaaccggatgatcggcgattttgagatccccgcggtctggttccagtcgattaacgccttgtttatcattctcctcgcgccggtattcagctgggcgtggcctgcgctggcgcgtaaaaacgttcgtccgggcagtatgaccaaattcgtgattggcatcctgtgcgcagcggcgggctttggcctgatgatgctggcggcgcagaacgttctgagcaacggcggggccggtgtgtcgccgctgtggctggtgggcagcatcctgatgctgacgctcggtgaactgtgcctcagcccgattgggctggcgaccatgactctgctggcgccggagagaatgcgcggccagatgatggggctgtggttctgcgccagcgcgctgggtaacctggcggcgggcctgatcggcggtcatgtgaaggccgatcagctgtcgctgctgccggacctcttcgcccgctgctccatcgcattgctgatctgcgccgccgtgctggccgtgctgattgtcccggtccgccggatgctggagaacagtcggtccagcgccgcgcaaaaatccctcagcaacgcctga

SEQ ID NO: 137036 - DNA, 276 bp, Enterobacter cloacae
atggggatcccggtgcgcgcgctgctgcggaaaaacgtcgaaccctacgacgcgctgggcctggcggaagaccggtttactgacgaccagataatcgactttatgcttcagcatccgatcctgattaaccgtccgatcgtaacgacgccgcagggcacccgactctgccgcccgtcagaggtggtgctggagatcctgacggcgccacaaaaaggcgcattcgtgaaggaggacggtgagccagtcattgatgccgcagggcagcgtgtgaaatag

SEQ ID NO: 137037 - DNA, 984 bp, Enterobacter cloacae
atggcgttattgaatgtagataaattatcggtgcatttcggcgatgaaaacgcgccgttccgcgccgtagaccgcatcagctatagcgtgaagcagggtgaagtggtcggtatcgtcggagagtccggctccggtaaatccgtcagctcgctggcgattatggggctgattgactatcccggccgggtgatggcggacaaactggaatttaacggccgcgatctgcagcgcatctctgaaaaagagcggcgccagctggtgggggcggaagtggcgatgatcttccaggatccaatgaccagcctcaacccgtgctttaccgtcggctaccagattatggaagcgattaaggtccatcagggcggtaataagcaaacccgccgccagcgggccatcgacctgctgaacctggtgggcattcccgatccggcctcgcggctggacgtctatccgcatcagctttccggcggcatgagccagcgtgtgatgatcgcgatggcgattgcctgtcggccaaaactactgattgccgatgaaccgaccaccgcgctggacgtgaccattcaggcgcaaatcattgagctactgctggatctgcagcagcaggagaatatggcgctggtgctgatcacccacgacctggcgctggtggcggaagccgcgcataaaattatcgttatgtacgcgggtcaggtggtggagaccggtgacgcgaaagatatcttccgcgcgccgcgccatccttatacccaggcgctgctgcgcgcgctgccggaattcgcccaggataaagcgcgtctggcctcgctgccgggcgtggtgccggggaaatatgaccgtcccaacggctgcctgcttaatccgcgctgcccctatgccacggataaatgccgtagcgaagagccggcgctcgcggatctgaccggcggccgccagtctaaatgtcactacccactcgatgatgccgggaggcctggattatga

SEQ ID NO: 137038 - DNA, 1608 bp, Enterobacter cloacae
atgagtatttccttgaagaaatcagggatgctgaagcttggtctgagcctggtcgccatgaccgtcgccgccagcgtgcaagcgaaaaccctggtttattgttctgaaggctcgccggaaggatttaacccacagctcttcacctctggcaccacctatgatgccagctccgtaccgatctataaccgcctggtcgaatttaaaaccggtacgacggaagttattccaggacttgctgagaaatgggaagtcagtgcggatggcaaaacctatactttccacctccgtcagggtgtgaagtggcaggataataaagactttaaaccaacccgtgacctgaacgccgatgacgtggtgttctccttcgatcgccagaagaatactaataacccgtaccataaagtttctggcggcagctatgaatactttgaaggaatgggcttaccggacctgattagcgaagtgaagaaagtggacgataataccgtccagttcgtcctgacccgtccggaagcgccgttcctcgctgatctggccatggacttcgcctccattctttcgaaagagtatgctgacaacatgctgaaagccggcacgccggaaaaagtggatctcaatcctatcggtaccggcccattccagctgctgcaataccagaaagattcccgcattctgtataaagccttcccgggctactggggtaccaagccgaagatcgatcgtctggtcttctccatcaccccggacgcttccgtgcgctatgccaagctgcagaaaaatgagtgccaggtgatgccgtacccgaacccggcggacatcgcgcgcatgaaggaagataagaacattaccctgctggaacagccgggtctgaacgttggttatctctcctttaacaccgagaagaaaccgctggacgacgtcaaagtacgtcaggcgctgacctacgcggtcaacaaagaagcgatcatcaaagcggtttaccagggcgcaggccaggcggcgaagaacctgatcccgccgaccatgtggggctataacgacgacgttaaggactacacctacgatccggagaaggcgaagcagctgctgaaagaagcgggcctggaaaaaggcttcaccatcgatctgtgggcgatgccggtacagcgtccgtacaacccgaacgcccgccgcatggcggagatgattcaggctgactgggccaagattggcgtccaggccaagatcgtcacctacgagtggggcgagtatctgaagcgggcgaaagcgggcgagcaccagagcgtgatgatgggctggaccggcgacaacggggatccggataacttcttcgcgaccctgttcagctgcgccgcggcgaaagacggctccaactactcgcgctggtgctataagccgtttgaagatcttattcagccggcccgcgctaccgacgaccacaacaagcgtattgaactgtacaaacaggctcaggtagtgatgcatgaccaggctccggcgctgatcattgctcactccaccgtctatgagccggtgcgtaaagaagtcaaaggctatgtggtggacccgctgggcaaacaccacttcgataacgtctctgtcgaataa

SEQ ID NO: 137039 - DNA, 1395 bp, Enterobacter cloacae
atgaaggtgataaaggggttggtcctactgtgcctgatgatgctcgcgggctgccagtctgaggaagagaccagccagttcctgctggcctgtaaatacgatgcgccagcgacgatcgcagccatgctggataacggcattgatgtggatggtcaggataaaaccggcttaagcggcctgatggtcgctgctgcggaaaatcgtcgcgatgtggtggaattgctgcttaagcgtcgggcgaagccgaacctccagacgcgccagggcgtcacggcgctaatgctggcggcggcgcgtggcagcgataccgcgattatcggcgatcttctccaggcgggagcgtcggtgaatcagacctccatcgacaagagtacggcattgatgtccgccatctccgacggcggggatgtcagaaacgactatcaacatattctggcgatgaaaaagcccgatgcgcctgtcgaagaggagagtacgctggacaagatagttggcgcaacggcggcgaaatcgctggcgacgggcaatcgcgcgctgatgaccgaagacatggcgttacaactggcgcccggcgcgtttaagaagaacgtcgacgagatcgtggcgctgctcctcaagcacggcgcggacgtgaaggccgtcaacgcgtccggggaatcggcctttttcctcgctgtcgatcacgcgcgatcggcggaaaccatcacgacgttggccaacgccggggcggacaccagcctggcggataaatccggcaccacaccgctgatgctggcggcggcgggggatgatcccgatctggtgctggcgctgtcggcctccggggtggaagtggataagccgaaccgtgaaggactcacggcgctgcaggtggcggcgggtcagggggcgcctgcggtgatcgcggcgctggtgcagcgcggcgcaaaggtggaccagctttccgccaacgatctcagcccgctgatgctggcggtcaaaatgaataataaagccaatgtcgaggcgctgcttgcggctggcgccagcgtcaacctcagcaataaggccggctatacggcgattggctacagccgggccggcgaggttcgccagctgctgctggcacagcatgccgagctgaaggggcaggccgcgcatatggcgcaaagcgaactgcagttttgtgctaatgcctttgccgacaagctggcatacagcgacatcgcccgggcggtgaataacgatacccgcccggatattatgcgtcatcagcaatcctgcccggagctgggggagctgacgatgctactgggagagtttacattcaccccggcgggcgcgacctatctcggcgagccggtgacatgtaaggtatccgagtatcgcaaaacgtttgaggtcaactgccgctaa

SEQ ID NO: 137040 - DNA, 1674 bp, Enterobacter cloacae
atgaaatatattagaacgatgacgcagcagaagcttagtttttggctggcgctgtacatcggctggtttatgaacgtcgccgtttttttccggcgtttcgatggttatgctcaagagttcaatttctggaaagggctttccggtgttgttgaactggttgccacggtatttgtcaccttcttcctgttacgtcttctgtcgctgttcggccgccgtatctggcgcattctggcgacgctgattgtcctgttttccgccgcggcgagttactacatgacgttcctcaatgtggtgattggctacgggatcatcgcttcggtgatgaccaccgatatcgacctgtcgaaagaggtcatcggctggcacctgatcctctggctggtggcggtgagcgcgccgccgttgctgttcatctggagcaaccgctgccgccatacgctgctgcgccagctgcgcaccccgggccagcgggttaaaaacgtgctgatcgtggtgctggccggactgattgtctggggacccatccgcctgctagagctgcgccagcatgatgtggagcgccattcggaagtggatatgccgagctatggcggggtgatcgccaactcttacctgccgtcgaactggttgtcggcgctgggactgtacgcctgggcgcaggtggatgaatcctcagacaacaaatcgctgattaacccggcgaagaagttcacctacgtcgcgccggaaggtctggatgatacctacgtggtgtttatcattggcgaaacgacccgctgggaccatatgggcatcctcggctatagccgcaataccacgccagagctggagaaagagaagaatctcgtcgccttccgcggttactcgtgcgataccgctaccaaactgtcgttacgctgcatgtttgtgcgcgagggcggggcggaagataatccacagcggacgctcaaagagcagaatgtctttgccgtgctgcatcagctgggcttcagcggcaatctgtacgccatgcagagcgagatgtggttctacagcaacacgatggccaacaatatcgcctaccgcgagcagattggcgccgagccgcgcaaccgcggtaagagcgttgacgatatgctgctggtggatgagatgaagcgcggtatggcgcagggcaacgcctccggtaagcatctgatcattctccacaccaaaggctcccactttaactacacccaacgctacccgcgcagcttcgcccagtggaaaccggagtgcgtcggcgtcgacaacaagtgctcgaaagcggaactgatcaattcctacgacaatagcgtgacctatgtcgatcactttatcgtcagcgtcctcgaccagctgcgggataagaaagcgattgtgttctatgccgccgaccacggggagtcgattaacgagcgtgaacacctgcacggtacgccgcgcaagatggcgccgccggagcagttccgcgtgccgatgatggtgtggatgtcggataagtacctggaaaatcccgatcacgccgccgcgtttgcccatctgcagcagcaggctgcgatgaaggtgccgcgccgtcacgtcgagctgtacgacaccattatgggctgcctcggctatacctcgccggatggcgggatcaatgagaacaacaactggtgccggtggaaaaagtaa

SEQ ID NO: 137041 - DNA, 1206 bp, Enterobacter cloacae
atgaacgctgcaaaccgtcaatcgacccgctggctgacactgatcggcaccatcatcacccaattcgctctcggttcggtttatacctggagcctgtttaacagttcgctgtctgacaaactgggcgagccggtcagtcaggtggctttttcctttggtctgctgagcctcgggctggcgctctcttcgtcggtcgccggcaagctgcaggagcgctttggcgtgaagcgcgtcaccatggcctccgggatcctgctcggcctgggcttcttcctgaccgcgcactccagcagcctgatgatgctgtggctgagcgcgggcgtgctggtggggctggcggacggcgccggttacctgctgaccctgtcgaactgcgtgaaatggttcccggagcgtaaagggttgatctccgccttctccattggctcctatggtctcggcagcctggggttcaaattcattgattcccacctgctggccaccgttggcctggaaaaaaccttcgttatctggggcgctatcgtgctggtgatgatcgtctttggcgcgaccctgatgaaagatgcgccaaatcacccggcagccaccgcggccaacggcgtcgtggaaaacgacttcaccctcgccgaatcgatgcgtaaaccgcagtactggatgctggcagtgatgttcctgacggcctgcatgagcggtctgtacgtaattggcgtagcgaaagatattgcccagggaatggtccacctggatgtcgccacggcggccaacgcggtaacggttatctcgattgcgaacctcagcggtcgcctggtgttaggtatcctgtctgataaaatctcccgcattcgcgtgattaccatcggtcaggtcgtgtcgctggtggggatggccgcgctgctgttcgccccgctgaatgccttgaccttcttcgccgccatcgcctgcgtcgcctttaacttcggcggcaccattaccgtcttcccgtcgctggtgagtgagttctttggtctgaacaatctggcgaaaaactatggcgtgatttatctgggcttcggtatcggcagcatctgcggctctctcatcgcttcgctgttcggcggtttctacgtgaccttctgcgtgatcttcgccctgctgatcctctcgctggcgttatccaccaccattcgtcagccgaaaagtacggtatataacgaggcgcacgcctga

SEQ ID NO: 137042 - DNA, 645 bp, Enterobacter cloacae
atgataataaagaaatgcaatggcctccgggggttcttgatcccggcgagcgtatccgtctgggtgtcatgtgtctctggagcgaatgcctggcaacaggaatatatcgctatcgatacaaaaagtaatacgtcggaacgctatacatgggatagcgatcaccaaccacgttatgaagatattctcgccgagcggatgaagtcctctgagacgcccggcgggctggcgttaaaccaggggctggcgccgccggacagcggccgcggcctgagcgttggctggaattatccgctggcaaacggcgtaacctccgggccggtggccagcctgcgcagcgacgtcaccgcgccgacggtgagaagcgcaggcgaggtgggctacgttaacacgctcggctggcgcatggattatcaggcgctgtggggcgtgcatccctgggcgcaggtgagctataaccagtcgctcgccagcgatgtctgggcgccgatgacccgtgccagggagggaggctggagcgatgtcaccctgggcgctgatatgcggttgggatcccacgtggcggcatgggcaacgctgtcgcaggcggataacctgccgtcaggggaaaatacgctctatttgatgggggtcagcgccaatttttaa

SEQ ID NO: 137043 - DNA, 582 bp, Enterobacter cloacae
atgcagcgttgcggatgggtgagtcaggatccgttatacatcgagtatcacgataccgaatggggtgtggcgcaaaaagagggtcgccagctgtttgaaatgatctgccttgagggccagcaggccggtttatcgtggattacggtgttaaaaaaacggcagaactaccgccaggcttttcaccagttcgatccggtgcgcgtggcggcgatgggtgatgacgatatcgagcgactcctgcaggataccggcatcattcgccatcggggaaaaatccaggccattatcggcaacgcccgcgcctatctggcgatggaagaaaatggcgagtcgttcactgattttgtctggtccttcgtcgacaatgcgccacaggtgacccgcgctgcgacgctggcggaaattcccaccacgacgccggcctccgatgcgctatcgaaggcattgaaaaaacgcggttttaagtttgtcggctcgacaatctgttattcctttatgcaggcctgtgggctggtcaacgaccatgtcaccggctgcttctgtcaccctggaggtcaggatgatccgcaagtgggacactga

SEQ ID NO: 137044 - DNA, 441 bp, Enterobacter cloacae
atgatccgcaagtgggacactgaagataccgcgccgctgctggcgctgtggctggacagcacgattcatgcccatccttttatcagcgaaagctactggcgcgacagcgtcgcggtagtacgggatgtctatcttcccgccgccagcacctgggtctgggagcaggatggcgagttaaaaggctttgtcagcgtgctggactcccgtttcgtcggcgcgctgtttgtcgcgccgggcgccacccgccagggcattggccgggcgctgctggatgaagtcaaacagcactacgcctggctgagccttgaggtttatcagaagaacgaatcggcggtcagtttctaccatgcgcagggcttccggattgaagactgcgcatggcaggacgatactcagcacccgacgtggattatgcgttggccggcggatcaaatgccgtaa

SEQ ID NO: 137045 - DNA, 2331 bp, Enterobacter cloacae
ttgccaacctcatctgcaaccaaaaccatcttaaccgccgcccactggggaccgatgctggtggaaacggacggggaaaacgtcctctcttcccgcggcgcgctggcgacaccgtttgccaactcgctgcaaacggcagtgcgcgatcaggtgcacagcaaaacccgcgtgcgctatccaatggtgcgtaaaggcttccttgcttcaccggacaagccccagggggtccgcggtcaggatgaattcgtgcgggtgagctgggagcaggcgctggatctgatcgatgcccagcatcggcggatccgcgacagctacggtccggcctccatttttgccggctcctacggctggcgctctaacggcgtattgcataaggcggcgacgctgctgcagcgctatatgagcctggcgggcggctataccggccatcttggcgattactccaccggcgcggcgcaggcgatcatgccttacgtcgttggcggcaatgaggtgtatcagcagcagaccagttggccgctggtgctcgagcacagcgaagtggtggtgctgtggagcgccaacccgctgaacacgctgaaaatcgcctggaatgcctccgacgagcaagggatcccgtggtttgatcggctgcgccagagcggtaagcggctgatctgcatcgatccgatgcgatcggaaaccgtcgatttctttggcgattcgatggagtggatcgcgccgcatatgggcaccgacgtcgcgctgatgctggggatcgcccatacgctggtggaaaatgactggcaggatgatgcgtttcttacccgctgcaccagcggctacgatatttttgcccgctatctgaccggcgaaagcgacggcgtagcgaaaaccgctgagtgggcagcagcgatctgcggcgttaaagcagataaaatccgcgaacttgcgcaacttttccacgaaaataccactatgctgatggccggctggggcatgcagcgtcagcagtatggcgagcagaaacactggatgctggtcactctggccgccatgctgggacagatcggcacccccggtggcgggtttggtctttcctatcattttgccaacggcggcaacccgacccgccgcgcggcggtgctgggctcgatgcaggggagcgtggccggaggcgtggacgcggtggagaagatcccggtcgcacgaattgtcgaggcgctggagaatccgggggcggagtatcagcacaacggcatggcgcggcgctttcccgatattcgctttatctggtgggccggcggcgccaactttactcatcatcaggacaccaaccgactgattcaggcgtggcagaaaccggagcttatcgtcatttccgaatgcttctggaccgccgccgcgcgccatgccgatatcgtcctgccggcgaccacctcgtttgagcgcaacgatctgaccatgaccggggactacagtaaccagcatctggtgccgatgaagcaggtggttgccccgcgagatgaagcgcgcgacgatttcgcggtctttgccgacctcagcgaacgctgggaggcgggtggccgcgaacgcttcaccgaagggaagagtgatttgcagtggctggagactttctatcagatggccgcccggcgcggcgcccagcagcaggtgacgctgccgccatttgccgaattctggcaggctaaccagctgattgagatgccggaggagccggagaatgcccgttttgcgcgtttcgccgccttccgcgccgatccccaggccaacccgctgaaaacggcgagcggtaaaatagagatccactcgccgaccatcgccgcttttggttacgccgactgtccgccgcatccgatgtggctggagcctgacgagtggcatggcaacgcagaggcggggcagctgcagctgctgtcggcccatccggcccaccgtctgcacagtcaactgaaccacaccgcgctgcgcgagcgctatgccgttgccgggcgcgaaccggtgactattcatccgcaggatgcgcaggcgcgcgggattgtcgatggcgatttggtgcgggtatggaacgcccgcggtcaggtgctggccggcgccgtggtgacggaggggatccgcccgggggtgatttgcctgcatgaaggagcgtggcccgacctggatccgcaggtcggcatctgcaaaaacggggcggtgaacgtcttaaccaaagatattccgacatcccggctgggcaacggctgtgccgggaacaccgccctggcgtggctggagaaatataccggcccggcgctgccgcttacggcatttgatccgccggccaacgcataa

SEQ ID NO: 137046 - DNA, 663 bp, Enterobacter cloacae
atgaaaaaacgcgtacttatgattgcggcgctggtcagcggcactctggccatttctggctgcaccaccaacccctataccggtgaacgtgaagcaggcaaatccggtattggcgcaggtattggctccttagtgggcgctggcgtcggcgcgctctcctcttccaaacatgaccgcggcaaaggcgcactgattggcgcagcggccggcgcggcgctcggcggcggcattggttactacatggacgtgcaggaagcgaagctgcgcgacaaaatgcagggaaccggggtcagcgtgacgcgaaatggcgacaatatcgtgctgaacatgccgaataacgtcaccttcgacagcaatagcgccaacctgaagccggccggcgccaacaccctgaccggcgtggccatggtgctgaaagagtatgagaaaaccgctgttaacgtggtcggctacaccgacagcaccggcagcaaggatctgaatatgcgtctgtcgcaacagcgtgcggacagcgtcgccagcgcgctcatcacccagggcgtggcggccaatcgcattcgcaccaccggcatgggcccggcgaaccctatcgccagcaacagcacagcggaaggcaaagcgcagaaccgtcgcgtggaaattaccctcagcccgctgcagtaa

SEQ ID NO: 137047 - DNA, 969 bp, Enterobacter cloacae
  misc_feature (13)..(22): n is a, c, g, or t
atgtcgcccggcnnnnnnnnnncacgttatcttaacggcgagaagcatctgctttccgacgacctgttatcacgtattgaaaaagccattgccgaactcgactaccgccccagcctgatggcccgcggcctcaagcacggccgaacccgcctcatcggcctgatcatcgccgatatcaccaatccctactcggtcaacgtcatgagcggcattgaagcagcctgccgggaaaagggcttcaccctgctggtgtgtaataccaataacgagctcgatcaggagctgcactacctggacctgctgcgcagctaccaggtggaaggcatcgtggtcaacgcagtcggtatgcgggaggatggcctgaaccgcctgcagcagtcggccctgccgatggtgctgattgaccgtaaaatccccgacttcgcctgcgatgtggtcgggcttgataacgcccaggccgccaccaccgccaccgaacatctggtggaaaaaggattcgaggccatcctgtttctcagcgaaccgctgggctcggtgaatacccgtcgcgagcgcctgagcgcctttcgcgccacgcttgcccgccaccacggcgtggtggccgaaaacgccgaggtgcagcttaacgacggcgcgatgctggacaacgtcctgcgtcagttccatgcccgccaccgcgggatgcgcaaagcggtcatctccgccaacggcgcgctgacgctgcaggtagcccgcgccctgaagcgcgtcggcctgatctgggggagcgatatcggcctgctgggcttcgacgaactggagtgggcggagctggccggcgtcggtattaccaccctcaaacagccgacgtggcagatcggctacgcggcggtcgaacaggttattcggcgcattgccggcactaacgaccccatccgcgaacgggtattttccggcgagcttatcgtccgcggatcaacctcccgttaa

SEQ ID NO: 137048 - DNA, 294 bp, Enterobacter cloacae
atggacccggcaggcggctttgaagcgctgcatcggcgccagctggccgcagtcggtctggtcattctctaccaccaacgccatgccgctgtcgctgaggatatcgcgcagctcatccaattgctgattgtggaggaaatggccaagggagagcttcagccacagagcgttcagggtttgcgcttccgcgagcagcgtcgggagatccgggttaagctcgccgttgtcggtgaacagcgcctgcggcgcggagtagcaggccagcaggccgtggcgctcaatagtggccgctag

SEQ ID NO: 137049 - DNA, 231 bp, Enterobacter cloacae
atgagccccgccttttcgtctttcgccgccttcctgaatatgggcggctatgccgtgtacgtctggctggcggtggccgtgaccgtcgccgcttttggcctgctgacggtgcataccctgtgggcgcggcgggcgttgttccatgaggtacgacgccagcaggcgcgcgagcggcggatcgctgccgcccgcgaacatgacaaggaggccgcggatgcaagcgcgtcgtaa

SEQ ID NO: 137050 - DNA, 738 bp, Enterobacter cloacae
atgtggaaagcgttacatcaactggcgatccccgagcggctgtaccgcctgtgcggatgctggatcccctggctggcggcgttgagcgcgctgttgctggtcatcggcctggggtggggctttggcttcgcccccgcggactatcagcagggggaaagctaccggatcatgtaccttcacgtcccgacggcgatgtggtcgatggggctgtacctggcgatggccgtcgcggccttcgtcggggtggtctggcagatcaaaatggccgatctggcgaacgccgccctggcgccggtgggggcggtctgcaccctggtggcgctggtcagcggcgcggcatggggcaagccgatgtgggggacctggtggatctgggacgcccgcctgacctcagagctggtgctgctgtttctgtatgccggggtcatcgccctgtggcacgcctttgacgaccggcggctggccgggcgcgcggcggggatcctcgtcctggtcggggtggtcaatctgcccatcattcattactcggtctactggtggaacaccctgcaccagggctcgaccaacctgcagcaaaccatagacccaagcatgcgtctgccgctgcggatctgcatctttgccttccttacgctgtcggtcaccctgaccctgatgcgcctgcgtaacctgatcctgcaactggagcgccgtcgaccgtgggtggtggcgctggtgaataaaggagccgcccgatga

SEQ ID NO: 137051 - DNA, 660 bp, Enterobacter cloacae
atgatgcgtgcgctgttggcccgggaactgcgcctggcgtggcgcagcggggcggagatcctcaatccgctctggttctttctgatcgtcatcaccctgtttccgttcggcgtaggcgccgcgccgcagctgctggcgcagattgcgccgggcgtggtgtgggtcgccgcgctgctggcggcgctgctggtgatggatcggttgtttcgcgacgactggcaggacggttccctggagcaactgatgctcctgccgacgccgctggtggcggtggtgctggtgaaggtggttgcccactggatgatgagcggcctgccgctgctgatcgtctcgccgctggcggcgctgctgctggggatgagtctgcatgacgccggtgtgctggcgctgaccttgctgcttggcaccccgacgctcagttttctcggcgcggtgggggttggcctgacggtcggcctaaagcgcggcggcgtcctgctgagcctgctggtgctgccgctggcggtgccgctgctgattttcgccaccgcggcctgccaggcggcggccgccgggctcccggtcagcggctatctggcgatgctggcggcgttcttaaccgccagcgccaccctgtgtccgttcgccaccgccgctgcgctgcggctgaccgtacgataa

SEQ ID NO: 137052 - DNA, 624 bp, Enterobacter cloacae
atgctgcatgcagagcgactgacctgcatcgttgacgatcgaccgctgtttgcggcgctgacgctgtccctcgctgccggcgagctgctgcagatcgccggtgataacggcgcggggaaaacctcgctgctgcggatcctctgcggcctggcgcgcccggaaagcggggtggtgagctggcagggccagccgctggcgaaggtccgggagtcatttcaccgtcagctgctgtggctgggccataaacccggcgttaacgcggcgctgaccgccgatgaaaacctgcgtttcttctttccggccagccgccttcagcagcgggaaagcgccctcgccgccgtcggcctggcgggctatgaagacctccccttgagccagctctccgccgggcagcagcgtcgggtggcgctcacccgcctgtggttaaccgacgcgccgctgtggatcctcgatgagccgttcaccgccctcgacgccacggcgatggaaaccctgacccgtcgcctggagcagcacgcccggcaggggggatgcgccatcctcaccacccaccagccgctgcggccgctgggctgtccgttgcgcaccctgcgcctcggcggcgacgcgggaggcgggcaatga

SEQ ID NO: 137053 - DNA, 1338 bp, Enterobacter cloacae
atgaaaatgcaatggttatcggccctggtgcttggggcattgagctgcgcggccttcgccgaagaggcgcctgcggacagcaatctgattaagcagggggagtatctggcgcgggcgggggactgtgtcgcctgccacaccaacggcaaagcggggaaacctttcgccggcggtttgccgatggagacgccgatcggcaccatctactccaccaatatcacgccggataaagaacacggcatcggcgggtacaccttcgaagagttcgacgacgcggtgcgcaagggcgtgcggaaagacggttccacgctctatccggcgatgccgtatccctcgttcgcgcggatcagcgaagcggacatgcgcgccatgtacgcctactttatgcacggcgtggagccggtgaatgtcgccaacaaggacaccgacatcccatggccgctgtcgatgcgctggccgctggcgttctggcgcggcatcttcgccccgacgccgagcgactttgtcgccaacccgcaggttgacccggtgctcgagcgcggccgctatctggtggaaggcctgggccactgcggcgcctgtcataccccgcgtagcctgacgatgcaggaaaaagcgctcagcgaaagcgaaggcgatgattacctggcgggcagcaatgcgccgattgacggctgggtcgcctccagcctgcgcggcgaaaaccgcgacggtctggggacctggagcgaagccgagctggccgagttcctcaaaaccggacgcaacgataaatcggtggtcttcggcggcatgagcgatgtggtggagcatagtctgcagtatctctctgatgacgacatcaccgccatcgcccgctacctgaaatcgctcccgccgcgcggcggcaaacagaccccagccccggtggaagacagcgtggcgaaagatctgtggaagggtaacgacagcaaaaccggcgccgcgctgtacgtcgataactgcgccgcctgccaccgtaccgacggcgcgggctataaacgcgccttcccgtcgctgaagggcaacccggtggtacagacggaagatgccacttcgcttatccacatcgttctgaccgggagcaccacgccggcggtgaaagatgcggtctccaacctgaccatgccgtcgttcggctggcgcctggacgaccagcaggtggcggatgtggtcaatttcatccgcaccagctggggcaacaacgcgccggcggtcagcgccagcgatgtggcgaaggtgcgtaaggagactgcggcgcatgatgagaaggcgttaggcaacgccgatatctcgaagctgccgggggccggacagtaa

SEQ ID NO: 137054 - DNA, 1785 bp, Enterobacter cloacae
atggccaccgtattgaaaaaaaccgatgtcgcgatcgtcggcttcggctgggttggggcgatcatggccaaagagctgaccgaagccgggctcaacgtcgtcgcgctggagcgcggcccgatgcgcgacacctggccggacggcgcctatccgcaggtgattgatgagctgacctacaacatccgccgcaagctgttccaggatctgtcgaaaagcaccgtcaccatccggcataacaccagccaacaggcggtgccctatcgccagctggcggccttcctgccgggtaccggcgtgggcggcgccgggctgcactggtccggcgtccatttccgcgtcgatcccattgagctgcggatgcgcagccactatgaagaacgctacggcaaaaacttcatcccccaggatatgatcatccaggatttcggcgtcacctacgacgagctggaaccgttcttcgataaagcggaaaaagtattcggtacttccgggaccgcctggtcgatcaaaggcaaggtcgtcggcaaaggccgcggcggcaacgccttcgccccggaccgctcggacgacttcccgctgccggcgcagaaaaacacctggtcggcgcagctgtttgaaaaagcggcgctggaagtggggtatcacccctataacctgccgtcggccaacacctccgactcctataccaacccctacggcgcgcagatgggcccgtgcaacttctgcggtttctgcagcggctacgcctgctacatgtactctaaagcctcgccgaacgtgaacattctgccggcgctgcgccaggaaaaacgctttgagctgcggactaacgccaacgtgctgaaggtcaacctgaccgacgacaaatcccgcgccaccggcgtgacctacgtcgacggccaggggcgcgaaatggaacagccggcggacctggtgattatcggcgccttccagttccacaacgtgcacctgatgctgctctccgggatcggcaaaccgtacaatccggagaccggcgaaggggtggtagggcgtaacttcgcctaccagaacatgaccaccatcaaggccattttcgacaaagacacctataccaacccgtttatcggcgcgggcggcaacggcgtcggcgtcgacgacttcaacgccgacaacttcgaccacggcgcggcgggctttgtcggcggttcgccattctgggtcaaccaggccgggaccaagcccatctccggtttcccggtaccgccgggcaccccggcgtggggcagcaagtggaaagcggcggtggccgacacctacacccatcacctgtcgatggatgcccacggcgcgcaccagtcctatcggcagaactacctcgatcttgatccgaactacaaaaacgtcttcggccagccgctgctgcgcatgaccttcgactggcaggaaaacgacatcaagatggcgcagtttatgttcgataagatggcgccgatcgccaaagcgatgaagccgaaatatatcctcggcagcccgaaaaacgccaacagccactttgataccaccacctaccagaccacccatatgaacggtggggcggtgatgggggaagatccgaaaaccagcgccgtgaaccgttatctgcaaagctgggacgtgcataacgtcttcgtcatcggcgcctccgcgttcccgcaggggctgggctacaacccaaccggcacggtggccgcgctggcctactggtcagcgaaggcgatccgtgagcagtatctgaaaaatccgggtcccctggtgcaggcataa

SEQ ID NO: 137055 - DNA, 756 bp, Enterobacter cloacae
atgatgtcgagcgagaaaaccaacaattccaggcgtgatttcctggtgaaatcgatggcgctgatcccgacggtggtgatcggcggcgcgggagcaggggctattggcgtggccaccagcgcgaccgcgcaggcggcccccgcttcagagccagcctccgggaacaccgcggcggccagcgactggaagccgcagttcttcaacgatcgtgagtgggcgtttatcaacgccgccgtcgctcgcttaatcccggcggatgaactcggtcccggcgccaaagaggccggcgtgccggagtttatcgaccgccagctcaataccccttacgccaccggctccatctggtatatgcaggggcccttcaatcccgacgtgccgaaagagatgggttatcagctgccgttggtgcccaaacagatctataacctcgggatcgccgacgccgaggcgtggtgtcaggacaaatatcataaaaccttcgctgaactgagcagcgagcagcaggacgaggcgctcggcctgtgggaatcgggtaaagccgagttcaaacagctgccggcctcgctgttcttcacctatctgctgcaaaacacccgcgaagggttcttcagcgacccgatccatggcggcaataaaggcatggtcggctggacgctgattaattttcccggcgcgcgcgccgactttatggactgggttgaacggggcgaacgctaccccttcccgccggtatcaattaatggggagagggcgtaa

SEQ ID NO: 137056 - DNA, 372 bp, Enterobacter cloacae
atgttcgatcatgtgaaattcggcgttagcgactatgccgccagcaaagcgttctttttgcaggccctggccccgcttggcgtaacgctggtcggcgaaggcgaaccgagctacggcgcagagctggccggcagcggcgatgcttctctatgcctctatcaaagtgcggaaaaaccggcgccgctgcacattgcctttcgcgccgacagccgcgagcaggtcgatgccttctggcaggcggcgctggccgccggaggaaaggacaacggtgcgccggggctacggctaaactaccacgccagttactacgccgcgtttgtgattgcgccagacggacacaatattgaagccgtgtgccatctggcggggtaa

SEQ ID NO: 137057 - DNA, 684 bp, Enterobacter cloacae
atgaaaagagccgaattagacgttgtggttttaagtgaggatttgccgaatgaagggctggtaaaaggagcgcttggtactattgttatggtttttaattcgccaacaactggctatctggtcgagttttgcgacgagaaaggaaaaacaatcgcaatgccagttttattccccgcccagctaaagcgctatttcacgattcgtaacctgaagtcgctgatagttgaaggtaattatcccgtagccgaccctgtagacccagacgtcatggcagatttaatgcacaaagtcgcgcctgttgaatgggaggacaagaaaagaagggtctatgaggatattcaacgacttttgattagtcggccggactacgctgatatgttcaatattatggatgggggtgagtacaatggcatgacattgtacagcctggtgcaggcagagaacggtgaacctgcatggtcgaatatctttgttcgaaactttgatacgcgtattaacgaaatctatgtcgatccgaacctcattggcaaagtagtcattggtgaagagggcatgtccgtgattgtctacagcttcacagatgaccgtttcgaaatccgcgataaagtctcctcggattatgtcattgagtcacatacccacttcaacggactgttgtccgccctcattgagccggtcagctga

SEQ ID NO: 137058 - DNA, 1116 bp, Enterobacter cloacae
atgtttcgactttaccagtcacatgatttaatacgccaattaaatcctgaagactttcaatatattttgacaccagcaggttcgctaagagaagcgtgtatacattacgacctctcctgtgaggcgaatggtcacagcctcgcttttggcctaccgaaggaaatatacaactcatctccacataaaaggccatatgaacgaaggcaacgtagctatgcagatcctatctatgatgaggtagagcacaggctacaaattggctggcttgttggtgtggatatctccaggtgttggagcagtgacagaaatccattttacatcgacgacaatggcgatttaatttttacccctaccgcttcgtcataccatgcgtggtttaaggacgaaattatgaacgcctacaggcacacgattgccgatcgccaaggaaggaggccagctcccactcagcgtatacaacacaattataatggctcaagaatcgcaccagcgtcaaagacactaaacagtaagaccattggccgactgctagccactggcggtatatataatggcaaccttgaaggattccatgaaacagcgttgcaactgggtggggatgcgcctgcaggttacgaccagattatgggcaataaaggattactcattgcaggagcctctttcgctgcaggattaacaatgggtagattgaatcctttaagtgagttagatgagttatcgagtctcagtaaaataccagccttcgaaagcccgtatgtgaagggcttcatctctgagaacggtacgttagtgaatgctgaatacgccgttatcgatccgaaaaaactcgcgacgtacgctttagattcaacacatcctacaggcggtcataaggctcgggtgtttgagtctgccctggggtacaacccaacgaatgcggatgtcttagcagcacgaattcagaagggcgtattatcggccccggcaacgattttgcagacaaacaactacggtcaaacaatggctgtagatatgccaattttaggcatcaatggtgaaacggcggtcatccgtacaggctggatgtatgaaacagatgcgctcgttcctcgcctgacaactatttacgttaaatag

SEQ ID NO: 137059 - DNA, 288 bp, Enterobacter cloacae
gtgctcgtcgtactggcaaatgatctgccgccagcggtccgtggacgaatgaagctgtggtttgtcgaaccccggccaaatgtttttgtctcaggcgtcaaagattcggtcgcacaaaccgttgttgattacctgttgcagtacacgcctgtggaatcaggcctgatgctgtttcgcagtattcctcaaccgcctggttatgaaattcgctacaagggtgaggtcagaaagccgattattgatctcagtgggttacagctgattattgaaaccctaaaactgtcgtaa

SEQ ID NO: 137060 - DNA, 876 bp, Enterobacter cloacae
atggcccagggggagaggctgtttgtcaaagttacccgcgaactcctgcctcaggtaaaagataaatatccttttctctatcttgagcgcgggcggctggaaattgatgacagcagtgtgaaatgggtggatgcggatggcaacgtggtgcctctcccagtggcgaccatcaacacgctgctgcttggccccgggacaactgtgactcatgaggcgatcaaaaccgcaactgcggctaactgtgcggtgtgctgggtgggcgaggatagcctgctgttttatgccgccggttttttgcctagtgcagatacccgcaatcttaaagcgcagatggcgctggcctgcgatgcatcgtctgccctcaaggttgcccgggcgatgtttgctaaacgctttccggatgccgatctggagggtaaaagtttaaacagcatgatgggcatggaggggagtcgggttcgcgcgttgtatcagcagaaagcgcaggagtatggcgtcggctggaaaggacgtcagtttacaccaggcaagtttgaactgagtgacctgacaaaccaggtactgacctccaccaacgccgccctgtatggcattttatgctcggttgtgcatgcgatgggctactcaccgcatatcggctttatccattcaggtagccctttaccgtttgtctatgatctggccgacctttacaaagaacggctctgtattgatttggcattttcactctcgagggaaatggcgggccgctacgataaacacaaagtctctgaggcattcagaaagcgagtgatagccctggatttgctcaacctgattgcggccgatatcaatgagctgatgggagggaaaggtgctcgtcgtactggcaaatga

SEQ ID NO: 137061 - DNA, 351 bp, Enterobacter cloacae
atgacctaccgccactatctccaagatgccgtattcgccgtggtaatgggacttggcagccagcaagccgagtcgttaccagaggcgctacaaaatccggtatgggatttatatctcggtcgtaaaagctgcgtgcccagcgagctgatctatcagggcatctatgacagcgcagaagcggcatggcagcaggccaggacattagctgagagtaagcggcgcacgctgagttacagggtcattgaaggggaaggggatggcgatgtcatcacgcttaatgatgtcccggtgcagttcggccggcataagcgttaccgggatcgtcaggtgaccgtgctggagtgcggctaa

SEQ ID NO: 137062 - DNA, 258 bp, Enterobacter cloacae
atgagacaaactacgcaatatatgctgctgtggcttgaagggccgctgcagtcctgggggggcgattcaaagttcggtgtgcgcgatacgctgaatttcccgactcgctcgggcattctggggctgatttgctgtgcacgaggcgccgcggggccagaggtcgagtggctggcggagatgaataacctgcaaggagggccagccgctcctgcgcgagccgacattgtgcgatttccagatggttggcagcggatatga

SEQ ID NO: 137063 - DNA, 1035 bp, Enterobacter cloacae
atgactaccccgttcagaaacacccgtattgagtttcatattctgcagtctttcccggtgacctgccttaaccgcgatgacgtgggcgcccccaagtccgccatcgttggcggtgtgtcgcgcgccagagtgtcatcgcagtgctggaagcgccaggtgcgtctggcgctgcctgattttggtattcgtctcggggtgcgtagtaaaaaaactgcctcactgctggccaacgcctgtcgcgcactgggagcgagcgaagaacaggccaccggatgcggtgaagcgatggccgcttttttctccgatgataccctgctgtttctcagcgaggctgaggccgccgcatttgccgcttatgcgcagggaaaagattttgacgccgccagcctgaaagacaaagagctggtcaaagtcgccaaaaaggtggttaacaataccctggatgccctggatattgcgcttttcgggcgcatggtggccaaagcggtggatatgaacgttgaggcggcggcatcgttcgcgcatgccatttccacccataaagtgagtaatgaggtcgagttttttaccgccgtggatgactgtaaaacggaggatgaaagcggttcggcacatatgggcagcctggagtttaattcggcgacctactatcgctatgtcagcttggatctcgggcaactggcgcagacgttgggtgaggacgccgatatgaaaaccgccgtcgccgcttttgttaaggcactctatgtcgccgtcccctcagcccgacagacaacgcagtccggggcctgcccgtgggaatatgcccgcgtgttactgcgtaaaggtcagggtctgcaggcttcattcgagcagccagttaagagtcagggtgaaggcttcttatctcccagtaaagcggcgctcaaaaactggttgcatacaaaagaaaaactctctggctccttgttcggcaaacaaggcgattatgagtggggtgaggacctcgactacagcattgaccgcctgatcgctgacttacagtcacatctgtaa

SEQ ID NO: 137064 - DNA, 648 bp, Enterobacter cloacae
atgactgacctctttgcgagtgctttacatctcgatcgcgctgcggtgaaagcgctgaaaataagcgatgcctactccctacaccgggtggtgtacagcctgtttgctgacgcgcgtacagaccgggagaagtgcagccatatttcgagcgggatcgcctatgccgaccagggcggggattttcatggccgcaaaatattgatcgtctctgacagacctccggctgcaaaggttgatgggctgtacggtgaggtcatcagtaaatcgattccggccgcctttctctcccattcgcgttatcgctttcaggtacaagtgaatccggtacggaaagataagcaaacgggtaaacgcgtcgcggtgaaaggccgggccgatattgcgcagtggtttattcagcgagccgccagccgctggggctttgacgttgaccttcctggcttgcaggttgaggcgatggaagtgctgcagtttaaagataaaggcggccgccaggtaacgcttggcaaggcgacggtgcaggggctgctcaccgtcactgaccgacagaagttccagcatagttttcatcatggcattggtaaagggcgagcctttggctgcggcctgctgcagattgtgcccgttgttgatgcgcttttttcctga

SEQ ID NO: 137065 - DNA, 567 bp, Enterobacter cloacae
atggatcaggttcctgcagacgttaccgccgaaagcgccggtaacgaatcgcctgccaaacgatttgtcggttacgtgattgagcgtatcgcgaaagacaatggctttgccgcccgccttaaacgagcggataacccggcgaccgagtatcagagctgggaaatcctggcggggtttggcattgacctggaaaaagagtggcaacgcctgccgtactgcgtcattggcgccgcgctggcaaaggcgaaaccggccagcaatggcacaatcactctgggggccgccattgccggttgttatcccgaaggcaatcagtctgaacaggcgaaagctcgcctgcgacggctgttggcctgtacttcgaccagcgaagcgtgccgtattttgcgcccgttgttggcattaatggccagccgcagtgtgacgccggatttcgcagggctactcaatgaactgcagtggttctccggcagcagtcgcgaacggatccgcgcccgctgggcgcaggaattctatcgtcgtgccggtgaggctgccgggagtgaggcgaggaattcacatgactga

SEQ ID NO: 137066 - DNA, 1524 bp, Enterobacter cloacae
atggagaaccgcttcaatttgattgatgaaccctggattgcggtcgtggatgtggggttggtcagtttaaccgatattttcagccagccggaattacgcgctttaggtgggaatccggtagaaaaaatcgcgctcactaaattgctactcgccatcgcccaggcagcagcgacgccgacagatgatagcgactggcagcagatgggctggcagggaatggcccattgctgcctgcagtaccttgctaaatggcatgaccgtttttatctgtatggcgaaaagccgttcttacagatgcccgctattcaggccgcggaatgtaagtcattgggcgtattatcaccggaggtgagtaccggcaataccaccgttttgaccgaaagtcagcaacagcagcaattaactgatgcagacaaagcgctagctattgttatgcaaatgggctttgggctcggaggcaagaaaaccgataactctgtggtattaacgccgggctatcggggtaaacaaaacgacaagggaaagccgggcagtggaaaggccggggtttctgtcgggcatatgggattgttacattcgttctggcaggggaattcaatcgtacagagcatttggctcaatttgtttaccgctgaggatattacgcagctggcgatgtatcccacgctggggactgctccctgggagcgaatgccgacaggggaagatgatgacattgcgcgctcgttgaaagcgtcgttgctgggccgcttgatctcgatgggtaaattttgtctgttatctgaggacggcattcactatagcgatggaataagccatgccggttatctggagggcaaaaccgacccctcggtgtccgtcgatttttcaggaaagaaaccaaaggcgttatgggttaatccgggtaaacgcccctggcgcgaactgacgtcgttattgcagtttattgagcaagatagcccccggggatatgaaacccgtcagcttagccttcctctgaagcggataacccatcatgcggagcagtttgcgctatggtcaggcggcttaagggtgagtagtaatgcgggggaacagtacgcttcagggaccgatgattatgttcagtcagaaatatggttgtcatcagatttaatcaatcacacatttttagagtatttaaaatatgaaatgacgcagcttgatgctgtgcaaaaacagctttggggtgcagttgtacgttatttccgccagctatcagatattgataaatcagcgacagggaaggctcaaccctttgtggcaaagcaggccgaaaaagcgacgacgatattctggcaactttgtgaacgtcaggctcagaccctaattaatgcttgcttgacttccggtgaagaccataccgcgcgtcttcagttacgaaaaatttttgccaggtacgccgggcaggtttttgatcagctctgtcccgccgacagtgcccgtcaattagatgcctgggcgctggcccggcctaatttttcccaatatctcaccctcgattaa

SEQ ID NO: 137067 - DNA, 2397 bp, Enterobacter cloacae
atggcagcggctggccacgatatcggaaaggtcagtccgacttttgccgccaaaatttttgcggcatgtgacgttaatgatcaccgtcttgctgggttatcggcggtgaaccccggactcgaaacactctggggaggacatgcaggcgtcagtcaggcgacagcggaaagtttacatgcaccgcgctatgttcctgagatcctcggtcagcatcatggttttaatccagggctcaacggcaggcgtggcgacgctgaagtattcggcgggccgctctggtttgatgagcgtaaaaaactcgtggataagctgaaagcggaattctccgcagattggccgacatttgattcagccgctcaggctcgcgtggtcgccgggttgacctcggtagctgactggattggatccggtgagttttttgaaaatcctgagcaagcgtggcagcctgtcatcacagcagcccttaataacgccggctttattaaacccgttatccgtcagggactatcctttgcggacgtctttttccctgacgatccgtcgaagaaaccacgcgaagcgcaatcgcgctttattgaccaggttgtggggcctggtctctatattctcgaagcgaaaatgggaatggggaaaaccgaagccgcgttatacgcggcttatcaaatgttgctccaggaaaaagcaaccggcatttattttgcactacccacccagctaacctcgaacaaaatatacgatcgctttaatgcgtttttgcatcagattgtcagtactgaaaccccgcaacatgccttacttttgcattccggcgcctggttgatggataccgagatgggggaggaaggaagccctggtggtgcgtggtttaaccaccgtaaacgcggcttattagcgccgtttgccgtcggtaccatcgatcaggcgttgatggcggtgatgaatgttaagcatggttttgtcagagcgtatgggctcgcaggcaaggttgtgatccttgatgaagttcatacttacgatttatacactggcacgattcttaatgcgttagtcgaattcctccgtcaaatcgactgtacagtgattattcttagcgccacgctgagtcagacgcgtcgcgacgcattactgcagcaaagcacaaccagtgaggcatacccgctgattaccgcggcgccatcagcggaacgggagcgcggtctggtcgagattagcgttcccgtcaccgagaataccaccgtcatcctccattcttgtcgtaaagatgagtccgcgcgggaagaggcgctgcggcgcgcagagctcgggcagcaggtgttatggattgagaacaccattgccgaagctcaacaaacgtatctggacttggccagccgggcggtcgaggcgggatgtgaaacaggactcttacattcccgttttacgccccagcaccgcaaccggcatgagcaacgctgggtcgcgctttacggccgggcaggttggccccaacgtaaacagtgcggacgcattttagtcgggacccaggttctggaacaatccctcgatatcgatgctgatttcctcgtcagccgttttgcgccaaccgatatgttgctgcaacgtcttggtcggctgtggcgacataccgatacgccccgccatgccagcgcgaaggcggaatgctggctattgtccccctcgctggagagtgctttagccaacccgggttctgcattcggcatgagcgcgatggtctattcgccctatgtgttatgccgcagtctggaggtctggcaagcgatcccgtccctctcattgccaggggatattcgccccctgatcgatcaaacctataccgagcgcgctgaagaggggacatgggccaccctattgcatgagctgaagaatggcagccgctttcgttcaggagaacaggcgctgcagtcgctggcgaagctcacgttatctaccggcgggaaaacgctgcctgagcataaagcggagactcgctatagcgatcgtgacacccatgacctgttgctgctgcgtggtctgcgtacgcaagacggcatcacgtatatgcgcctgctagatggtgctgaattaacccttccgcatgggcgccatcgtttaagccgggcgcagtggcgacagctggcggtggtgcttaatcagcagctggtgcgagttagcccggctttttgtccgcccacaatagctaaaagtgagctggaaaaattacacctgcaggaggtgttctatcttggtcgccccgaagatgacgaggtgttactgcgggttgcgattgtcagcccggcgggtgagttgaagacactggatggccggcccgcaggcgataaatacactctcgaatatagtgaatatcttggcttccgggccatttccaaaaaggaataa

SEQ ID NO: 137068 - DNA, 1095 bp, Enterobacter cloacae
atgggcagctacctgatccgccgtttgctgttagtcatccccaccctgtgggccatcatcaccattaacttttttattgtccagatcgcgcctggcggcccggtcgatcaggccatcgccgccatcgagtttaatcagcgcggcgggatgccgggggctggcgacggcggcatgggcgccagccatgcccgcaccggcgcaggcaatatcagcgagggtcactatcgcggcgggcgcggcctcgacccggaagtcatcgccgagataacccaccgctacggcttcgataaaccgctgcacgagcgctatctgaagatgctgggcgattatctgcgctttgatttcggcgacagcctgtttcgcagcgcctccgtgctgcagctgattaaagacagcctgccggtctcggtgagcctcgggctgtggagcacgctgattatctatctggtctccattccgctgggcatccgcaaagcggtcagcaacggcagccgctttgatatctggagcagtacgctgattatcattggctatgcgatccctgcctttctgttcgccatcctgctgatcgtgatttttgccggcggcagctatttcgacctcttcccgctgcgcggtctggtctcgccaaatttcgacaccctcccctggtatcagaagatcctcgactacctgtggcacatcaccctgccggtgctggcgacggtaattggcggctttgccgcgctgactatgctgaccaaaaacagcttcctcgacgagatccgcaaacagtatgtggtcaccgcccgcgccaaaggcgttggtgagaaacagatcctctggggacacgtgttccgtaacgccatgctgctggtgatcgccggcttcccggccacctttatcagtatgttctttaccggctcgttgctgatcgaagtgatgttctcgctaaacggcctgggtctgctgggctatgaagcgacggtctcccgcgactatccggtgatgtttggcacgctctatattttcactctgattggcctgctgctgaatatcgtcagcgatatcagctatacgctggtcgacccgcgcattgattttgagggccgctaa

SEQ ID NO: 137069 - DNA, 1806 bp, Enterobacter cloacae
atgtatgcgcgcctctttctgattctgctggctctgtttagcctggacgctaaggcgcaaaccattcaggaaagcgtagccttcgcgattatcggcgaaccgaaatacgtcgccggtttcagtcattttgattacgtcaatcccagggcgccgaaaggcggcaccctcaccctggcggcgatcggcacctttgataacttcaaccgttatgcgctgcgcggcaaccccgcggtacgcacggaggcgctctacgataccctgttcaccacctcggatgatgagcccggcagctactacccgctgattgccgagcgggcgcgctatgccgaggactattcctggatggagatcgcgctcaacccgcgcgcccgcttccatgacggcacgccgatcactgcccgcgatgtggcgtttaccttcaacaagtttatgaccgaaggggtgccgcagtttcgcctgttttataaaggcaccaccgtgaaggccatcgcgccgttgaccgtgcgtattgacctcggccagcccggcaaagagaacatgctgagtctgctgagcctgccggtgatgcccgaggcgttctggcgccagcacaaactcagcgacccgctgtcgaagccgccgctggccagcgggccataccgcatcagcgcctggcgaatggggcaatatattacctattcccgcgtcgccgactactgggcggccgacctgccggtcaaccgcggtcgctggaatttcgatacgctgcgctatgactattatctcgacgacaatgtcgctttcgaagcctttaaagcgggagccgtcgatcgccgggaagagaccgtcgccaaaaactgggctacccgctacgtcggtcgcaacttcagccgcggctacatcattaaagatgagcataccaatacctcggcgcaggatacccagtggctggcgttcaatattcagcgcccgatttttgccgatcgccgggtgcggcaggccattaccctggcgttcgatttcgaatggatgaacaaggcgctgttttacagcgcctatcagcgcgccaacagctatttccagaacaccgaatatgccgcccgcagcctgcccgacgcagccgagctggccctgctgacgccgatgaaaaaagaactgcccccggagctcttcagccaggtttaccagccgccggtctcccgcggcgatggcttcgaccgcgcaaacttactcaaagccgacgccctgctcaatgcggcgggctggacggtgaagaaccagcgccgggtcaacgccgccaccggcaagccgctgcgctttgagctactgctgccggccgggggcaatgaccgctgggtgctgccgtttcagcacaacctgcagcgtctggggatcgtcatggatattcgtcaggttgataattcgcagtacagcaaccgccgccgcagccgggattacgacatgatgccaagcctgtggcgcgccatgccctggccggggaccgacctgcaaatctcctgggcgtccgactatattcactccagctacaacgcgccgggggtgcaaagcccggtagtggataagctgattgcgcagatcctgcagtggcagggcaataagcagaaactgatccctctcggtcgggcgctggatcgtgtgctgacctggaataactacatgttgccgatgtggtatatggcgcaggaccgcaccgcgtggtggaataagttctctttccccgcgacccgccccatctattcgtccggcctcgatacctggtggtacgacgtgaacaaagcggccaccctccccgcggacagacgctaa

SEQ ID NO: 137070 - DNA, 1563 bp, Enterobacter cloacae
atgcttactcgctacttttcgccccagcgtaaaacctggttaaccagcctgagcgtggggatcatcgtcgcgctgttggccgggagcattcagtttatggtgatctaccataaccgggccgagcgtttcgacgccattatcaacaatgttaatacctatctgaaaagctattttcacgacctgcgccagaccattgacggcctgcagccgctggtggaccagccctgcgagaatattgactccgggcttacctcccacgccgcgttcagccccaacgtccgcgctttcctgctggtcaaaaacggcatcgccttttgctcatcggctacgggagccatgaatacgcccctcagccagctgatcccggccatcgatatcagcaaacccgttgctatggcgattttaccaggcacgccgatgatgccgaagagcgcggcgctggcgctgtgggtaggtaaacccggcgatcaaaacagcggcattttcgtgtcgattaacgctaatctcacaccgtatatcctctattccgcgcggcaaaacgatttcagcggcattgcgctggccatcgatcacaccgctatctccaccttcagtaatcggctggtggatccgcaaacgctgcataacgcgccgatccgccaggcacagatcgagggcttaccgctgaaggtctatctgtatgccaacagctggctggcggaaaatacgcagtttgctctgctgctcggggtcgtctgcggcctgctggcggggctgctctgctattacgtgctgacgatcaaatcggatccgcgaaaatccattctgctggggatcaaaaataaccagttctacatcgtttatcagccggtggttaatgctcagactctacgtatcagcggcgtggaggtcctaatgcgctggcgccatccggtggttggtgaaattccgcccgacgtttttattaacctggccgaaacccagcagatgatcgtgccgctaacccatcacctgctcgcgctgatcgccagcgacgctgcggtgttgaagcgtattctgccgcgcggcgtgaagctggggctgaatatttcccctgcccatctgcaggccgacagcttccgcgacgatatgctgcgcttcgccgccgcgctgccagccgaccactttcacgtggtgctggaggtaaccgagcgggcgatgattgataaagaaaaatcgatggctaacttcgcctggctccaccgccagggattcgaaatcgcgattgatgatttcggcaccgggcatagcgcgctgatctatctcgaacgctataacttcgattatttgaagatcgatcgcggttttgtgcaggcgattggtactgaaacagtaacctcgccggtgctggatgcggtactgaccctcagccgccggctgaaattaatgaccgtcgccgaaggggtggagacccaggaacaggcggagtggcttcgcggccagggcgttcatttcctgcaggggtactggatcagccgaccgctgtcgctggccgggctggtggctgcgcacgatgaacccgcgaactatttcacaacgcgctaa

SEQ ID NO: 137071 - DNA, 570 bp, Enterobacter cloacae
atggtcaaatctcagccgattttgagatatatcttgcgggtagcccccgcgattgcagtagcggttctgctttccgcgtgtagttcaacaagtaccgccaggaatatgcattctgagacgcatgctgtgggtagtggcgatttatcatcactgcaagcctctcaggatgaatttgaaacgatggtccgtaacctggacgtaaagtcccgtttaatggatcagtatgccagctggaaaggcgtgcgttaccgcctcggcggcagcacccgcaagggtatcgactgctcagcgtttgtgcagcgcaccttccgcgaacaatttggtctggaactgccgcgttcaacttctgaacagcaggaaaccggaaaatcgatttctcgtgcccaactgcgtacaggcgatctggttctgtttcgcgccggctctaccggccgccatgtcgggatctacctcggcaacaaccagtttgttcacgcctccaccagcagcggggtgactatctccagcatggatgagccatactggaaaaagcgctacaatgaagcgcgtcgagtcctgagccgctcgtaa

SEQ ID NO: 137072 - DNA, 708 bp, Enterobacter cloacae
atgatgaaaaaccgaattcctttaatcctgctgcttaacatcgcgggtgtagcgctattttgctcctggtatctgccagccaaccatggcgcgtggttgccggtcgactccgcgatcttccatttctttaaccatggcgtcagcgtcagccatgcttatgcctggctactggcgatcatcaacaatcgcgccttcgacgcctgttcgctgctggcgatgggctgcctgatgctgagctattggctaaaggcgccgactgcaggccgtcgtcagatcgccatcatgggcctggtgatgctgctggcggcggtgatcatcaaccagctcgcacaacacctgatgccggtacagcgcgccagcccgtcgctgttttttagcgatattacccgcgtcagcgacgtcgttaacttccccactaaggatgcgtcgaaggacagtttccctggcgatcatgggatgatgctgctgatcttcgcgagctttatgtggcgctattttggccgtcgcgcgctgggcgtcgcgctgattatctttgtggtctttgctttcccgcgggtaatgattggcgcccactggtttagcgatattgccgtcggctccctgaccgccgtgctgatcggcgcgccctgggtattgatgaccccgctgagcgataaattgatcgcctttttcgatcgctacttacccagtagaatatcggccaaataa

SEQ ID NO: 137073 - DNA, 978 bp, Enterobacter cloacae
gtgaccagaaccaatttgatcaccggctttctcggcagcggtaagacgacctcgattcttcatctgctggcgcagaagcctgcggatgaaaaatgggccgtactggttaacgagtttggcgaagtcgggatagacggcgcgctgctggccgacagcggcgccctgctcaaagagatccccggcggctgcatgtgctgcgtcaatggcctgccgatgcaggttgggctgaacaccctgctgcgccagggcaaacccgatcgcctgctgatcgaacccaccggtttgggccacccaaagcagatcctcgatatcctcaccgcggcggtgtatgagccctggatcgatctgcgcgccacgctgtgcatcctcgatccccgccagctgctggatgaaagagccgtcagcaacgacaacttccgcgatcagctggccgcggcggacatcattgtggcgaataaaagtgatcgggaaaccgccgaaagcgcccgggcgctggccgactggtggcagcgctggggcggcgagcgtcgcaaggtgtcggcaatccagggcaatatcgatctgaccctgctcgatgagccacgacggaacaccgccccgctgccggcgagcgcggagcacgcccaccgccatccccccacttccggcctcgccgcgctcagcctggcggaacaccagcgctggcgccgacatctcaacaatggccagggctatcagggctgcggctggatcttcgacgcggagacggtttttgacaccatcggcctgctcgaatgggccaggctggcgccagtggggcgcgttaaaggcgtgatgcgcattgccgagggggcggtacgaatcaaccgtcagggggaggatctccatatcgagaccctcagcgtcgctccgcccgatagtcggatcgagcttatttccgcgaatgaagccgactggaacgcactccagacctcgttgttgaggcttcgtttaagttaa

SEQ ID NO: 137074 - DNA, 1485 bp, Enterobacter cloacae
  misc_feature (674)..(683): n is a, c, g, or t
atgacaacaattgcaaccgctacgctaccgaagaacgtgcaataccctcaatacgatcgcagccaactccgctcgcgtattgtccatttcggctttggcgcgtttcaccgcgcgcaccaggcgctgctcaccgatcgcgtgctgaataacgtcggcggcgactgggggatctgtgaaatcagtctgttcagcggcgacacgctgatgagccaacttcgcgaacaggaccatctgtttaccgtgctggaaaaaggcgccgacggcaaccagcccattgtgatcggcgcggtgcacgaatgtctgaacgccaggctcgattcgctggcggcgattatcgaaaaattttgcgagccgcaggtagcgattgtctcgctgaccattacggaaaaaggctactgcatcgatccggcgaccgggaaactggatccgacgcatccgcgcattattcacgatctggagaatccgacgctgccgcagtcagctcccggtattttagttgaagcgctggcccgccgccgggaacgaggccttccgccctttaccgtgctctcctgcgataatatccccgacaacggtcacgtggtaaaaaatgccgtcctcggcatggcggaaaaacgcagcccggcgctggcggactggatcgccgacaacgtcagcttcccgggcaccatggnnnnnnnnnncaccatggtggatcgcattgttcccgcggccacaccggagtcgctggcggaaatcgccgccgtgctgggggtcgacgatccctgcgccatcagttgcgaacccttcattcagtgggtggtcgaagatcactttgtcgccgggcgccccgcctgggagacggcgggcgtgcagatgaccgatgacgtgttgccctgggagcaaatgaagctgcggatgctcaacggcagccactctttcctcgcctggcttggctatctggcagggcatgcgcacattagcgactgcatgcgggatgacgtcttccgccgcgccgcccgccagctgatgcttgacgaacaggctccgacgctgaccattaccggcgttgatctgctggcctatgccgacagtctcatcgcccgcttcagcaatccggcgctcaaacaccgcacctggcaaatcgccatggacggtagccagaagctgccccagcgcatgctcgatggcatccgcgtacatctggcgcgcgacagccgttggccactgctggctctcggcgtggccggctggatgcgctacgtcagcggcacggacgacgccggtcagacgatcgacgtgcgcgatccgctggtcgacaagatccggcagcgggtggcccagagcgatgagcagcagcgcgtcgacgccctgctggggctggaggaaatatttggccgcgacctgccgcacaacgcccagtttgtcgccgggatccgcgccgcctggcaacagctggcgacgcacggcgcccgcgaggccgtcgcccgcgcgctgaattcttaa

SEQ ID NO: 137075 - DNA, 1191 bp, Enterobacter cloacae
atggagcaaacctggcggtggtatgggccgaacgatccggtatcgcttgatgatgtacggcaggcgggggcgaccggcgtcgtcactgcgctgcaccatattgcaaacggtcaggtatggccgatcgacgagattaaagcgcgtcaggcgctattagcggcaaaagggttgacctggtcggtcgtcgaaagcattcccgtccacgaggatattaaaacccacagcgggcagtatgcgacctggattgccaactatcagcagagcatccgcaacctcgcggcctgcggcatcgataccgtgtgctacaactttatgccgatcctcgactggacgcgcaccgatctggaatatgagctgccggacggctcccgggcgctgcgtttcgatcagatcgctttcgccgcctttgagctgcatatccttaaacgcccgggagcggaagcggattacagtgaagaagagcagcgtcaggctgaggtctatttcaaggcgatgagcgaagcagatatcgataaactgacccgcaatatcatcgccggcctgccgggagcggaagagggctacacccttgaccagttccgcgcgcgtctggcggagtacgaccacattgataaagcgcagctgcgtgaaaatatggcctatttcctgcgcgccatcgtgccggtgtgcgaagaggtagggatccgtctggctgtgcatccggacgatccgccgcggccgatccttggcctgccgcgtatcgtgtcgactatcgaagatatgcagtggctgaaggagacggtggacagcattaataatggcttcaccatgtgtaccggatcgtatggcgttcgcgccgataacgatctggtgaagatggtggagacctttggcgatcgcatccattttacccatctgcgctctacctgccgtgaagcaaacccgaaaaccttccacgaggcggcgcaccttagcggcgacgtcaatatggtggcggtggtggatgctatcctgcgtgaagagcagcggcgtaaacaggccggcgatctgcgcccgatcccatttcgtccggatcatggtcatcagatgctcgacgatctgcgcaagaaaaccaacccaggctattcggcgattggccgtctcaaggggatggcggaagtgcgcggcgtcgagctggcgctgaaaatgaccaaataccctgaactgctgtaa

SEQ ID NO: 137076 - DNA, 573 bp, Enterobacter cloacae
atgccaagagcgaatgaaattaaaaaaggtatggtgctgaattacaacggcaagctgctgattgtgaaaaatattgatattcagtcacccagcgcccgcggtgctgcgacactgtataaaatgcgcttctccgatgtgcgcaccggcctgaaagtagaagagcgcttcaaaggcgacgatatcgtcgataccgtcaccctgacccgccgtttcgtcgacttctcctacgtcgatggcaacgaatacgtgttcatggataaagaagactataccccttacacctttaccaaagagcagattgaagaagagctgcagtttattccggaaggtgggatgccggacatgcaggtgctgacctgggacggccagctgctggcgctggagctgccgcagaccgttgacctggaaattatcgaaaccgcgccgggtattaaaggtgcgtccgccagctcccgcaccaagccagccaccatgagcaccggcctggtgattcaggtgccggaatacctgaccaccggtgagaaaatccgcattcatatcgaagagtgccgctatatgggccgcgcggattaa

SEQ ID NO: 137077 - DNA, 780 bp, Enterobacter cloacae
atggatattaatgagttccctccgggagttatcgaacatctcggttggtatgtatatcgactgattgatccacgagatggaagcactttttacgtgggtaagggaaaaggcaatcgcgtttttgctcacatgcgcggcgaagtggcagccgctgatgatgatgaactgctcagtaataaactcaagcaacttcgtgagattagattagctggtctggaggtcatccatgtaatccatcggcatggtattgccgatgaaaagactgcttatgaggtggaggctgctctaatcgatgcctacccaggtttgaccaatatcatgaacggtgctggcagtaacgagtatggcgctgcacatattaaagaattaattgcaacgtaccagcctgagacagtggagtttaagcacaaagcgctgatgatatctgttaacagaagttcaaaggatgttgatctctatgacgcagtacgcttcagttggcgtgtaagcctcgaacgtgcaagcaaagctgaagttatcctggctacagtaaaaggaattgtcagaggggtatatgttgctgatgagtggttaaaatctacccgtgacaactttcctgaaatgcgccaatgggatgaagatgatgagtttgaagctactcaaagttcacgctttggttttcgaggtcgcgcggcatctcctgaaattacacagctctatcttggtaagaagatccctgatgacctcagaaagaaagggtcaatgtctcctgtgaagtattcaccaaattttgattcctga

SEQ ID NO: 137078 - DNA, 1182 bp, Enterobacter cloacae
atggaaaaccgtagcgccgctctcccccgacgcgggttcgatgtcacctcttccgccttcttaatcgtcgcctttctgacgggcattgccggggcgctgcaaaccccgaccctgagcctgtttctgaccaacgaagtgcacgtccgcccggcgatggtcggtttcttttttaccggcagcgcggttattggtattctggtcagtcagttcctcgctggccgctccgaccgtcagggcgatcgcaagcagctgattgtcgtctgctgtctgctgggggtgctggcctgcgtactctttgcctggaaccgcaactatttcattttgctgttcatcggcgtttttctcagcagctttggatcgaccgccaacccgcagatgtttgccctcgcgcgggagcatgccgacaggaccggccgcgaagcggtgatgttcagctccattttacgtgcccaggtctccctggcatgggtgattggtcccccgctggcctacgccctggcgatggggtttggttttaccgcgatgtatctcagcgccgcggcggcgtttatcgtctgcgggatcatggtctggctattcttgcccagcatgcgcaaagaaaacccggtagcgaccggccggctggaagctccgcgcacgcatcgccgcgatgcgctgctgctgttcagcatctgcaccctgatgtggggtactaacagcctgtacatcattaacatgccgctgtttatcattaacgagctgcatctgccggagaagctggcggggctgatgatgggcaccgccgccggactggaaattccgaccatgctgattgccggttactacgcccggcgtttcggcaaacgctttctgatgcgtctttctgcagtggccggggtgctgttttacgtcggcatgctgacggtgcatacgccagcgctgctgctggcgatgcaggtgctgaacgccatctatatcgggatcctcgccgggatcggcatgctctatttccaggacctgatgccggggcaggcgggcgcggccaccaccctctataccaatactacccgcgtcggctggatcatcgccggttcactggcgggggtagtggcggagatctggagctatcacgcggtgttctggattgcgctggcgatgggcgttgtcactcaggcctgcctgtggcggataagagacgtgtaa

SEQ ID NO: 137079 - DNA, 1131 bp, Enterobacter cloacae
atgttccagttatctgtgcaggatattcatcccggccagcaggccggtaataaagaagaggccatccggcaggtcgccgccgcgctggtcagcgccggcaacgtggccgatggctacgtgaacggcatgctggcgcgcgagcagcagacctcgaccttcctcggcaacgggattgcgatcccgcacggcacgacggatacgcgtgaccaggtgctgaagaccggcgttcaggtgtttcagttcccgcagggcgtcacctggggcgaagggcagaccgcctatgtggcgatcgggattgccgccagctcagatgaacacctcggcctgctgcgtcagctgacccacgtgctgagcgatgacgcggtcgccgcgcagctgcagtccgccactaccgcggaagagctgcgcgcgctgctgatgggagagaagcagagcgaagcgctgaagctggataacgagaccctcagtctcgacgtcgcggccagcgatctgctgaccctgcaggcgctgaacgcggcgcgtctgaaagaagttggcgctgtcgatgccgccttcgttagccacgtcattaacgatacgccgctgaacctcggtcagggcgtctggctgaacgacagtgcggaaggcaatttgcgcagcgccgtggcggtcagccgcgcggctaacgcctttacccgcgacgagcagccggtttccctgctggtcacggtggcgatggccgacgagcagccgaccgcagtgctgaaccgtctgagcaagctgctgctggacaagaaagctgaacatttgctgaaagccgacgccgccaccgtgctggcgctgctgaccagcgacgacgccattgccgaagatgtgctgagcgccgaattcgtggtgcgcaatgaacacggcctgcatgcccgtccgggcaccatgctggtcaacaccattaaacaattttccagcgacatcaccgtcaccaatctcgacggttccggcaagccggctaacggtcgcagcctgatgaaggttgtggcgctgggtgtgaaaaaaggtcaccgtctgcgttttaccgcgcagggtgaggatgcgcaacaagcgctggatgcgattggcgaagcgatcgccgcaggccttggggagggcgcataa

SEQ ID NO: 137080 - DNA, 939 bp, Enterobacter cloacae
atgagcagacgtgtagcaacgattacgttaaacccggcatacgacctggtgggattcaccccggagattgaacgcggcgaagtgaacctggtgcgcaccaccggcctgcacgctgccgggaaaggcattaatgtggcgaaagtgctgaaagatctgggcattgacgtcaccgtcggcggtttcctgggtaaagacaaccaggacggctttcagcagctgttcagcgagctggggatcgccaaccgtttccaggtggtgcagggccggacccgtatcaacgttaagctgacggaaaaagatggcgaagtgaccgatttcaacttctccggctttgaagtcaccccgggcgactgggaacgcttcgtcaacgactccctgagctggctcgggcagttcgatatggtctgcgtcagcggcagcctgccgtccggcgttagcccggaagccttcaccgactggatgacccgtctgcgcagtcagtgcccatgcatcattttcgacagcagccgcgaagcgttggttgccggactaaaagcggcgccgtggctggtgaaaccgaaccgtcgcgaactggaaatctgggctggccgcaagctgccggagatgaaagatgttatcgacgccgcccatgcgctgcgcgagcagggtatcgcccacgtggtgatctccctgggcgaagagggcgcgctgtgggtcaacgcctctggggagtggattgctaaaccaccttcagtggaagtagtcagcaccgttggcgccggcgattcgatggtcggcggcctgatttacggcctgctgatgcgtgaatccagcgagcataccctgcgcctggcgaccgccgtcgctgccctggccgtcagccagagcaatgtaggaattaccgaccgtacccagttggccgcgatgatggcgcgcgtcgacttacaaccctttaattga

SEQ ID NO: 137081 - DNA, 708 bp, Enterobacter cloacae
gtggcgataggcgcccgccgactcttttttcccttcagcagccgcctgaggtttgccggatggctggtacggtttggcttccgccaccgctttatccagctcctgggcggttttcttcagcgccagaccggtggtggtgcggtacatcggcttgccggcgaatttcgccaggtccacctcgatatcggcagcgacgatcaccagatccgcctcggccacctcttccggggtgatggcattgcccgccccaacggagccgcgggtctccaccttcacccaccagccgcgttttttggcttcggtttcgatggcttctgccgccataaaggtgtgggcgacgccggtcggacaggcggtgaccgcgacaatgcgtttctgcccctgagcggcggccggaacggctaccgccgctggcgcaacgtagggcttagcgtggtctttcgcttctcccaggaacagctccggatgggcgacagcacggttaatatcgcccaggtaaacgtttttaccattcagcgcgctatcggccggcagcgcggttcccagcacgatggccagttcggcgtcattcgggttatcaatcagctcaaggtgcgctttcggcgccgcggcacccagcagggttttcgccatgtaggcgcgcgcctgtccgagtccggcatcaataatcagcagcgttttcattatgcctctcctgctgtcaattaa

SEQ ID NO: 137082 - DNA, 258 bp, Enterobacter cloacae
atgatcccgccgataaagccggagccgccgctaaccgccagcataccgccgataaggcccggggtcagacccggacggtcggcaatggagaaggcgataaagcctgccagtaccggcaccattagcgcgaaggccgagccgccgccgatctgcatcagcgccgccgccagggtgtctttcacttcaaacgctttgatcccgaaggcaaaggagagcgcgatacacaggcccccggccacaaccatcggcagcatatag

SEQ ID NO: 137083 - DNA, 1503 bp, Enterobacter cloacae
atgacgatttttgataactatgaagtatggttcgttattggcagccaacatctgtacggcccggaagccctgcgccaggtgacgaagcatgccgaacatgtggtgaacagcctgaatgcggaagccaaactgccgtgcaaactggtccttaagccgctgggcaccaccccggacgagatcacccatatctgccgcgacgccaactacgatgacaaatgcgccgggttagtggtctggctgcataccttctcgccggcaaaaatgtggatcaacggcctgaccatcctcaataagccgctgctgcagttccatactcagtacaacgccgcgctgccgtgggacagcatcgatatggactttatgaacctgaaccagaccgcgcacggcggccgcgagttcggcttcatcggcgcccgcatgcgccagcaacacagcgtggtcaccggccactggcaggataaagaggcccaccagcgtatcggcggctggatgcgtcaggcggtctccaaacaggatacccgtcatctgaaagtgtgccgtttcggcgataacatgcgcgaagtggcggtgaccgacggcgataaagtcgcggcgcagattaagtttggcttctcggtgaacacctgggcggtcggcgatctggtgcaggtggtgaacagcatcagcgacggcgatatcagcgccctggtcgatgaatatgagagcagctaccgtctgaccccggcagcgcaggttcacggcgagaagcgccagaacgtgctggacgccgcgcgcattgagctggggatgaaacgcttcctcgaacagggcggtttccacgcctttaccaccacctttgaagatctccacggcctgaaacagctcccgggtctcgccgtacagcgcctgatgcagcagggctacggctttgccggcgagggcgactggaaaaccgccgctctgcttcgcatcatgaaggtgatgtcaactggtctgcagggcggcacctcctttatggaggattacacctaccacttcgacaatggtaacgatctggtgctcggctcgcacatgctggaagtgtgcccgacgatcgccaccgccgagaaaccgatcctcgacgttcagccgctgggcatcggcggcaaagcggatccagcgcgcctgatcttcaatactcaaaccggcccggcgatcgtcgccagcctgatcgacctgggagaccgcttccgtctgctggtcaataccatcgaaaccgtcccaacgccgcacgatctgccgaagctgccggtggccaacgccctgtggaaagcgcagccggatctgcgtaccgcgtcggaagcctggatcatcgccggcggcgcgcaccataccgtcttcagccatgcgctgaacctcgacgatatgcgccagttcgccgagctgcatgatatcgagctgaccgtcatcgacaacgatacccgtctgccgtccttcaaggacgcgctgcgctggaatgaagtgtattacggttcaaaacgctaa

SEQ ID NO: 137084 - DNA, 843 bp, Enterobacter cloacae
gtgaaagtcatcggcacctccacctgcgacatcctgattgccgataaagagagcgtcggcgagcgcacggtaaaaggtatctgcgggcaggttgacggcagcgtggttccgcactttatcggcatggaggcaggccagtccgccttcggcgatatttacgcctggtttggccgcattctcggctggccgctggaacagctggctcagcagcagccggcgttgcgcgagcaaatcaaagccagccaaaaacagttactgccggcgctcaccgaagcctgggccaataatccgtccctcgatcacctgccggtggtgctcgactggttcaacggccgccgcacgccgaatgccaaccagcgtctgaaaggggtgatcaccgatcttaacctggcgaccgacgcgccggcgctgttcggtggcctcatcgccgccaccgcctttggcgcccgcgccattatggagtgcttcaccgagcaggggatcccggttaacaacgtcatggcgcttggcggtatcgcacggaaaaaccaggtcatcatgcaggcctgctgcgatgtgctgaaccgcccgctgcagattgtcgcctccgatcagtgctgtgcgctgggggcggctatcttcgccgccgtcgccgccggcgtctatgacgatattcccgccgcccagcagcggatggcaagccaggtggaaaccaccctgcagccacgcccggcgcaggcgcaacgtttcgaacaactctatcagcgctaccagcagtggtcggtcagcgcggaacaacactatctcccttcggctgcaaaggcggaaaaagccccgcaatctcaggcagcgctcacccattaa

SEQ ID NO: 137085 - DNA, 861 bp, Enterobacter cloacae
  misc_feature (834)..(843): n is a, c, g, or t
atggcaattgcgattggcctcgactttggtagtgactcagtccgcgctctggcggtggaatgcgcgtccggcgcagagctggcgaccagcgtggagtggtatccgcgctggcgggaaggacagtattgcgatggcgctaacaaccgcttccgccatcacccgcgagattacatcgagtccatggaagcggcgctgaaaagcgtgctcgcttcgctgagcgccgaacagcgcgccgacgtcgtgggcattggcgtcgacagcaccggctcaactccggctcccgtcgatgccgagggcaacgtgctggcgctgcgcgaagaattcgctgacaaccctaacgccatgtttgtcctgtggaaggatcacaccgcggtcgaggaagccgaggcgatcacccgcctgtgtcaccagccgggcaaagaggattactcgcgctatatcggcgggatctactccagcgaatggttctgggccaaaatccttcacgtcacccgcgaagatagcgccgtcgcccaggcagccgcctcgtgggtagagctttgcgactgggtgcccgccctgctctccggtactacgcgtccgcaggatctgcgccgcggccgctgcagcgccggacataaatcgctgtggcatgagagctggggcggtctgccgccggccagcttcttcgatgagcttgatcccatcatcaaccagcatctggcctggccgctgttcaccgatacctggacggccgatgtgccggtcggcacgctgagcgcagagtgggcccagcgcctgggtctgtcgcagaccgtggccatctccggcggcgccttcgactgccatatgggnnnnnnnnnncgccggggcgcaacctaa

SEQ ID NO: 137086 - DNA, 768 bp, Enterobacter cloacae
atgcaagcattgctcgaacactttattacccaatccacggtctactcattgttagccgtgatgctggtggcctttctcgagtcgctggcgctggtggggcttatcttacccggcacggtgatgatggctggccttggggcgctcatcggcggcggcgaagttaacttctggcaggcgtggctggcggggattgtcggctgcctgctgggcgactggatctcattctggctcggctggcgctttaagaagccgttgcaccgctggtcgtttatgaagaaaaaccgcgccctgctggagaaaaccgagcatgcgctgcatcagcacagcatgatcaccattctgattggccgctttgtcggaccgacgcgtccgctggtgccaatggtcgccgggatgctcgacctgccggtggccaagttcgtgctaccgaatattatcggctgcctgctctggccgccgctctatttccttccgggcattctcgccggggcggcgattgatattccggctgatgaaaacagcgccagctttaaatggctgctattgggggcggcgctgctggcctggctggcgggatggctgtgctggcggctgtggcggagcgcgaaaacctcaggcgatcggctgacccgctggctgccgcgcggccgactgctgtggctgtcgccgctgatggtcgcgctggcggctacagcgttaacatttgtcttccgccatccgctgatgccggtctatctggcgatcctgcacaaagtcatcgcgcgctga

SEQ ID NO: 137087 - DNA, 702 bp, Enterobacter cloacae
atgctaaaactcaatgatgtgacctggctataccagcatctgccgatgcgcttcaccctcgacgtcgcgcgcggggagcgcatcgcggtgctcggtcccagcggcgccggaaagagcaccctgctgaatctgatcgccgggtttctgccacccgccagcggcagcctgctgattaacggcgaggcgcataacgcgacgccgccggcgcagcgtccggtctcgatgttgtttcaggagaataacctgtttaaccatctgaccattcgacaaaatatcagcctcggcatccacccaggccttaaactgaaccgcgagcagcaggcgcaggtcacggcgatagctggacagatgggaattgatgcgctgctggaacgtctgcccggcgagctctccggcggtcagcggcagcgcgcggcgctggcccgctgtctggtgcgccagcagccggtgctgctgctggatgaacccttctcggcgctcgatccggcactgcgccaggagatgctgtccctggtcgccgatgtctgcgagcagcagcagctcaccctgctgatggtctcccacagcgtagaggacgccgcgcgcatcgcgccgcgctcgatggtggtcgccgaagggcgcattgtctgggatggcgccaccgccgagctgttaagcggccacagcagcgcctcgcatttgatggggatcagcgcgcgatga

SEQ ID NO: 137088 - DNA, 1611 bp, Enterobacter cloacae
atggcaacgcgccgtcagccgctaaaccttcgcgggctgatgccgggcctgttcgccgctacgctgctgtgcgctgtcgcgctggcggcgtttctggcgctgtggtttagcgcccccggcgcgggctggcaatcggtcttcagcgatagctacctgtggcatgtggtccgcttctccttctggcaggcgtcgctgtcagcgctgatctcggtgggaccagccatctttctcgcccgcgcgctttaccggcgtcgcttcccgggccgtacgctgctgctgcgcctgtgcgcgatgaccctgatcctgccggtgctggtggcggtgttcggtatcctcagcgtctatggccgccagggctggctggcctcactatttcacgcgctcggctggcaatgggagttctcgccctacggtctgcagggcatcctgctggcgcacgtctttttcaatatgccgatggcgacccgcctgctgctgcaggcgctggagaacattcccggcgagcagcggcaaattgccgcccagcttggcatgcgcggctatgccttcttccgcctcgtcgaatggccgtggctgcgccggcacattcccgccgtcgccgcgctgatttttatgctctgcttcgccagcttcgccaccgtgctctcgctgggcggcggcccgaaagccaccacgatcgagttggctatctaccaggcgctgagctttgactacgatccggcgcgagcggcaatgctggcgctgatccagatgctctgctgccttgggctggtgctgcttagccagcgtctgagtaaagccgtcgccatcggcgtcagccatgtgcgcggctggcgcgaccctgacgatcgcctgcatagccgcctgagcgacgggttgctgatcggcgccgccctgctgctgctgctcccgccgctgctggcggtcatcgtcgacgggatcaaccgtaatatgctggacgtgctggcgcagccagcgctctggcaggcattgagcacctctctacgcatcgccatcgccgccgggctattgagcgtgcccctgacgatgatgctgttatggagcagccgggagctgcgcgctcgccagcggccgttggccgggcaggcaatggagctgagcggcatgctgatccttgcgatgccgggaattgtgctggcgaccggcttcttcctgctgctcaataacactatcggcctgccggagtccgccgacggcatcgtcatcttcactaatgccctgatggcgatcccctatgcgctgaaagtactggaaaacccgatgcgcgacattgccgcccgctacagcatgctgtgccagtcgctgggtattgaaggctttgcccggctgcgggtggtcgagcttcgcgctctccggcgcccgctggcccaggcgctcgccttcgcctgcgtactgtcgattggcgatttcggcgtggtggcgctgttcggcaacgaggcgttccgcaccctgcctttctatctgtaccagcagataggcgcctaccgcagccaggacggggccgtcaccgccctgctcctgctgctgctctgtttcttgttgtttacgctgattgaaaaacttccggggcgtgatgctaaaactcaatga

SEQ ID NO: 137089 - DNA, 1035 bp, Enterobacter cloacae
  misc_feature (591)..(600): n is a, c, g, or t
gtgttgaaaaaattactcccgctgctggcgctggtcgccatgcccgctttggctaagcctgttcttaccgtctatacctatgactccttctctgccgactggggccccggcccggcggtcaaaaaagcctttgaagcggagtgcggctgcgagctgaagttcgtcgcgctggaagatggcgtttcgctactgaatcgcctgcgcatggaaggcaaaaacagcaaggccgacgttgtgcttggccttgataacaacctgctggaagccgcggcgcagagtaaactgtttgccaaaagcaacgtacccgccagcgcggtcagcgtgccgggcggctgggataatgacacctttgttccctacgactacggctatttcgccttcgtctatgacaaaaacaaactggctaatccaccgaagagcctgaaagagctggtcgagggcccgcaaaaatggcgggtcatctatgaagatccgcgtaccagcaccccgggactgggcctgctgctgtggatgcaaaaggtctatggcgatcaagcgcccgaggcctggcagaagctggccgcgaaaaccgttaccgtcaccaaaggctgnnnnnnnnnncagaagccggccgcgaaaaccgttaccgtcaccaaaggctggagcgaagcctatggcctgttcctgaaaggggaaagcgacctggtgttgagctataccacctcgccggcctaccacatgattgaagagaagaaagacaactatgcggcggcgagcttcgccgagggccactatctgcaggtcgaagttgccgcgcgtaccgccgccagcaagcagccggaactggcggaaaaattcctcaaatttatggtatctcctggcttccagaacgccatccctaccggcaactggatgtatccggtgacccaggtcaccctgccggccgggtttgataccctggtgaagccgcagaccaccctgtcctttaccccgcagcaggtcgccagcgagcgtcaaacctggattagcgcatggcaacgcgccgtcagccgctaa

SEQ ID NO: 137090 - DNA, 1656 bp, Enterobacter cloacae
atgtcttccggccgtctgcaacaacagttcattcgcctatggcagtgctgcgacggcaagtcgcaggagaccacccttaacgagctggcggaaatgctgagctgctcgcgccgccatatgcgcaccctgctcaatatgatggaatcccgcggctggctgacctgggaagcggaggcaggccgcggcaagcgttcgcggctaacctttctctataccggcctcgccctgcagcagcaacgtgccgaagatctccttgagcaggatcgcatcgatcagctggtgcaattggtcggcgataaggctgccgtccgccagatgctggtctcgcatctcggccgcagcttccgccaggggcggcacatcctgcgcgtgctctactatcgtccgatgaagaatttgctgcccggtagcgcgctgcggcgttcggaaacccatattgcccggcaaatattcagcgccctgacgcgggtaaatgaggaaaatggggaactggaagccgatattgcccaccactggcagcagctgacccccacccactggcgctttttcctccgtcccggcatccattttcaccatggccgtgagctggagatggcggatgtgatcgcctctctgcagcgcagcaatgccctgccgctctattcacatatcgaacgcatcgaatcgcccaccgcctggaccctggatattcatctgcgccagcccgaccgctggctgccctggctgctggggcaggtgccggcgatggtgctgccgcaggagtggcagaccatgaaccacttttcctccatgccggtcggcaccggcccctatgccgtggtgcgtaacaaccagaatcagctcaagatccatgcctttgaggactattttggctaccgggcgctgatcgatgaggtgaacgtctgggtgctgccggagattagcgaagagcccaacggcggcctgacgctgcagggcaataccgaaagcgaaaaagcggtagagagtcgcctggaagagggctgctattacctgctgttcgactcgcgaagcccgctgggggccaacgacgcggtgcgccgctggctaagctatctgtttcagcccgccaacctgctctaccatgcgggcgaacactaccagggcaactggtttcccgcctacggcctgctgccgcgctggcatcatgccagcaaccacgcctgcgagaagccggcggggctggagacagtcacccttacctactaccgcgatcacgtcgaacatcgggtgatcggcgggatcatgcgcgacctgctggcggcgcatcaggtaaagctggagatccaggagctggagtacgatgcctggcatcgcggcgaggtggtcagcgatatctggctcaacagcgtgaacttcaccttaccgatcgaattttcgctcttcgcctatctgtacgaagtcccgctgattcagcgctgcattcccattgactggcaggcagacgcctgccgctggcgagcaggagagtttaatccggccacctggagccagcggctgctggccgggcaacatatcgtgccgctgatccaccactggctgatgattcagggtcagcgcagtatgcgcggcgtgaggatgaataccctcggctggttcgattttaaatccgcatggtttgcgccgccggagccgtaa

SEQ ID NO: 137091 - DNA, 153 bp, Enterobacter cloacae
atgatgaggtctaccgcaaaatcgttctaccaacgctacttttctgcgacgcaggaagcgtcctggctggcccgcctgatggcaggacgacagcaggaaattctgggggaactgatgcagtggggagtgacgtcaacgacctctgatcattga

SEQ ID NO: 137092 - DNA, 1185 bp, Enterobacter cloacae
atgctgtggttgatgacgatgggacgacggcttaacggcgtctatgccgcctttatgctggttgcttttatgatgggcgtggcgggcgcgttgcaggcgccgacgttgagtttgtttctcagccgcgaagtgggggcgcaaccgttctgggtgggcctgttctataccgtaaacgccatcgccgggatcctggttagcctgtggctggccaagcgctccgatagccgcggcgaccggcggcggttgattatgttctgctgtctgatggcggttggtaatgcgctgctgtttgccttcaaccgccactatctgacgctgatcacctgcggcgtgatgctggcatccattgccaacgcggccatgccgcagctcttcgcgctggcgcgggagtacgccgacagctcggcgcgggaagtggtgatgttcagctcggtcatgcgcgcccagctgtcgctggcttgggtgattggcccgccgctggcctttatgctggcgctcaactatggcttcaccaccatgttctccattgcggcgggcatttttgtcattagcctcgctctgattgccatcaaactgccttcggttccgcgtgtggaacagccctcggaggaggcggcggcgctagcgcaggccggcggctggcaggacaagaacgtgcgtatgctgtttatcgcctccaccctgatgtggacctgcaacaccatgtacatcattgatatgccgctgtggatcagcagcgatctcgggcttcccgacagcctggccgggatcctgatgggcactgccgccgggctggagataccggcgatgatcctcgccggctactacgtaaagcgctttggcaaacgtaaaatgatggtggcggcggtggccgccggcgtgctgttttatgccggactgatcctgtttcatggtcgcacggcgctgctggctctgcagctgttcaatgccatctttatcggcattatcgccgggataggcatgctgtggttccaggatttaatgccgggacgggcgggagcggcgaccaccctgttcaccaacagtatttccaccggcgtgatccttgccggcgtgatgcagggggcgctgtcccagagctatggtcacgccagcgtttactggacgatcgcggccatttcgctggtgacgctgtttttgaccagcaaggtgaaggatatctga

SEQ ID NO: 137093 - DNA, 1311 bp, Enterobacter cloacae
atgagtatgtcaaactctcaggaagtcctcacttccacatcgggggcgaaaaaaagaagccgcgtacggatagttattctgctgctactctccgtcggaacgatgatcaattatctcgaccgtaccatcctgggtattgtagcgccacagttaagcaaagaaatccatatcgatccggcgatgatgggcatcatcttctccgccttcgcctggacttatgcgctggcgcagatccccggcgggatgtttttagaccgctttggcaacaaactgacctatgccctgtcaattttcttctggtcgctgtttaccctgctgcaaagtttcaccctcggcctaaaatccctgctgcttctgcgcctgggactcggcgtcagcgaagcgccctgctttccggccaacagccgcatcgtcagcacctggttccctcagcatgagcgcgcgcgggcaacggcaacgtatacagttggtgaatatatagggctggccgctttctcgccgctgttatttttaattctcgaacatcatggctggagaacgctttttttcctcaccggcggattaggtattttatttactttagtgtggtggcgtttttatcatgaaccgcatgaatcgcgcacggctaatcaagcggagctggagtatatcggcgcaaacggcattaacaataaaatccagaacgttccatttaactggcgtgacgccagacgcctgctgggctgtcgccagatcctcggcgccagcctgggtcagttcgccggcaacaccacactggtctttttcctgacgtggtttcccagctacctcgccaacgagcgccatcttccatggctgcacgtcggcttcttcgccacctggcccttccttgccgccgcgattggcatcctcttcggcggctggatctccgaccggttgttgaagcgaaccggctccgtcaacatcagtcgaaagttaccaataatttccggtttattgctgtccagctgtattatcgcggcgaattgggtaagcgccaatagcaccgtaattattatcatgtcggtggctttttttggccaggggatggtcggtctgggctggaccttaatttcggatattgccccggaaaatatggcaggcctcaccggcggcatatttaatttctgtgccaatatggcctcgattatcgcaccactgataattggtgtgattatttccgccacgggtaatttcttttacgcgctgatctacgtcggcctgacggcgctgattggggtgattgcctacatttttatcatcggcgacattaagcgtatcgaactcaagtag

SEQ ID NO: 137094 - DNA, 897 bp, Enterobacter cloacae
atgaacctaaagcaactttattattttaaacgtctgtctgaaactgagcattacaccgaagccgcctccagtctgtgcatcacccagccctcgctaagccacgcgatatcggagctggagaaggagttaggggtcgcgctattcgccagacaggggcggaacgtaaaaattacccaaaacggcaagcgttttttgccgtatgttgaagatgcgctggcctcgctggagaacggacgcatgatattgcaaaaaaatggcgctgagaataaagagaatattcgcatcgcctttatttacacgatgggggagtatgttgttccacagttaattaataaatattctctttcacctgaatgtcacaatgtgactttttcttttactcaagggacatcgctgacgctgttgcaggagctgaaggccggaaaagtcgatctggcgatctgctcttatattgccgatgaacccgatatcgattttattccggtgatccagcaggaactggtggtggtcacggcaaaggatcatccgctggcccggctatatgaacatgaagtcgatctggtggagacgattcattatccgtatatctatttttcagaaaatagcggcttacgtccgtttatcgataatgtatttatgcagcaaaagctggtgccggagatcgcctgctatgtggatgaggatacggcgatggccgggctggtgagtattgactacgggatcgcgatcatgccgcgcatcaccgcgctctcctattacaacgtccatatcctgaagattaaaaacaccatccccccccgctatatctatctggcgaccatgaaagacaaggggctctctccggcgctggagtcatttaaaaatgtggttatccacgacagccagaagatctgttaa

SEQ ID NO: 137095 - DNA, 756 bp, Enterobacter cloacae
atgacaaatgcagtaaccgtaaagaacatcacctttcaggaaggggaaaccctcatttgtgtaccgctgatcggtaaaaccctggatgagatactgggtaacgcccacggcctggtcgatgccggcgctgatattatcgaatggcgcgttgaccactttgcccaggtcagagagatggcccaggtgatggccgcgctggcggaaatccgtggcgcgctgaaagcgcttccgctgctatttaccttccgcagtaagaaagaaggtggcgaaaccgagctcagcgacgaagcctattttgcgctcaaccgcgaggccgcacgcagtggactggttgatgttatcgatatcgaactgttcaatgatgaagcgcagatccgcgcgctggttgacgatgcgcatgccgcgggcgtcaaggtgatcatgagtaatcatgattttcataagacccccgctcaggaagatattatctatcgcctgcgccgcatgcaggatctgggggccgatctgccgaagatcgcggtgatgccgcagtcgccgcaggacgtactcaccttgctcgccgccacgctgactatgaaagagaagtatgcgacgcgtccgctgatcaccatgtcgatgggcaaatccggtggcgttagccgggtcaccgggcgcttgttcggttcggcgatgaccttcggtaccgttggtcaggcctccgcgccggggcagatcgccatcgctaagctgcgtgaagtgatggatattctctcctga

SEQ ID NO: 137096 - DNA, 1215 bp, Enterobacter cloacae
atgaaaaataaatacatccctactgcggcagggctgtacctcaactacctgatccacggtatgggggtgctgttaatcaccctcaacatggcccatcttcaggaacagtggggaacggacgcggctggcgtatcggtggtgatctcctcgttaggtatcggcaaactggcaaccatcgtgaccggatttctctcggatcgcttcggtcgcaagccctttatctatcttgggatcctgagctacctgatctttttcgtcggcatcctgctgaccaaaaatatctatctggcttacgtgttcggcattatggcgggcctggcgaacagcttcctcgactccggtacctatccggcgctgatggaatctttcccgcactctgccagccgggccaacgtgctgatcaaagccttcgtctctgcagggcagttcctgttgccgttcattatcagcttcctgatatgggcaaatctgtggttcggctggtcgttcgtgattgcggcagcgctctttgtactgagcgggatttatctgcttaaaatgccgttccctgacagccaggcggcgaaaaaagaggaagcccctacggcacaggcggaaacagccgtccggccacaggctaataagctggatatggtgatcttcaccctgtacggttatatcggcatggcgaccttctatctggtcagccaatggctggcgcagtacggccagttcgtcgtcggcctgccctatgcctcggcgattaaactgcttagcatctataccgtcggctcgctggtctgcgtctttgtaactgccgccttcgtcaaagaggtgtttagctcggccattgcgatgattatttatactggcctgtcgatgatttcgctgctgttggtgtgcctgttcccgacgccgatgatggtgaccggctttgcttttgtcatcggctttgccgccgctggcggagtgctgcagctgggtgcgacaatcatggcgatgagcttcccgaacggaaaaggcaaagcaaccggcatcttctacactgccggcagtatcgccagcttcacgatcccgttgatcaccgcaaagctttcgcagatcagtattgccagcattatgtggtttgattttctgatcgccgttatcggctttgtgatcgccctgtacatcggctatcgtcaactgcaggctcgggcggcgcaaaaagtgtcacgcaccgcagtcaccgcctga

SEQ ID NO: 137097 - DNA, 864 bp, Enterobacter cloacae
atggcagaacgtattactggacacactgagctgattggcctgatcgccaccccgattcgtcacagcatgtcgcccaccatgcacaacgaggctttcgcccatctcgggctggactacgtctatctcgcttttgaagtcggtaaccaggagctaaaagacgtggtgcagggcttccgggcgatgaagctacgcggttttaacgtctctatgccgaacaaaaccgagatttgccagtatctcgataaactgtcgccggcggcacagctggtcggggcggtcaataccgtggtcaacgacgacggcgtactgaccggacatatcaccgatggcaccggctacatgcgcgcccttagcgaagccggtatcgatatcatcggcaagaagatgaccgtactcggcgccggcggcgcggcaacggcgctctgcgtccaggcagcactggatggcgtgaaggcgatctccatcttcaaccgccgcgataaattcttcgccaacgcagaagaaaccgtggccaagatccgccacaacaccgactgcgagatccatctgttcgatctcgacgatcatgacaagctgcgcgccgaaattgacagcagcgtgatcctgaccaatgccaccggggtcggcatgaagccgttcgaaggccagatgctgctacctgacgacagcttcctgcgtccggacctgatcgtctccgacgtcgtctacaacccgcgcaaaacccacctgctggaagtggccgagaaaaaaggctgccgcacgctgaacggcctggggatgatgctgtggcaaggcgcgcgcgcgttcgaaatctggacgggcaaacagatgccggttgattacatcaagagcattctgttctaa

SEQ ID NO: 137098 - DNA, 306 bp, Enterobacter cloacae
atgaatacccaactgatggcggtcgctgccgaccatttccaggtgaaaaatacacagcaaaccttcgatattcccttcgactacggctttgtctgtctggggatgcgcgccaaccggacgggtctcgacgagatcgagcgctgggccaatgccaataacgtcaaaatcatgaacatcggcgacagcgtgatggcgcgacgcattatcgatggcgtccgcgaaggccgcaacgtactggatgcactggaagacatgggtgcgctgggcagccgcgaagcacaacgaattccctttctaacttattga

SEQ ID NO: 137099 - DNA, 735 bp, Enterobacter cloacae
atgagcaagatgtccaagtcgaaaaacaacggcatcgacccgcaggtgatggttgagcgctacggtgcggataccgtgcgtctgttcatgatgtttgcgtccccggcggatatgaccctcgagtggcaggaatctggcgttgaaggggcgaaccgcttcctgaaacgcgtctggaaactggtctacgagcacaccactaaaggagaggttgcggcactgaacgtggcggctctgagcgaagatcagaaagcgctgcgtcgcgatatccacaaaaccatcgccaaagtgaccgatgacatcggccgtcgtcagaccttcaacaccgccatcgcggcaatcatggagctgatgaacaagctggcgaaagcgccgcaggaagatgagcaggatcgtgcgctgatgcaggaagctctgctggcggtggtgcgtatgctcaacccgttcactccgcacgccagcttcaccctgtggcgtgagctgaacggcgaaggcgatatcgacaacgcgccgtggccggtagcggatgagagcgcgatggtggaagacagcaccctcgtcgtcgtccaggtcaatggcaaagttcgtggtaaaattaccgttgcggtagatgcaactgaagagcaggttcgcgagcgcgccggccaggaacatctggtggcgaaatatctcgacggtaaaaccgtgcgtaaagtgatttacgttccgggtaaactgctcaatctggtcgttggctaa

SEQ ID NO: 137100 - DNA, 591 bp, Enterobacter cloacae
gtgcgatatctggtaacaatgttgttatctctggcggtgctcgtcaccgccggctgtggctggcatttgcgtagcactaccaaggtgcccgccaccatgaaaaccatgattttccagtcgagcgatccgaacggcccgttaagccgcgcggtacgtaatcagctgcgtcttaacggcgtggaactgatcgacgccagcacgctgcgtaaagatgtcccttctctgcgcctcgatggctcgtcgattcagaaagataccgcatcggtgttccaggatggtcgtacggcggagtatcagatggtcatgaccgttcatgccagcgtcctgatcccgggtcacgatatctatccgattaccaccaaggtctatcggtcgttctttgataacccgcaggcggcattagcgaaagacgccgagcaggatatgattatccaggaaatgtacgacaaagcggcggaacagctgattcgtaagctgccaagcgttcaggtagcggatgttgaagcaacccagcaggaagagaaaccggtcgccagcagcgcggcgccggcttcctcgggtaaccgcgtctccaccacgctgggtcaatga

SEQ ID NO: 137101 - DNA, 1035 bp, Enterobacter cloacae
atgatgattcggttgtacccggaacagctccgcgcgcagctcactgaagggctgcgcgcggcctatctgctgcttggcaacgatcccctgctgttgcaggaaagccaggacgccattcgcgaagctgctgccgcgcagggctttaccgagcaccatactttttcaatcgacaacagcaccgactggcaggcgattttcgccttaagccaggcgatgagcctgtttgccagccggcaaaccctgctgttgatcctaccggaaaacggccccaacgcggcgatcaatgaacagctcgccacgctggttggcctgctgcacgacgacctgctgctgatagttcgcggaaataagctgaccaaagcccaggagaatgccgcatggctcaccgccctggctcagcgcgccgtccaggtcagttgccagacgccggaatacgcgcagctgccgcgctggctggccgcccgggccaaacagcatcagctgcagctcgacgacgcggccagtcagctgctgtgctactgttacgaaggcaatctgctggcgctggcgcaggcgctggagcgtctggtgctgctctggccggacggtaagctaaccctgccccgcgttgagcaagcggtaaacgatgccgcgcactttacgccttaccattgggtcgatgccctactggcaggcaaaagtaagcgcgtgctgcacgtcctgcagcagttacgccttgaaggctgcgagccggcgatcctgctgcgtactctgcagcgggagctgctgctgctggttaccctcaagcgccaggcgacgcacacgccgctgcgctcgctgtttgataaacatcgggtctggcaaaaccgccgtcagctgctcagcgacgccctcacgcgcctgagcggggaacagctgcgccaggcggtgacccttctgacccgcgcggagctcacctttaaacaggattacgggcacgacgtctggcccgaactggaaagtctttcgttgttgctctgccacaaagccctggcggacgtttttattgatggttga

SEQ ID NO: 137102 - DNA, 651 bp, Enterobacter cloacae
atggttgatatgactcagttacaggcaatctatggcggcaccttcgatccggtgcattacggtcacctcaagccggttgagatcctggcgaatcagattggcctgagcaaggtcatcatcatgcctaacaacgtcccgccgcaccggccgcagccggaagccaccagcgcccagcgcgtgcacatgctgaagctggcgattgccgataaaccgctgttcacgctcgatgaacgcgaactacggcgcgataccccctcctggacggcgcaaacgctgcaggagtggcgccaggagcaggggccgcgcaaaccgctggcgtttatcattggccaggattcgctactgacctttcccacctggcacaactatgaaaccattctcgacaatgtccacctgattgtttgccgccgcccgggttacccgctgaccatggcgcaggaagcggatcagcgctggctggatcgccatttaacccacgacgtggagtctctgcataaccgcccttccggcgtgatctacctggctgagacgccgtggttcgatatttccgcgacgatcatccgccagcgccttgagcgcggcgagtcctgcgccgagatgctgcctgccgccgtgctggattacatccgcgagcagggactctattgctga

SEQ ID NO: 137103 - DNA, 630 bp, Enterobacter cloacae
atgaaattgtggttagttcgccatggcgaaaccgaagccaacgttgccgggttatacagcggccatgccccaacgcccctgacgccgcgcggcgtcgctcaggcgcgcgcgctcggcgaacggctgcgcctggcgcctttcgataaagtattctgtagcgagctggcgcggaccgggacaacggccgatctgctgcttggcgaccgcgctattccgcgtgagcgccatcccgcgctcaatgagatgtttttcggcgactgggagatgcgtcatcatcgcgacctccagcgagaagatgcggaaaactatgccgcctggtgtgccgactggcagcatgcggcccccaccaacggcgaaagctttcagaattttgcccgccgcgtcagcgagtttatcccaacgctgaccgactgccgccatcttgaccatctgctgatcgtcggccatcagggcgtcctgagcctgctgaccgccctgctgttgcagatgcctgcggcggcgatgtggcactttcccattgcccatggcgcctggagcctcctcgaaatccgcgacgatttcaccaccctgcgggtattaaatagccaggccgtctggcggccgcaagaagaattcccaccagaccattga

SEQ ID NO: 137104 - DNA, 318 bp, Enterobacter cloacae
ttgcagggtaaagcactccaggattttgttatcgacaaaattgatgacctgaaaggtcaggacatcgttgccattgatgtacatggcaaatccagcatcaccgattgcatgattatctgcaccggcacctccacgcgtcatgtgatgtctatcgccgaccacgtggttcaggagtcccgcgccgccggcatgctgccgctgggcgttgaaggggaagccgccgccgactggatcgtcgtcgacctcggcgacgtgatggtccacgtcatgcaggaagagagccgtcgtctgtacgagctggaaaaactctggagttaa

SEQ ID NO: 137105 - DNA, 468 bp, Enterobacter cloacae
gtgaagttgcagctggtggccgttggcaccaaaatgccggactgggtacagaccggctttagcgagtatctgcgccgttttcccaaagatatgccgttcgagctggtggagatccctgccggtaagcgcggtaagaacgctgatatcaaacgcatcctcgaaaaagagggcgagatgatgttagccgctgccggtaagaaccgcatcgtgaccctggatattccgggtaaaccatgggatacaccgcagctggcgcgcgaactggaacgctggaaacaggacggacgcgacgtcagtttactggtaggcggcccggaaggtctctctcccgcctgtaaagcagcggcggaacagagttggtcgctctccaccctcaccttacctcacccgctggtgcgcgtactggtggccgagagtctgtaccgggcgtggagcatcaccaccaaccacccgtaccaccgtgagtaa

SEQ ID NO: 137106 - DNA, 1902 bp, Enterobacter cloacae
atgaaattacagaattctttccgcgactatacggctgaatcctcgctgttcgtgcgccgggcgctggtcgcttttttggggattttgctgcttaccggcgttctgatcgccaacctgtacaatgtgcaaatcgttcgcttcgacgactatcagacgcgctcgaacgaaaaccgcatcaagctggtgccgatcccgccgagccgcggcattatttacgatcgcaacggcaccccgctggcgcttaaccgcaccatttaccagctggagatgatgccggagaaagtcgataacgtacagcagacgctggatgcgctacgcgacgtcgtcgatttaactgacgatgacatcgccggtttcaaaaaggagcgcgcccgctcccatcgttttacctcgattccggtaaaggtcaacctcagcgaagtgcaggtggcccgctttgccgtcaaccagtaccgctttcccggcgtggaagtcaaaggctacaagcgtcgttattacccctataattcggcgctgactcacgtcattggctatgtctcaaaaattaacgataaagacgtcgaccgcctggataaagagggcaagctggccaactacgcctcgacgcacgacattgggaagctgggtatagagcgttattacgaggacgttctgcacggtcagaccggctacgaagaggttgaagtgaacaaccgcggccgcgtcattcgtcagctgaaagaggtgcctccgcaggccggacgcgacatctacctcaccctcgacctcaagctgcagcagtatattgaaacgctgctggccggcagccgcgccgccgtggtggtgaccgacccgcgtaccggcgctattctggcgctggtttcaaccccgagctatgacccgaacctgttcgtcgacggcatctccagcaaagattactccgcgctgctcaacgacccgaacacaccgctggtcaaccgagcaacgcagggggtctatccgccggcgtcgacggtcaaaccgtacgtcgccgtctcggcgctgagcgccggggtgatcacccgcaacaccagcctcttcgaccccggctggtggcagttgcctggctcagagaaacgctatcgtgactggaaaaagtggggccacggccatctgaacgtcaccaaagcgctcgaggagtctgcagatacctatttctaccaggtcgcctatgacatgggcatcgaccgtctctcagagtggatgagcaagtttggctacggccactacaccggtatcgacctctccgaggagcgctctggcaacatgccgacccgcgaatggaagctcaagcgctttaagaaaccctggtaccagggggacaccattccggtgggcatcggccagggttactggaccgccacgccgatccagatgaacaaagcgctgatgatcctgattaacgacggcgtggtgaaggtgcctcatctgctgcagagcaccgtggaagacggcaagcccgtaccctgggtccagccccatgagccgccggtaggcgatatccattccggctattgggaaatcgccaaagacggcatgtacggcgtggccaaccgcggcaacggcaccgcgcacaaatacttcgccagcgcgccgtataaaatcgcggccaagtcaggtaccgctcaggtgttcggcctgaaggccaacgaaacctataacgcgcaccggatctccgagcgcttgcgcgaccataaactgatgacggcgtttgcgccttataacaacccgcaggttgccgtggcgatgattctggaaaacggcggcgccggcccggcggtcggtaccattatgcgccagatcctcgatcacatcatgctgggcgataacaacactacgctgccaagcgaaaacccggcggtaaccgcaggggaggatcaataa

SEQ ID NO: 137107 - DNA, 1113 bp, Enterobacter cloacae
atgacggataatccgaacaaaaaatcgctatgggataaaatccatcttgaccccaccatgctgcttatcctgctggcgctgctgacctacagcgcgctggttatctggagcgccagcggtcaggacgtcggcatgatggagcgtaaaatcggccagatcgccatgggcgtggtgatcatgatcgtcatggcgcagatcccgccgcgggtctatgaaggctgggcgccctacctctatattttctgtatcatcctgctggtagccgttgacgccttcggcgccatctccaaaggggcgcagcgctggctggatctcggtattgtgcgctttcagccgtcggagatcgccaaaatagccgtgccgctgatggtggcgcggtttattaaccgcgacgtctgtccaccgtcgctgaagaacaccggcattgccctggtgctaatcttcctgccaacgctgctggtggcggcgcagcctgacctcgggacctcgatcctgatcgccctatccgggctgtttgtgctgttcctctccggcctcagctggcgcctgattggtatcgccgtggtgctggtcgccgcctttattccgatcctgtggttcttcctgatgcacgactatcagcgtcagcgcgtgatgatgctcctcgatccggaaaccgacccgctgggcgccggctatcacattattcagtctaaaattgccattggctccggcggtctgcgcggcaaaggctggctgcacggcacccaatcgcagctggagtttctgccggaacgccacaccgactttatcttcgccgtcctcgccgaagagctgggcctgattggcgtactgatcctgctagcgctttatattctgctgattatgcgcggactgtggatcgccgcccaggcgcaaaccacctttggccgggtcatggccggtggtttaatgttgattttattcgtttatgtcttcgtaaatattggtatggtgagtggtattttaccggtggtgggcgtaccgttgccgctggtgagctacgggggctccgccctgatcgtactgatggccgggtttggtatcgtaatgtcgatccatacccacagaaaaatgttgtcgaaaagcgtttaa

SEQ ID NO: 137108 - DNA, 1149 bp, Enterobacter cloacae
atgcgtaagcaatggctggggatctgcatagcagcggggctgctggcggcatgttcgagtgatgacgtgcaacaaaaaacggtcagtactccacagccggccgtctgtaatggcccgacggttgagatcagcggcgccgatccgcaatatgaaacgccgaacgccacggcgaatcaggattatgagcgcgacggtaaaagctacaaaatcgttcaggatccggccaactttactcaggccggtttcgcggcgatctatgacgcagaacccaacagcaacctgaccgccagcggcgaagccttcgatccgactcagttgaccgcagcgcacccgacgctgccgatcccgagctacgcgcggatcactaaccttgccaacggacggatgatcgtcgtgcggattaacgatcgcggtccctatggcaacgatcgggtcatctcgctttcccgcgcatccgctgaccgcctgaacacctccaacaacaccaaagtgcgcatcgaccccatcatcgtcgcgcctgacggttcgctttccggcccggggatggcctgtaccaccgtcgccaaacagacttacgccctgcccgcccgtccgaatctggacggtggggacgccgctggcatgagccaacccgcacccactgacgttcgcccgatcagcaacagcacgctgacgccggcagacagcgtgggcgcgccggtgaacagcggcggtttcctcggcgcgccgacgcccctgaacaacggcgtgctggagagtagcgaaccagcggcagccgccgcgacggctcctgccgccggcgccacgccaacagcgccagtgaccgcgcctggctccattcagggtaatgtggcgcccgctgcggccaccgccgcagccgctggcgccgtggcggcctcgtcctccgcgacctccagcgccagcggtaattttgttgtccaggtgggcgcagtaagcgaccagacgcgggcgcagcagtatcagcagcgcctgagccagcagttttctgtgccaggccgggtcatgcaaaacggcgcggtctggcgtattcagctgggtccctttgctgataaagcacaggccagcaccgtgcagcagcgcctgcaaagcgaagcgcagctgcagtcctttattactcgcgccaactaa

SEQ ID NO: 137109 - DNA, 1272 bp, Enterobacter cloacae
atgctggcccgcagagcatttgctatagtaaggcacttttttaactccatcacggatgccgttgttctgaccatgaagacctctttcaccgctcgtttactcattacggcgctctccgttgcagcgctctcctccgctgcccgcgccgatgacctgaatatcaaaacgatgatcccaggcgccccgcagattgacgccgaatcctggatccttatcgattacaactctggcaaggtactggctgaaaacaatgccgactcccgccgcgacccggccagtctgaccaaaatgatgaccagctatgttatcggtcaggcgatgaaagcgggcaaattcaaagagtccgatctggtcaccgtcggcaacgatgcctgggccaccggcaacccggttttcaaaggctcttctctgatgttcctcaagccgggcatgcaggtgccggtttctcagctgatccgtggtattaacctgcagtccggtaacgatgcctgcgtggcgatggccgactacgtcgccggcagccaggacgccttcgtcagcctgatgaacaactacgtaaacgctctgggcctgaaaaacacccatttccagaccgttcacggtcttgatgctgacggacagtacagctccgcgcgcgacatggcgctgattggccaggcgctgatccgcgacgtaccgaacgagtactccatctatcgtgagaaagagttcaccttcaacggcatccgccagctgaaccgtaacggcctgctgtgggataacagcctgaacgtcgacggcatcaaaaccggccataccgacaaagcgggttacaacctcgtcgcttccgccaccgaaggccagatgcgcctgatctccgcggtaatgggcggccggacgttcaaaggccgtgagtcggaaagcaaaaaactgcttacctggggcttccgcttcttcgaaaccgtcaacccgattaaagctggcaaagagtttgcctccgaaccggcctggttcggcgacagcgatcgcgcttcgctgggggtggataaagacgtctacctgaccattccgcgcggccgaatgaaagatctgaaagccagctacgtgctgaataacactgagctgcacgccccgctgcagaaaaaccaggttgtcggcaccattaacttccagttggatggtaaaaccatcgaccagcgtccgctggtggtcctgcaggaaattccggaaggtaatttcttcggcaaaattattgattacattaaattaatgttccaccactggtttggttaa

SEQ ID NO: 137110 - DNA, 264 bp, Enterobacter cloacae
atgaaaaccaaacttaacgaactgcttgaattccctacgccatttacttacaaagtaatggggcaggcgttgccggagctggttgatcaggtggtggaagtggtacagcgccatgcgcctggtgattactcgccgtcagtaaaaccgagcagcaaaggtaactaccactcggtctccatcaccatcaacgccacccacattgaacaagtggaaacgctgtacgaagagttaggcaatatcgatatcgttcggatggtgctgtaa

SEQ ID NO: 137111 - DNA, 645 bp, Enterobacter cloacae
ttgcaacacaataaaattcttatccggcagcttggcctgcaaccttacgaacccgtctcgcaggcgatgcatgaatttaccgacgcccgtgatgaagataccctcgacgagatctggctggtggaacatcaccccgtattcacccagggtcaggccggcaaagcggaacacgtgctggtgcccggcgatattccggtgatccaaagcgatcgcggcggccaggtcacctatcacggtccgggacagcaggtgatgtacgtcctgttggacctcaagcgccgtaagctgggcgtgcgggagctggtgacgctactggagcaaacggtcgtcaataccctggctgaatatagtatcgagtcgcacccccgcgccgacgcccctggcgtctatgtcggcgaacgcaaaatctgctctctgggattgcggatccgtaaaggttgttctttccacggtctggcgcttaatatcgccatggatctcacaccgtttttgcgtatcaacccctgcggctatgccggtatggagatgacgcaaatgcgccagtggcagccggcagcctccccggagacggtcgccccgcgactggtcgccaatctgctggcgctgctaaatcatccaccacacgaatatcttccccgggattaa

SEQ ID NO: 137112 - DNA, 897 bp, Enterobacter cloacae
atgtttcgcatcctgcgtaatattgacctcaatctgttgacgatctttgaagcggtatacgtacataaaggtatcgtcaacgccgcgaagatactcaatatcacaccctcggcgattagccagtcaattaacaaactgcgggcgttgttccccgatccgctatttatccgcaaaggacagggcgtcacccccaccgcctatgccacccatcttcatcaatacatcagccgcggcatggaagctttcctcagcgcgctggatatcaccggtagcccgcaccagcagcgggtgatcactatcgccactacgccagcgatgggagcgctgctgatgcctggcctggccagcgcgctgaagccgaccttcccgcagatcctgttgcacaatatcgccatcgtcgacgccgcgcggcagcttgaccagcgccaggtggatctgctcattgatacccacctgcacagcggccaggcgataagccatcatgtgctgtatcaggatcgggtacagatgtactgccgcgcagggcatcccgcgctgggcggtccgcaggatgaaacgaccctcgcggagtacgaatttgcgctgctgctgccggaaggccagcgctaccccaccctccatcgccgactacaggaagagatgggcgagcgccgctgcggctttagcacctttaacctgatgacccaggcggcgatgatcgccgggagcgatatgctaggtctgaccaccgaacgcctgttcgccatggtgtcccgtctctggccgctgcagaccctggatttcccttccctgggtggagagcagattgacgttgcgctgcactttaataagctgagcgggaaagagccattgctgaaagagatcatcgagacggtgatccgctcgtttaaggcgtag

SEQ ID NO: 137113 - DNA, 966 bp, Enterobacter cloacae
atgagtaaacccattgtgatggaacgcggtgttaagtaccgcgacgccgataaaatggcccttatcccggtgaaaaacgtggcaactgagcgtgaagctctgctcagaaaaccggaatggatgaaaatcaaacttccggcagactcgtcccgtatccagggaatcaaagcagcgatgcgtaagaacggcctgcactctgtgtgcgaagaggcctcctgcccgaaccttgcagaatgcttcaaccacggtaccgcgacctttatgatcctcggcgcgatctgtacccgccgttgcccgttctgcgacgtcgcgcatggacgcccggtcgcgccagatgcaaacgagccacaaaagctggcgcaaactatcgccgatatgggtctgcgctatgtcgtagtcacctcggtagaccgtgacgacctgcgtgatggcggcgcacagcattttgccgactgcatcagcgccattcgcgagaaaaacccgtcgattaagatcgaaacgctggttccggatttccgcggccgcatggatcgcgcacttgatattctgacggtgaccccgccggatgtcttcaaccataacctcgaaaacgtgccccgtctttatcgtcaggtacgtccgggcgcggattacaactggtcgctgaagctgctggagcgttttaaagaagcgcacccggagatcccgacgaaatccggcctgatggtaggtctgggcgaaaccaacgacgagatcatcgaagtaatgcgcgacctgcgtcgccatggcgtcaccatgctgacgttaggccagtatctgcagccgagccgtcaccacctgccggtgcagcgctacgtcagcccggaagagtttaaagagatgaaagcggaagcgatggcgatgggcttcacccacgccgcctgcggtcccttcgtccgctcttcctatcatgccgacctgcaggctaaagggatggaagttaaataa

SEQ ID NO: 137114 - DNA, 207 bp, Enterobacter cloacae
atgggtgagattagtattaccaaactgctggtagtcgcagcactgattatcttagtgtttggtaccaagaaattacgtacgctgggcggcgacctggggtcggctatcaagggctttaaaaaagccatgaacgaagatgacgatagcgcgaagaaaaccaccgcagaagaagaagcgccggcgcagaagctctctcataaagagtaa

SEQ ID NO: 137115 - DNA, 789 bp, Enterobacter cloacae
atgcgggtagcggcaggacaatttgccgtcacgccagtatggcggacgaatgcgcaaacctgtgtggcgatgatgcagcaggcggagcgagaaggggcggcgctgctggtgctgccggaggcgttgctggcgcgggatgacaacgacccggatctgtcagttaaatcggcccagccgctggatggcgcatttttgcagccgctgttggccgagagcaggcgtaacagcctgaccacggtcctgacgctccatgtgccgtcaggggaggggagagcgaccaacacgttggtggtattgcgggaaggcgcagtgattgcccattatcataaacttcatctatatgacgccttcgcgatgcaggagtcccggcgggtggatcccggtcagcagatcccgccggtgattgaggtggcgggattacgcgttggcctgatgacctgctacgatcttcgctttccggaactggcgctttcgttggccctgaatggggcacagctgctggtgctgcccgctgcatgggtgaaagggccgcagaaagagcatcactgggcgacgctgctggcggcacgcgctctcgatactacctgctatatcgtggcggcaggcgaatgcggaacgcgcaatatcgggctgagccgcatcgtcgatccgctggggaccactctggcgggggccgggagcgagccgcagctgatctttgccgatctctcagcggatgaccttgcgcgcgttcgcgagcgtttgccagtgctgcggaaccgacgatttgcgccaccgcaattattatga

SEQ ID NO: 137116 - DNA, 384 bp, Enterobacter cloacae
gtgtttcaacttctttgcgccgtttttattggcggcggcaccggcagcgtattgcgctggtggctcggcatgaagctcaatcctgtgcaccatgctatcccgattgggactctaacggccaacctgttaggcgcctttgtgattggcgccgggctggcgtggtttaatcgtctgaccgggattgacccgatgtggaaactgctgattaccaccggtttctgcggcggcctgaccacgttctccaccttttctgcggaagtggtgtttctcctgcagcagggccgggtaagctgggcgctgctcaacgtcgcggtaaatttgctgggttcgtttgcgatgacggcgctcgccttctggcttttctcgcaggcggccagccgctaa

SEQ ID NO: 137117 - DNA, 210 bp, Enterobacter cloacae
atgtctaagattaaaggtaacgttaagtggtttaatgagtccaaaggattcggtttcattactccggaagatggcagcaaagatgtattcgtacacttctctgcaatccagtccaacggtttcaaaactctggctgaaggtcagcgcgtagagttcgaaatcactaacggtgccaaaggcccttctgctgcaaacgtcatcgctctgtaa

SEQ ID NO: 137118 - DNA, 519 bp, Enterobacter cloacae
gtgtccggaaacgccagcgcgtcgttttcatcgacccttagcgaaggttaccataccttaagtaataacgtagcgcagacctggaatgagccggagcactatgatttgtacgttccagccatcacctggcatgcgcgctttgcctatgacaaggaaaaaaccgataagtataacgaacgtccgtggggggcaggtttcggcgtctcgcgctgggatgagaaagggaactggcatggcctgtacctgatggcgtttaaagactcttttaataagtgggagcccattggcggctacgggtgggagaaaacctggcgcccgctgacggaccagaatttccacctcggccttggctataccctcggcgtcacggcgcgcgataactggaactacatcccgatcccggtgatcttgccattggcgtcaataggttacggtccggcaactttccagatgacctatattcccggcacctacaataacggtaacgtttacttcgcctgggcgcgcatccagttttaa

SEQ ID NO: 137119 - DNA, 738 bp, Enterobacter cloacae
atgctgacgtttattgagatcctgatagggattgtggtcattgtgggcgtagcccgctatatcattaaaggctactcggccaccggggtgctgttcgtcggaggcttaatcttactgatcgtcagcgccctgctgggacataaagtgttaccgggtaataccgcgagcaccggctattccgctaccgatattattgaatacattaagattctactcatgagccgcggcggcgatctgggcatgatgatcatgatgctgtgcggcttcgccacctatatgacccatattggcgccaatgatatggtggtcaaattagcgtcgaagccgttgcgctatattaattcgccctatctgctgatgattgccgcctattttgtcgcctgcctgatgtcgctggccgtctcctccgcgaccggccttggcgtactgctgatggcgacgctgttcccggtaatggtgaatgtcggtatcagccgcggggccgccgccgccatctgcgcctcaccggcggcgattatcctctcgccaacctcgggtgacgtcgtcctggcggccaaagccgctgaaatgccgctgatcgactttgcttttaaaaccacgctgccgatctccatcgcggccattatctgcatggcgatcgcccactttttctggcagcgctatctggataaaaaagagcacatttctcacgagatgctcgacgctgagagatcccctcataatttccccaaagcgtaa

SEQ ID NO: 137120 - DNA, 732 bp, Enterobacter cloacae
atgagaaaagtcctcaccgtcctgctgctgagcacgctggccatcggaaccgcgtcagccgagacgctccattttggcaccaccacggccaatccaccgtttgtcaccgccaacggcaaaaatcagcccgttggcttcgatatcgatctcgcgcacgccctgtgccagcagatgcaggcgcagtgccagttcacggcgcagcgtttcgataccctgatcccggctttacgctttaagaaatttgacgcggtgattgccggcatggaagtgatcccgatgcgtgagaagcaggtcgccttcagccgaccctatcgccaggcgctctccggggtagtgatcgtcaacaaagatgtcgcccatacctttgccgatctgaaggctaaaaaagtcggcgtggtgaaaggcacgctgcatcagcgctacctgcgtgataaacagaaagccgtacaggctgtcccttacgacgatgtcgccagcgccctggccgcgctgaaagccgggcaaataaccggcgtcatgggcgacttcgccaccctcgacgcctggcagcaggagaaccctgactacgccatcatggatgaacgggccaccgacccggcttattacggtaagcagtatgcgattgcggtgcgcaaagacgatccggagctgctgaacgccatcaacgatgccctggccgcggtcatggcgacacctgacttccagcagatgcagcagaagtggtttaaataa

SEQ ID NO: 137121 - DNA, 546 bp, Enterobacter cloacae
atgagtgcaaatgaaaacaacctcatttggatcgatcttgagatgacagggctggatccggagcgcgatcgcattatcgaaatcgccaccctggtgaccgatgccaacctgaacattctggctgagggcccgaccatcgcggtgcatcagtcggacgctcagctggcattaatggacgagtggaatgtgcggacgcataccggcagcggtctggtggatcgcgtaaaggtcagcaccgtcagcgagcacgatgccgaactggcgaccattgagtttcttaagcagtgggtgccggcgggcaagtcgccgatctgcggcaacagtatcggccaggatcgtcgcttcctgtttaagtacatgccgcaactggaagcctatttccactatcgctatctggacgttagcacgctgaaagagctggcgcgccgctggaagccggaaattctcgacggctttaaaaagcagggcactcatcaggcgatggacgatatccgcgagtcggtcgccgagctggcttactaccgcgaacacttcattaaactgtaa

SEQ ID NO: 137122 - DNA, 1062 bp, Enterobacter cloacae
ttgagtaaaaataaactctccaaaggccagcagcgccgcgtcaaagccaaccaccagcgccgtctgaaaaccactgcggagaaggccgactacgatgacaacctgtttggcgaaacgtcggaaggcattgtcatcagtcgctttggtatgcatgccgacgtcgaatccgctgacggcagcgtgcatcgctgcaatatccgccggacgatccgctcgctggtcaccggcgaccgcgtggtctggcggccgggtaaagacgccgccgacggcgtaagcgtcaaagggatcgtcgaggcggtgcacgatcgcgcctccgtcctgacgcgtccggatttttacgacggcgtgaagcctatcgccgccaatatcgaccagatcgtggtggtttccgcgatcctgcctgagctgtcgctgaatattatcgatcgctatctggtggcctgcgaagcgcaggatatcgagccgctcattgtgctgaataaaatcgatctgctggatgatgatggtctgcgcttcgtcaatgagcaaatggatatctaccgcaacatcggttaccgcgtgctgctggtttccagtcggactcaggacggccttaagccgctggaagcggcactgaccgaccgcatcagtatcttcgccgggcagtccggggtcggtaaatcgagcctgctgaacgccctgctcgggttgagcgaggatcagatcctcaccaatgatgtctcggacgtttccggcttaggtcaacacaccaccaccgcggcacgcctctaccacttcccgcacggcggcgatgtgattgattcaccgggggtacgtgagttcggcctgtggcatctggaagcggaacaaatcaccaacggctttgtcgaattccatgattatttaggccgttgcaaatatcgcgactgtaaacacgataccgatcctggctgtgcgcttcgcgaagcggtagagaacggcaagatcgccgaaagccgttttgagaactaccaccgcatcctggaaagcatggcgcaggtacaggtaaaaacgcgtaaaaacttttcctcgtccgatgactga

SEQ ID NO: 137123 - DNA, 963 bp, Enterobacter cloacae
ttgttaaacgatcttaaactttcactgcaatacattctgcctaaactgtggctcacccgcctcgcaggctggggtgcgagcaaacgcgcaggttggctgacgaagctggtcatcgatctgttcgtgaaatactacaaggtcgatatgaaagaggcgcagaagccggataccgcggcttatcgcaccttcaacgatttcttcgtgcgcccgctgcgcgacgacgttcgcccgctgaataccgatccaaacgtgctggtgatgccggccgatggcgtgatcagccagcttggcgccattgagaacgataaaatcctgcaggctaaaggtcatgactacagtctggaagccctgctggccggcaactatcagatggccgacctgttccgtaacggcagcttcgccaccacctacctgtcgccgcgcgactatcaccgcgtacacatgccgtgcaacggcatcctgcgcgaaatgatctacgttcctggcgacctgttctctgttaaccacttgacggcgcagaacgtgccgaacctgttcgcccgtaacgagcgcgtcatctgcctgtttgatactgagtttggcccgatggcgcaaattctggtgggcgcaactatcgtcggcagcatcgagaccgtgtggtccggcaccgtgaccccgccgcgcgaaggcattattaaacgctggacctggcccgctggcgacaacgaaggctccatcgccttgctgaaaggccaggagatgggccgcttcaaactgggttccaccgtgatcaacctgtttgccccgggccaggtgaagctggtcgacacgctgcaaagcctgtccgtgaccaagatcggccaaccgctggcgacagcagtggaagcgaccgccgccgctgaacccgcgccgttaccggaagaagagatccgcgccgaacaccgcgccagcccgctggttgatgataaacaagaccaaggttaa

SEQ ID NO: 137124 - DNA, 3168 bp, Enterobacter cloacae
  misc_feature (14)..(23): n is a, c, g, or t
ttgaggagcgaaannnnnnnnnncctcgagcgcgcccgtcagtatcaggacgttatcgacaatttccccaaactgtttcaaagcctgcgtgcccagctcaataatctgagcgaagagccgcgccaggtgccaaccggcctgaccgccgatgcgctgaaccaggagatcctgcaggtcagcagccaactgctggaatcgagccgccaggcgcagcaggagcaggatcgcgcgcgtgaaatcgccgactccctgaaccagctgccgcagcagcaaaccgatgcccgtcgtcagctcaatgaggttgagcgccgcatcggcacgcaaaccggcaacaatgctctcgcccaggcgcaaaatcttgccctgcaggcggaatcagcgcgtctgaaggcgctggtggatgaactcgacctcgcccagctctccgccaacaaccgccaggagctgtcgcgcgcccgttccgagctggcgcaaaaacagagcgagcagctggatgcctatctgcaggcgctgcgcaatctgcaaaacagccagcgccagcgggaggcggaaaaggcgctggagagtaccgaactgctggcggagaacagtgaaaacctgccgccggacatcaccgcccagtttaaggtcaaccgtgagctctcccaggcgctgaaccagcaggcgcagcgcatggatctggtggcgtcccagcagcggcaggcgacgaatcaaacgctgcaggtgcgccaggcgttaaacaccctgcgcgagcagtcgcagtggctgggctcctccaatctgctgggcgaagccctgcgcgcccaggtggcgcggctgccggagcgccctcgcccgcagcagctggatacggaaatggcgcagctgcgcgtgcagcgtctgcgctttgaggatttactcagtaagcagccgcagctgcggcaaatccgtcaggccgacggcgaaccgctgaccagcgagcagaacaagatcctgcaggcgcagctgcgcacgcagaacgagctgctgaactcgctactgcgcggcggcgataccctgatgctggagctcaccaagctgaaggtcgccaacggccagctggaagacgcgctgaaggagatcaacgaagccacccaccgctatctgttctggacttcggacgtcagccccatcggcttctcctggccgctggagatcgtccaggatctgcggcgcctgatctccctggataccatcagcgaactgggtaaagccagcgcgatgatgcttaccagcaaagagaccctgctgccgctgtttgccgccctgctgctggttggctttagcatcagctcgcggcgccatttcacccgctttctcgagcgctccagcgcccgggtggggaaagtcacccaggatcacttctggctgacgctgcgcacggtcttctggtcgatactggtggcctcgccgctgccggtgctgtggatgacgctcggctatggtctgcagtccgcctggccgttcccgctggcggtggcgattggcgatggagtcaccgcgacggtgcctttgctgtgggtggtgatgatctgcgccaccttcgcccggccaaacgggctgtttatcgcccacttcggctggccgcgtagccgcgtggcgaaggcgatgcgctactacctgatgagcatcgggctgattgtgccgctgattatggcgctgatcatgttcgataatcttaacgaccgcgaattctccgcttcgctgggccgcctgtgcttcctgctgatctgcggcgcgctggcggtggtcaccctgagccttaagcacgccggtattccgctctatctggataaagaggggaatggcgacaatatggtgaaccgcctgctgtggaacctgatgcttggcgccccgctggtggccatgctggcggccgccgtcggctacctcgccaccgcccaggcgctgcttgcgcgtctggaaacctcggtcgccatctggttcctgctgctggtggtctatcacatcatccgccgctggatgctgatccagcgccgccggctggccttcgaccgggcccgccatcgtcgcgcggaaattctcgctcagcgcgcccgcggcgaagatgagcccgttcacgtcagcagcccggaagggtcggtggagacggaggtcagcgaggtcgacctcgatgccatcagtacccagtcgctgcggcttgtgcgctccctgctgatgctgatcgcgctgctatcggtcatcgtgctgtggtcggaaattcactcggcgtttggcttccttgagaatatctcgctgtgggacgtgacctcgacggtacaaggggtggaaagccttgagcctattacgcttggcgcggtgttgattgccattctggtgctgatcatcaccactcagctggtacgcaacctgcccgcgctgctggagctggcgatcctccagcatctcgatttaacgcccggcaccggctacgccatcaccaccatcactaagtatctgctgatgctggtcggcgggctggtgggcttctcgatgatcggtattgagtggtcgaagctgcagtggctggtcgccgcgctgggtgtgggtctcgggtttggcctgcaggagatcttcgccaactttatctccggcctgattatcctgtttgagaagccgatccgcatcggcgatacggtcaccattcgcgacctgacgggcagcgtcacccgcattaatacccgtgcgaccaccatcagcgactgggaccggaaagagattatcgtgccgaacaaggcgttcattaccgaacagtttatcaactggtcgctgtcggactcggttacccgcgtggtgctgacggtgccggcgcctgtggacgccgataccgaagaggtgacgaaaattctcatcgccgcggcgcatcgctgctcgctggtcatcgataccccggcgccggaggcgtttctcgtcgacctgcagcaggggatccagattttcgagctacgtatttttgccgcggagatggggcaccgcatgccgctgcgccatgagatgcatcagctgatcctggcgggcttccgcgagcatggcattgatatgccgttccctccgttccagatgcgtctggaaagtattgacggcaggcaaagcagtaaaaccatgacctcggccggaaaaaccagccgccgtacggctggtagcctgtaa

SEQ ID NO: 137125 - DNA, 1503 bp, Enterobacter cloacae
atgcatcaacaactcaagaagatgagcctgatcgggctgattctgatgatcttcacctcggtatttggctttgccaacagcccatcggcgttttatctgatgggctatagcgcgatgccgttttaccttttttccgccctctttttctttatcccgttcgcgctgatgatggcggagatgggctcagcttatcgtcgcgaagagggcgggatctattcctggatgaaccacagcgtcgggccgcgctttgccttcattggtacctttatgtggtttgcctcgtacgtagtgtggatggtgagtaccgccgctaagatctgggtcccgctatctacttttttgtttggcgcggacaaaacccagacctgggcgctgggtagcctgacgccgacgcagacggttggtattctggcggcctgctggatggtcgtggtgacctttattgccgtcaaagggatcaataaaatcgctaaaattaccgccgtcggcggtatcgcggtgatggggcttaacctggtgctgctgctggtgagcggggcgatccttctgcttaacggcggtcattttgcccagccgttaaacttcaccctttcgcctaatcccgggtatcagtcgggcatggcgatgctgtcgtttgtggtatttgccatctttgcctatggcggaattgaggcggtcggcggcttagtggataagaccgataagccggaaaagaactttgccaaaggtattatcatcgcggcgatcgttatctcgatcggttactcgctggcgattgtgctgtggggcgtgagcgccaactggcagcaggtgcttggcgcgcgttcgaccaacctcggcaacatcacctatgtgctgatgaccagcctcggggcgacgctgggccaggccctgcacctgacccctgcggcgtcagccctgaccggggtctggttcgcccgtattaccggcctgtcgatgtttctcgcttacaccggcgcgttcttcaccctcagttattctcctctgaaagcgattatccagggcacgccaaaagcgctctggccgtcggtgatgacccgccttaacgtcaacggaatgcccgccgcggcgatgtggctgcagtgtctgctggtcggggtgtttatcgtactggtatcgttcggtggggatagcgcttccgcgttttataacaagctgacgctgatggccaatgtctctatgaccttgccttatctgttcctgaccatcgccttcccgttcttcaaggcgaaaacccatcttgaccggccgttcgtgatcttcaaaaaccgtccgtcgacgctgctggcgaccggcgtggtgctgctggtggtgaccttcgccaatatcttcaccattatccaacccgtcatcgacagcggggactggaacagcaccctgtggatggtgggtggaccgatcttcttctcactgctggcgctggggatctacgaaagctaccgtcggcgcatggcgtccggcgcgctggtgatggagagttaa

SEQ ID NO: 137126 - DNA, 978 bp, Enterobacter cloacae
atgagcgagacggcaacctggcagccgagcgcacccattcccaatctgttgaagcgcgcggcggtgatggcggaaatccgccgtttctttaccgatcgcggcgtgctggaggtggagacgccttgcatgagtcaggcgacggtaacggatattcatttgttcccgttcgaaacccgtttcgtcggcccgggccattctcaggggcttaacctgtacctgatgaccagtccggaataccacatgaagcgcctgctggcggcaggttgcggcccggtcttccagctgtgccgcagcttccgtaatgaagagatggggcgtcatcacaatccggaattcaccatgctggagtggtatcgtccatgctatgacatgtatcgcctgatcaatgaggtggacgatctgctgcagcaggtgctggagtgccaaccggcggaaagtctctcctatcagcaggcgtttcagcgccatctggaaattgacccgctctctgccgataaagcacagctgcgtgaagtcgcagcgaagctggatctgagcaatatcgccgatactgaagaagatcgcgataccctgctgcagctgctgttcaccatgggcgtggagccgcacatcggcaaagatcgaccaacgttcatttatcatttcccggcgactcaggcctctttagcgcagatcagcccggaagatcatcgggtcgctgagcgctttgaggtctattacaaaggtattgagctggcgaacggtttccacgagctgaccgacgcccatgaacagcgcctgcggtttgagcaggataaccgcaaacgcgccgcgcgcggccttccgcagcagcccatcgataacaacctgctggcggcgctggaggcgggtctgccggactgctccggcgtggcgctgggcgttgaccgcgtggtcatgctggcgctgggcgctgaaagcatcggcgaagtgatcgcctttacggtagaccgcgcctga

SEQ ID NO: 137127 - DNA, 1791 bp, Enterobacter cloacae
gtgcaaacttttcaagccgatctcgccgtaattggcgccggcggggcaggccttcgtgccgctatcgccgccgctcaggccaaccccaacgctaaaatcgccctgatttctaaagtctatccgatgcgcagccatacggtcgctgcagaaggggggtccgcagccgttgcccaggatcacgatagctttgagtaccattttcacgacaccgtcgcgggaggcgactggctgtgcgagcaggatgtcgtcgactattttgttcatcactgcccgacggaaatgacccagctggagcagtggggatgcccatggagccgccgccccgacggcagcgtcaacgtccggcgcttcggtggcatgaaaatcgaacgcacctggtttgccgccgacaaaaccggcttccacatgctgcataccctcttccagacctcccttcagtttccccaaattcagcgctttgacgaacatttcgtccttgacctgctggtcgatgacgggcaggcccgcggcctggtggcgatgaatatgatggaaggcaccctggtgcagatccgcgctaacgccgtggtgctggctaccggcggcgccgggcgcgtctaccgctacaacaccaacggcggcatcgtcaccggtgacgggatggggatggccctgggccatggcgtgccgctgcgcgacatggaattcgttcagtatcacccgaccggcctgccgggctccgggatcctgatgaccgaaggctgccgcggcgaaggcgggattctggtcaacaaaaacggctaccgctatctgcaggattacggcatgggcccggaaaccccgctcggcgaaccgaagaataaatatatggagctgggcccacgcgacaaagtgtcccaggccttctggcacgagtggcggaaagggaacaccatcccgacgccgcgcggcgacgtggtctacctcgatctccgccacctcggcgagaaaaaactgctggagcgtctgccgtttatctgtgaactggcgaaagcctacgtcggcgtcgatccggtgaaagagccgatcccggtgcgcccgaccgcgcactacaccatgggcggtattgaaaccgatcagcagtgcgaaacccgaatcaaagggctgtttgccgtgggcgaatgctcgtccgttggcttacatggcgccaaccgtctgggctccaactcgctggccgagctggtggtcttcggccgcctggccggggagcaggccatgcagcgcgccgctcaggcgggcgaggcaaacggcgcagccctcgatgcgcaggctgccgatgtggagcagcgcctgaaagatctcgtcaaccaggaaggtaacgaaaactgggcgaaaattcgcgatgaaatggggctgtcgatggaggaaggctgcggcatctaccgcacgccggagctgatgcagaaaacgatcgacaagctggctgaactgcaggaacgctttaagcgcgtgcgcattactgataactccagcgtgttcaataccgatctgctttacaccattgagctggggcacggtttaaacgttgccgaatgtatggcgcactcggccatcgcccgtaaagaatcgcgcggggcgcaccagcgtttggatgaaggctgtaccgaacgcgacgacgtcaacttcctcaagcacactctcgccttccgcgaggccgatggcactacccgtctggaatatggcgatgtgaagatcaccacgctgccgccggcaaaacgtgtctatggcgcagaagcggacgcggctgagaagaaggagaccacccatggctga

SEQ ID NO: 137128 - DNA, 735 bp, Enterobacter cloacae
atggctgagatgaaaaacctgaaagtcgaagtggtgcgctacaatccggaggtcgacaccgcaccgcacagcgcattctatgacgtgccttacgatgaacagacctcgctgctggacgcgctgggctacatcaaagacaacctggcgccagacctgagctaccgctggtcctgccgaatggcaatctgcggttcctgcggcatgatggtcaacaaggtgccgaagctggcctgcaaaaccttcctgcgcgattacaccaaaggcatcaaggtggaggcattggccaacttcccgatcgagcgcgatctggtggtggacatgacccactttatcgaaagcctggaagccattaagccgtatatcatcggcaataaccgcacgcctgaccaggggccaaacaagcagaccccggcccagatggcgaaataccatcagttttccggctgcatcaactgcgggctgtgctatgccgcctgtccacagttcggcctgaacccggaatttatcggcccggcggcgatcaccctcgcccaccgctataacgaagacagccgcgaccacggtaaaaaggaacgcatggcgcagcttaacggccagaatggcgtctggacctgcactttcgtgggctactgctcggaagtgtgtccgaagcacgtcgacccggcggccgcgatccagcagggcaaggtggaaagctcgaaagactttcttatcgccaccctgaaaccacgctaa

SEQ ID NO: 137129 - DNA, 396 bp, Enterobacter cloacae
atgacgacgaaacgcaaaccctacgtgcggccaatgacctccacctggtggaaaaagctgccgttttatcgcttctacatggtacgggaaggcacggcggtaccgacggtatggtttagcattgtgctgatttatgggctgtttgccctcaagcacggcgccgagagctgggcgggatatatcggattcctgcaaaacccggtggtggtgatcctcaacctgattactctggcggcggcgctgctgcacaccaaaacctggtttgagctggcgccgaaagccgccaacgtcatcatcaaaggcgaaaaaatggggccagagccggtcattaaagggctctgggtggtgacggcagtggtcaccgtggtgatcctgtttgtcgccctgttctggtaa

SEQ ID NO: 137130 - DNA, 360 bp, Enterobacter cloacae
atgattaatcccaatccgaaacgttccgatgaacccgtattttgggggctgtttggcgcaggcggcatgtggggcgcgatcgtcgcgccggtgatggtgctgctggtcggcatcctgctgccgctggggctcgccccggccgacgcctttagctatgagcgtgtgctggcctttgcccaaagctttatcggccgcgcattcatctttctgatgattgtcctgccgctgtggtgtgggttgcatcgtattcaccacgccatgcacgatctgaaaatccatgtgccaaacggtaaatgggtcttctacggcctggcggcaatcctcagcgtcatcaccctcgttggcgtactgtttatctga

SEQ ID NO: 137131 - DNA, 534 bp, Enterobacter cloacae
atgcgtatcctgccgataatcaccgcgattgccgtctcgttcctgtctgtcgcctgcagcacgcccgccccgccgccgggcgtcaccgtggtcagtcccttcgacgttcagcgctatatgggtacctggtatgaaatcgcccgctttgaccacccttttgaaagcggtctggaaaaggtcacgatcgcctggcacccacgtgatgacggcggtctggatgtggtgaataaaggttataaccccgaccgcggcatgtggcagaaaacggacggggtagcgtactttaccggggagcccagccgcgccgcgctgaagatttccttcttcggccctttctacggcagctataacgtcattgctctggataaggagtatcgttacgcgctggtctgcggccccgatcgcgactatctctggctgctggcccgggcgccgaccatcgccccggaggtcaggcagcagatgctggacattgccacccgacagggctttgatgtcggcaaactggtctgggtcaatcagcgctatgattag

SEQ ID NO: 137132 - DNA, 318 bp, Enterobacter cloacae
atgtcctggatagtattgtttatcgctggcctgctggaagtggtgtgggccgtcggcctgaaatatacccatggctttagccgcctggttcccagcgttatcaccatcgtggcgatggtggccagcatggcgctgctctcatgggcgatgaaaaccctaccggtaggtaccgcctacgccgtctggaccgggatcggcgccgtgggcgccgccgtgaccggtattgtgctgttaggggaatccgccagcgccatgcgtatcgccagccttgtttgtatcgtgatcggcatcattggcctgaagatcagcgcgcactaa

SEQ ID NO: 137133 - DNA, 192 bp, Enterobacter cloacae
atgcttatagggcatgaaaacaaaactgacactaaggatgacattatggtgaaaaaaacgattgcagcgttctttacggttttggtcctctcttcagcactgaccgcttgtaacaccacgcgcggtgtcggtgaggatatttcagacggcggtaacgcaatctctggcgcggcaaccaaagctcagcaataa

SEQ ID NO: 137134 - DNA, 132 bp, Enterobacter cloacae
atgaagcgcagcgttaaactcctggtgttactctttctgagcagcgcgctgttggctggctgcaataccgcccgcggtgtgggtgaagatattcagggcctgggccacgctatctctcacgctgtgagctga

SEQ ID NO: 137135 - DNA, 567 bp, Enterobacter cloacae
atggcgacttactatagcaacgattttcgtgctggtcttaaaatcatgttagatggcgaaccttatgcggtagaagccagcgaattcgttaaaccaggtaaaggccaggcgtttgcgcgcgttaagctgcgccgtctgctgaccggtacccgcgttgagaaaaccttcaaatctaccgattccgcagaaggcgcggacgttgtcgatatgaacctgacttacctgtacaacgacggtgagttctggcacttcatgaacaacgaaaccttcgagcagctgtctgctgacgcgaaagcgatcggtgacaacgctaaatggctgctggatcaggctgagtgcatcgtgaccctgtggaacggccagccgatcgcggtcaccccgccgaacttcgttgagctggaaatcattgaaaccgatccaggcctgaaaggcgacaccgcgggtaccggcggtaaaccggcgaccctgtctactggcgcggtggttaaagttccgctgttcgttcagattggcgaagtgatcaaagtggatactcgctctggcgaatatgtatcccgcgtgaagtaa

SEQ ID NO: 137136 - DNA, 1029 bp, Enterobacter cloacae
atggcgcatattgtaaccctaaataccccatccagagaagattggataacgcaacttgccaatgttgtgaccagtcctgatgaactgctgcgtcttttaaatgtagacgctgatgaaaaactgctggccggacgcgaggccagacgcctgttcccgctgcgcgtcccacgcgcgtttatcgcccgcatggagaaaggcaaccctaacgatccgctgcttcgtcaggtacttaccgccgaggaagaatttatcgtcgcccccggctactccaccgatccgctggaagaacagcacagcgtggtacccggtctgttgcacaaatatcgcaaccgggccctgctgctggtgaaaggcggttgtgcagtcaattgccgttattgtttccgccgccacttcccatacgccgaaaatcagggcaccaggcgcaactggcagacggcgatggactacatcgcggcacatccgcagcttgatgaaatcatcttctccggcggcgaccccctgatggcgaaggatcatgagcttgactggctgatgacccagctggaagctattccgcacgttaagcgtctgcgtattcacagccgcctgccaattgtgatcccggcgcgcatcaccgagacgctggccagccgcttccagcgttcgtcgctgcaggtgatcctggttaaccacgttaaccacgccaatgaaattaacggtgagtttcgcgcggcgatggccatgctgcgtcaggcgggcgtcacgctgctcaaccagagcgtgctgctgcgcggggtgaacgacaacgcgcaaaccctggccgacctcagcaatgcgctgtttgacgccggggtaatgccctactacctgcacgtgctggatcgggtgcagggagcggcgcacttcatggtcagcgatgatgaagcccgtgaaatcatgcgcgaactattgaccctcatctctggctatatggtgccgaagctggcgcgcgagattggcggggaacccagcaagacgccgctggatttagggctgaagcagcgttag

SEQ ID NO: 137137 - DNA, 546 bp, Enterobacter cloacae
  misc_feature (343)..(352): n is a, c, g, or t
atggacgtgaatgagcttcagccagtagcggggaaagaccatgaagccattacgttaaatacccccacagcccgatgtttacaactacttttagaaagtaatggaaacattatttcccgagatgaatttttatccgctgtgtggaaagagcgtggtgtcgttgtttcgcaaaatactttttatcaaaatatctccttgctaaggaaatcgttgctcagagcgggactgactcaggatgttgttgttacggttagacaacgtggcttcgtcattgctaccggaaccgtaattcgacaagttacactgcagaacgagttcaatagtgctcaaccgttaagtaccnnnnnnnnnngtaccgacgcaagcatgcgaataataaatgataaatatatagccaaaattgatgatgcagaagtacaaaatagcgtgaggaaaactttcaggatcaatgggttaacttcacgacaactatcatggtggacctttattattgtagccataatggccataatcaatataatttttttatgcttcaaatatttttga

SEQ ID NO: 137138 - DNA, 4032 bp, Enterobacter cloacae
atgaatgagctccttttaccagagcaagttaaaactgcaagagctcttctcgcttggtctcaacaagaactggcctccaaagcaaatgtggcaacatctacacttgcggattttgagcgtggctttcgtactccagtagcaaataatgcccaagctatccgtgatgccttagaagctgaaggtttgcagtttatagctggtggggtagttgaaaggggtatgctgcagccacctgaaaatgtaaaacctggttctttgatgcgctggattaatgcaactcacctttcacagtggggtgaacggagagatggtcagagtggtattcctgaattattacgacgtttaatttttgcaacagtaggtcctgccgcaaaagttcatttcccatcagatgagagtgtgcaatatcctggttgggatggtgagtgtaaaacgagtttgggtttgggcttcgttcctgagggtgattctgtttgggaaattggtgctcaacgtacctctatccgcgctaaggcagaagaagattttaataaaagatctgggaatccactcggatatactccagataaaacaacgtatgtattcgttactccacaacgctttcctggtaaaaataagtgggtagaggagaaaaaagctctcaatatttggctgaatgtctgtgccattgatgctgatgatcttgtccattggttagaaatttatcctgcggtcgctcagtggttgtcagtaaaaataggtcatcggccacagggattacgtaatattgaagagtcatggagcgagtggattcacgcaacgagaacacctctcactcccgatgttatcttggccggacgtgatgaagaacaaacaaaagtccttaggtggttaagagattcaccgcaacaactctcggtgcaagccgaagctcccgatgaagcactagcttttctttatgcatctataagtcctctgcctgaagagcataagctgttctattggagcaaatgtgtcgtagttgacaacgcaacaacagcccggcaattagctggtttaggcacgccattaatcattgttctcactatttcagaaccggggattgcgcaatctcttgttaataatggtcaccatgtctacgctatctatggctcagatgtgtctcatctatccggtcattcaatacgcctcccccgcccatggagatttgagctaaaaatagcattaactcatgctggattaaatgaggaggatgctcatcgttatgcccacgcatcaggccgcagtattacggtcttaaggcgcttaatgcccatagccccaaactataaaccacaatgggctgaacatgtttcatctgagcttattgccgcaatgttcgcggggagctgggatgaaacctcatctcaagatcaaaaaattattagtgatttagctggttgctcttatgagcaggtagaagaaatcttggcaccgttagcatccacttttggtggtccattaattcgctctggtaatctttggagagtagtttcattacgagatctttggactcaagtaggtaatcagctaacttcccaccaactaaagcgctttgagaatacattccattcggtggtgagcgccattgatccctattttgagactcaacctaatgccgataccttctatgaagataatagcgtagggaaaccatcaggtagcatcagacgtggcttaacagaatcgatgattgccttggctgttttccctgaggtagcaacgcttattacggatgtatcttctcatgtgaatagtgcggtgtataagttgcttaataatgcaactgagccactttggtggtctttgtctcaggatttccataatcttgcagaagcagccccaacggtatttctagacgctgtagaagctgggttggaaggcgattcacctcagattttgtcattattccgaagtgatgaagggataatgcaacccacagagtatctttcaaatttgttatgggcattagagatgttagcgcgtagcccacgttatctaatgcaatctgcacttttactggcttggttagatgatgttgatcccggaggtcgatggggaaaccgtccagcagtttctttaaggcggatttttgttagttggtcaccacaaacttatgctaattcatcacaacgtattaaggtcattgatcggatcatatcgctgcatccaattgctggttggaagttattgctcgcattagcacctcgttcacacgatacttcagaaccttcttctatgccaaattggcgtgatttcactcctaatgagccggagtctattacctggtcctctgttgcaacagcagcatgtgaaatcggtgaaagattattaatgcatataaatgggaggtgcgaacggtggtttgaacttttccatctttgggggaattttgattcaaactggaaattttcagcagctaagcaattagcagattactcccttaacctcacatcttctgataaaaaagaaaggttgtggaatgagttacggcattttttacagagaaaccgtggcttcaaagatgcgccatgggctctgtctgaagaagaattagcaccgttggatgctatatttctttcactaacaccagaaaatgtcgaggaacgttttcgctggctattttgtgcaggggccaatgagttaggcgaaaattatgattggcaaacacaacgaaatagactcgaagagagacaattggaagcagtagagttcttacttgcagaacttgaatttgaacaaatatttcatttctcttcaacaattacgctgcactacgattttggtcttgctttagcgcgatcctcaacaaagtgtgggcataaacattttctaatgaaaaaagcgctaatgtctagtgattcagatatagcaaatattggtttgggaattttttatggactcaaagccacgaaaggctcagaaagcgaaacttgggttcaagaaatatgggaacaagctataactgataattggggggagttagcggaagtacgcattgcccaagtattaccacctgtaatgtcactttggctgaaaatagaatcgagaccagttaatattagtacaatatattggcagacgatccctacatttaggctttctgcagatttagagcttgagtatgtcattgatcatttacttctggcagaccgaagtcacgatgctcttgcgtggcttgctaataatataaaaatagaaccagagggctcagttattattagagtaatgcataccgctgcaagcactaaagactcttccaataatgataatacgatgtcgagctattatattggtattctcctagattacctggagagtgatgtaaagacttcaaaagaagaacttgtgaggctcgaatggatttattttcaagttttacggtattcacgacatccagccaggaacttacatcaggctcttgctaaagaccctgtattttttacctcactaatgaaattactctatctacctgaagaagatagtggtgtagttgaatctgaaccagcaaatcctaagcaggcccgtgatctagcaagccaggcatatcaagttttgcatgattgggcaattgtacccgggaccgatgagaacgggactattgactcttatgtattgatgtcgtgggtcaagcaagctcgtcaattactgaagtctgcaggtcgtggtgaaataggtgatgacacgattggtatgattctctctgccgcaaaaagaaaaaaaaatgaaacgtggccgccagaagcaattcgcgaagttcttgagtttgctagaagtcgagcaatggagagtggttttgaagttggtgtttacaaccgccgtggcgtaactgtacgcatgccacatgatggtggggggcaagaacgaatattagtagaacgctataaacaagatgctgatgatcttagatttgaatggcctcgaaccgcagcttgcttagaccgcattgctataagctatcaacaagatgcaattagagaagatcacagtgcggaccaaggtgattggttataa

SEQ ID NO: 137139 - DNA, 855 bp, Enterobacter cloacae
atgcagcaggtgtatcataacatgggggcgttgcgtatcaacattgataagttacaggcctacattcctgaagacgagagggaggctgctctgaagtctcacttcctccagcatctggctgagcgtggttgcaggatggtttcaagcgttcctttggtggttgaatattttcctgaatacaaactggcagagcggggaacgcgttcatttgagaagaatggtggctttcaggcgctaaaggccgctatcaaatgggaagttgttgttggtattaactacgatatcaaaagcagccaactgaatatcctgaaacatgaactggagcgatacggcatcaaatgtaagcggctgggaaagatcaccaagaataaggtcatgcgcaggttcaatgttgatcaaaaagctgctaagttgcttatctatactctgatttactcacttggagagtttcgtaagcacaaagacagcgctgcatttcgtaagctttgtgatttgtatggctacagcgaagcggtgaaaaaggccgatgagtggattgagtttgttcggccagtgagaagggcgcttaacaagttggtggcgcgttatcttgatgagcatgttaattgccccggtcgtggctgggccatacgtaatgccgttcgtcagtcttttatggttaaacctgacaagatcactgcgagtgttcgtcggtgtttgttgtcccatatgattcagggtattgagagtaaggcggtgtatgaagcagtgctggctaatcccggagtatgcagttcgattgagcatgatgggatggtgagtaactgtgagatatgctggaatcacccttatcttgaattgaagacaaaacattaa

SEQ ID NO: 137140 - DNA, 171 bp, Enterobacter cloacae
atgcgccgaaagctgctttcgcacatgttacagggactggaaagtcaggctgtatacgattatgttaccagccataagggcgtttgcgcactggagcacgatgggtttgtttcttatgaagaggtaacggactggtcccatccatatcttttgattgagaaaaagcattaa

SEQ ID NO: 137141 - DNA, 642 bp, Enterobacter cloacae
atgtatataaaatttatcaatttactgcgccgagagaaattctataaggcttggtgtctgcttgaacaatgcgagataacattaggaaacctaaaacgtcattttcctcagatgctgagccaagaagtttatctggatttcctgtatcaccaagtccctctttggcaggaggtgtttccctatcggattttcaacagcacagagtttcttgaaaagaaaattctatgcagcacctgtaaaagccctataactcccaggaaattttgcggacatgacaagggcgaaatttatgacggagagatttgctatcgcattattgaagattttgaaattgtagactttgcgatggtgaaaaatcccgttaacaaatatagtgttcccttcaagacggacgagaacgggaaaactgtggatcattatgattataaatgtattaaaatgatcatacgagaacttcctaccctattttactggtgggaaatcaacaagacatttgactggcatcgacgcattgacttcacagaaaccttgccggatgatatttgtccctatggcgcagatcgtcttttcaaggactgctgctcttccaaaccggcaattttgacgccgcacattgaaattgtcccccttagaaaatgttag

SEQ ID NO: 137142 - DNA, 360 bp, Enterobacter cloacae
atgccccatcttgggcagacagaattatgtactgccgatgatgattatcaggagctcgcgctctattcccgagaaataagactcggacacttactggtaacgcaggtggttgctccagttctgatcgggctacttactagctatgtctatgatattattaaaagcgcgccagaggataatgtttcgcttaccttgcaaatagaaggagaatgtaacgattatctccttaggtacaatggcccggcaaaagacttccgacagattgaaccccgcttattacaacttaccaacggctgtgatggacctaaaaatgccgtgtcgtcaacagaagaaggaccggatgacatcattaaaatttga

SEQ ID NO: 137143 - DNA, 264 bp, Enterobacter cloacae
atgagccgatgccatgaatccagcagtgaaggccagtatgagaaagactctggtgaacaagttttggctaagaagctggggatcgctacttctgatgagatggatgaggctgaacttgtcttgttagaacaactctaccagtctgttgttgaagaacagtttccggaaggccaactcagcgtagccatgctaaaaagctggcaaaataggtgcttatacatattagtaacctccgtttttgatgaccactgcaacctgacatga

SEQ ID NO: 137144 - DNA, 1194 bp, Enterobacter cloacae
atgctcaccgatacgcaatgccgcactgccaagccgaaagaaaaactctatcgacttaatgatttcaacggtctctacctcgaagtgaaacccaatggcaaaaaggcatggcgctatcggtttaaactcaatggtaaatccagtatgtttgcgctgggtgagtacccgacggtcaaacttgccgaagcccgcgagaaatgcgagcaagcgcgtaagcaagtcgcagatggatttagcccaacacaagctcgtcagttagataagatccgcaaggtcaatgacgcatctaacacctttgagctaatcgccaaagagtggttgcagatgaaagactgtgccgaaatcaccaaaacgcgccgactggatatgcttgaacgtgtggtttttcccgccatcggtaagctccctgtcagagagatcactccacaccatatccttaaaattcttcaggaaacagccaaacgaggagcaccgacagttgccgctgaagcccatcgaaccatttcatcagttttcgagttggcagtagcgacacttagagctgatagtgatcctgtctggcccgtgcgcaaggctcttcccgccaataagacacagcacaaacaggcactgaatcctcagcaaatcggaaagttattaagctgttttgacaacagtcgtggctcatatcaggttaactattgcatgtggcttatgtggtggacgctggcgcgaccagccgaagtaactgaggcagaatggacagaattcgatctcgataacgcactttggactattccgtcaacgcgaatgaaagcccgcagagaacacgttattccccttccctcccaggctgtcaacatgctcagaacgctacaaggattaaccgggcatcgacagcacctttttccgggcagggataatccgaaaggtccaatgacatcgcactccctccgccagctacttaaaagcctcggctggagtgggacatacagcccccatgccaccagaactacagggagtacgcgtttaaacgagatgggctatcgacctgatgctattgaggcccaacttgcgcacgctgataccaacaatgttcgtcgcacatacaaccatgcaacttatcttgatgagcgtaaagtgatgatgcaggaatgggcggataagcttgagggatgggtaaaaagcactgccaatagtactgatgtgtcgtaa

SEQ ID NO: 137145 - DNA, 1092 bp, Enterobacter cloacae
atgggattcaaatgcggtatcgtcggtttgcccaacgtcggcaaatccaccctgttcaatgcgctcaccaaagcgggtattgaagcggccaacttccccttctgtaccattgagccgaacaccggtgtcgtaccgatgcccgatccgcgtctggacaagctggctgaaatcgtcaaaccgcagcgcatcctgccgaccaccatggagttcgtggatatcgcgggcctggtgaaaggcgcgtccaaaggtgaaggtcttggcaaccagtttctgaccaacatccgtgaaaccgaagccatcggccatgtggttcgctgctttgaaaacgataatattattcacgtcgcggggaaagtgaacccggcggaagatattgacgttatcaacaccgaactggcgctgtctgaccttgatacctgcgaacgcgcgattcaccgcgtctccaaaaaagccaaaggcggcgataaagacgcgaaggttgagctggccgcgctggaaaaatgcctgccgcagctggaaaacgccggtatgctgcgcgcgctggatctgaccaaagaagagaaagaggccatccgctatctgagcttcctgaccctaaagccgaccatgtacatcgcgaacgtcaatgaagacggtttcgagaacaacccgtacctcgatcaggttcgcgccatcgccgagcaggaagggtctgtggtggtgccggtgtgcgccgccgttgaagcggacatcgccgagctggacgatgaagagcgtgacgagttcatggctgagctgggcctcgaagagccgggcctgaaccgcgtgatccgcgccggttacgctctgctgaacctgcagacctacttcaccgcgggcgtgaaagaagttcgcgcatggaccatcccggtcggagcgaccgcgccgcaggcagccggtaagatccacaccgacttcgaaaaaggctttatccgcgcgcagaccatcgcttatgaagacttcattgcctacaaaggcgaacagggcgcgaaagaagccggtaaaatgcgtgctgaaggtaaagactacatcgtgaaagatggcgatgtgatgaacttcctgttcaacgtctaa

SEQ ID NO: 137146 - DNA, 585 bp, Enterobacter cloacae
gtgaccattaaactgattgtcggcctggccaaccccggtgcggaatatgccgccacccggcacaacgctggcgcctggtatgtggatttactggcggatcgccatcgtgcgccgctgcgcgaagagagcaaattcttcggctacacctcgcgcatcaacctggcgggcgaggacgtccgcctgctggtccccactacctttatgaacctcagcggtaaagccgtggccgcgatggcgaccttttatcgcatcaacccggatgaaattctggtcgcccatgacgagctggatttaccgccgggcgtggcgaaatttaagcttggcggtggccatggcggccacaatggcctgaaggatatcatcagtaagctcggcaataacccgaactttcaccgtttacgcgtcggaatcggccatccgggcgacaaaaacaaggttgtcggctttgtgcttggcaaaccaccggccagcgagcagaaactgatcgatgacgctgtcgacgaagcggcgcgctgtaccgaaatctggttaaaggacgggctgaccaaagcgaccaaccgtttgcacgcctttaaggcgcaataa

SEQ ID NO: 137147 - DNA, 276 bp, Enterobacter cloacae
atgaaacgcaaaaacgcttcgttactcggtaacgtactcatggggttagggttggtggtgatggttgtgggggtaggttactccattctgaaccagcttccgcagcttaacctgccacagttctttgcgcatggcgcaatcctaagcatcttcgttggcgcagtgctctggctggccggtgcccgtattggcggccacgagcaggtcagcgaccgctactggtgggtgcgccactatgataaacgctgccgtcgtaaccagcatcgtcacagctaa

SEQ ID NO: 137148 - DNA, 1047 bp, Enterobacter cloacae
atgttaattcaggtgggagagctggcgaagcgtgccggactgacggtacgtacgctgcatcattatgaacagacggggctgttaacgccttcggccagaagcgaggcgggctatcggctctataacctgtccgcggttcagcgcctgcatatgataaaggcgctggcgcaggccgggctaacgctcgccacaatcaaggactatctcgatcggcaaacgctgtcgctgcccgagctgctgacgcagcagatagatatgctcaacgcccagctacgcgatgttggcaggctgcgcgaccgactattggtactgcgcgaggcgctggcgagcggcaatgaacccgatctggagtcctggctacagacgctggagttaatgaaaatgtacgatcgttggtttagtcaacaggagttagccgcgctgccgtttgcggcacaggatgaacagagggcgcaggcgtggcgcgagctaacggaggaggtgcagacgctgatggcgagcggctgcccgacggacagtccgcaggcgatgcgtctggcgacgcgctggatggagcgcctggagcaggatacggccgggcgtccggagtttctgacccgcctgaacgagatgcatgccgccgagccgcagatggttgaacagaccggcgtcacgccggcaatcatcgcctatatcaccgaggcctttgccgaaagcaaactggccatctgggcgcggtaccttgacgaagaagagatggcgttcacccgccagcactattttgaccggctacaggagtggcctgcgctggtggcgaagctgcatcaggcgtgccgggagggcgtagcgccggactcggcgtcgggtcaggcgctggcccgggcgtggcttgaactgtttcagtcctacgccggtacccggccgcagacgttgcagaagtttcgtcgggcaatggagcaggagccgcatttgatgaagggcacctggatgacgccggcggtgctgagctggctgcagcaggcgaccggatccttgatgcggcaggcgcagggacctgccgccgggtga

SEQ ID NO: 137149 - DNA, 1653 bp, Enterobacter cloacae
atgcctttccgcgccctcatcgacgcttgttggaaagaaaagtacaccaccacccgcttcacgcgtgacctgatcgccgggatcaccgtcgggatcattgcgattccgctggcgatggcgctggcgattggcagcggcgtgccgccgcagtacggcctctatacctcagcggtggcagggattgtgatcgccttgaccggcgggtcacgctttagcgtttccgggccgaccgccgcctttgtggtgatcctctatccggtctcccagcagtttggtctggcgggactgctggtggcaaccctgatgtcggggatctttttaatcctctttggcctggcgcgctttggccgcctgatcgaatacatcccgctgtcagtcaccctcggcttcacctcggggatcggtatcaccatcggcaccatgcagattaaagatttcctcggcctgcagatgccccatgtgccggagcattatctgcagaaagtggcggcgctggcgatggccctaccgaccattaacgttggcgatgccgccatcggcgtcgttactcttggcattctgatcctctggccgcggctgggtatccgcctgccgggccacctcccggcgctgctgggcggctgcgcggtcatgctggtggtcaacttgctcggcggcgatgtcgcgacgatcggctcgcagttccattatcagctggcggacggcactcagggcaatggcattccgcagctgctgccgcagctggtattgccctgggatatgccgggctcaaactttaccctgagctgggcctcgctgcaggctctgctgcctgccgccttctcaatggcgatgctcggcgccattgaatctctgctgtgcgcggtggtgcttgatggcatgaccggcaccaagcacaaagccaatagcgagctgattggccaggggctgggcaacattgtcgcgccgttcttcggcgggatcactgccaccgcggcgattgcccgctcggcggcgaacgtccgcgccggcgccacatcgccggttgccgccgtgatccacgccctgctggtgatcctggcgctgctgatcctcgccccactgctctcctggctgccgctgtcggcgatggccgccctgctgctgatggtggcatggaatatgagcgaggcgcataaagtcatcaatctgctgcgccacgcgccgaaggacgacatcgtggtgatgctgatgtgcatgtcgctaacggtgctgtttgacatggtgatcgctatcagcgtcgggatcgtgctggcttcgctgttgtttatgcgccgtatcgcacgcatgactcatctggcgccggtcaacgtcgaggtgccagacgatgtgctggtgctgcgggtaattgggccgctgttctttgccgccgccgaaggcttgttcaacgatctggagacccggatcgccggcaaacgcatcgtggtgctgaaatgggacgcggtgccggttctcgacgccggtggcctggatgccttccagcgctttgtgaacaagctgccggaaggctgtgaattgcgcgtatctaacctcgagtttcagccgctacgcacgctagcgcgcgccggcgtcaagccgctgcccggacgcctgagcttctaccccgatcgtcaggccgcgctggctgacctgtga

SEQ ID NO: 137150 - DNA, 732 bp, Enterobacter cloacae
atggttgatgctctgcgtcgtgcttcggcaggtcgtatcaccgccgttatcccctacttcggttatgctcgtcaggaccgtcgtgttcgttctgctcgtgtgccaatcaccgcgaaagtggtggcggattttctgtccagcgtcggcgttgaccgcgtgctgaccgttgacctgcacgcagaacagatccagggcttcttcgatgtgccagtcgataacgtgttcggcagcccaatcctgctggaagatatgctgcagctgaacctggacaacccgattgtggtttctccggacatcggcggcgtcgtgcgtgcccgcgctatcgctaaactgctgaatgataccgatatggctatcatcgacaagcgccgtccgcgcgccaacgtctcccaggtgatgcacatcatcggcgacgttgccggtcgtgactgcgtgatggtcgacgatatgatcgacaccggcggcaccctgtgtaaagcggcagaagcgctgaaagagcgtggcgcgaaacgcgtattcgcttacgcgacgcacccaatcttctccggcaacgctatccagaacatcaaaaactctgtcattgatgaatttgtcgtctgcgataccattccgctggcaccagaaattaaagcgctggataaagtgcgtactctgacgctctccggtatgctggctgaagctattcgccgtatcagcaatgaagaatctatctctgctatgttcgaacattaa

SEQ ID NO: 137151 - DNA, 852 bp, Enterobacter cloacae
atgatgacccgctggccctctcctgcaaaactgaatctgtttttatatatcaccggccagcgggccgatggttaccataccctgcaaacgctgtttcagtttctcgattacggcgatacgttgaccatcgaaccgcgtactgacggccaactgcgcctgctgacgccggtggccggcgtgccggacgaggagaatctgatcgttcgcgccgcgcgtctgctgatgcatgccgccagcgaaagcgatcgcctgccggcgggcagcggcgccgatatcagtatcgataagcgcctgccgatgggcggcggcctgggcggtggctcctccaatgccgccaccgtgctggtggcgctcaaccatctgtggggctgcggtctctcggaagatgagctggcgactcttggccttcagctgggggccgatgtgccggttttcgtacgcggccatgccgccttcgccgagggggtgggtgaaatactgacgccggtagaacccgaggaaaaatggtacctggtggcccacccgggggtcagtattccgacgccgatcatttttcgcgatccggagctaccacgaaataccccgcgccggtcaattaatacgttattaaattgtgaattcagcaacgattgcgagcttatcgcaagaaaacgttttcgcgaggttgatgccgcgctttcctggctgttagaatatgcgccgtcacgcctgaccggcacaggggcctgtgtgtttgctgaatttaacaccgaatccgctgcccgtcaggtgctggacactgccccggcatggctaaatggctttgtggcgcgcggagttaacctttcgccgctcaagcaggccctgctctga

SEQ ID NO: 137152 - DNA, 612 bp, Enterobacter cloacae
atgaatcgactgttccgcctgctgccgctggccagcctcgtcctcaccgcctgttctcttcatacgccgcaagggcctggcaaaagcccggattcgccgcagtggcgtcagcaccagcaggctgtccgcagcctcaatcagttccagacccgcggggcgtttgcctatctttccgatgagcaaaaagtctatgcccgcttcttctggcagcaaaccggccaggaccgctatcgcctgctgctgaccaacccgctgggcagcaccgagctgtcgctgaccgcgcagccgggcagcgtgcagctgatcgataacaaaggccagacctataccgccactgatgccgaagagatgattggccgtctgaccgggatgccgatcccgttgaacagcctgcgccagtggatcatcggcctgccgggcgacgccaccgactattcgctggacgatcggtaccgtctgcgtgaactgaactatacgcaaaacggcaaaacctggcacgtgacctacggcggctacaccagcgatacccagccagccctgccgtccaatgtcgagctgaacaatggcgctcagcgcatcaagctgaagatggataactggatcgtgaaatga

SEQ ID NO: 137153 - DNA, 1071 bp, Enterobacter cloacae
atgaaaatgaaacttaccgcgctgatgagcggaataattctgtccagttcggcgctgtgcttcagtgcgacagcggctgataaaatggtcatcgcccaccgcggcgccagcgggtatctgccggaacataccctgccggcgaaagcgatggcttacgctcagggggcggattaccttgagcaagacctggtgatgaccaaagacgaccggctggtggtgttacacgaccactatctcgatcgggtgactgacgttgcgcagcgtttcccgcagcgggcgcgtaaagatggccgtttctacgccatcgactttaccctggacgagattaagtcgctgaagttcaccgaaggttttgagccgaaaaatggtaagaacgtgcaaacctatcccgggcgattcccgatgggcaaatccgatttccgtattcatacctttgaagaggagattgagtttgtccaggggctgaaccattcaaccggcaaaaacatcggtatctacccggaaatcaaagcaccgtggttccaccaccaggaaggcaaagatattgccgccagcacattgaaggtgctgaaggaatatggctataccagcaagcaggataaggtttatctgcagtgctttgacgccaacgagctcaaacgcattaaaaatgagctggagccgaagatggggatggatctcaatctggtgcagctcatcgcctataccgactggaatgaaacccagcagaaacaggccgatggtaagtgggtgaactacagctatgactggatgttcaagccaggggcgatggcgcagattgcgcagtacgcggacggcatcggcccggattaccatatgctggtagcggaaggctcgaagccgggggcggtgaagctgacggcgatggtgaaagaggcgcatgccagccatctgcaggtgcatccgtacaccgtgcgcgcggatcagttgccggagtacgcgactaacgttaatcagctctatgacgtgctgtataaccaggcgggcgtcgacggcttatttaccgatttcccggataaagcggtgcagttcctggacgcgaaacgctaa

SEQ ID NO: 137154 - DNA, 1347 bp, Enterobacter cloacae
atgttaagtatttttaaacccgccgcgcataaagcgcgtttgccagcagcggagattgacccgctatatcgccgattacgctggcagatttttattggcatcttttttggttatgccgcctactatttggttcgtaagaactttgccctggcgatgccttatcttatcgagcaggggttctctcgtggcgacctcggcttcgccctttccggtatctccatcgcctatggattttcgaaattcatcatgggatcggtctctgaccgctcgaatccgcgcattttcctgccggctggcttgatcctcgccgcgctggtgatgctggtgatgggcttcgtgccgtgggcgacgtccagcatcatgataatgttcgtgctgctgttcctctgcggctggttccaggggatgggctggccgccgtgcggccggaccatggtgcactggtggtcgcagaaagagcgcggcgggattgtctcggtgtggaactgcgcgcataacgtcggcggcggcattccgccgctgctgttcctgttagggatggcgtggtttaacgactggcacgcggcgctgtatatgccggcattcggcgccattctgctggcgattttcgccttcgcaatgatgcgcgacaccccgcagtcctgcggtctgccgccgattgaagaatataaaaacgactacccggacgattacagcgaaaagcacgaagaagagctgacggcgaagcagatctttatgcagtacattctgccgaacaagctgctgtggtacatcgctatcgctaacgtcttcgtttatctgctgcgctacggcattctcgactggtcgccgacctacctgaaagaagttaaacacttcgcgctggataaatcctcctgggcctatttcctgtacgagtacgcggggatcccgggcacgctgctgtgcggttggatgtcggacaaagtgtttaaaggcaaccgcggcgccaccggcgtgttctttatgaccctggtgaccatcgccactgtcgtttactggctgaacccgccgggtaatccgggcgtcgatatggcctgtatgatcatcattggcttcctgatctacggcccggtgatgctgattggtctgcatgccctcgagctggcgccgaaaaaagccgccgggaccgccgcgggcttcaccggcctgttcggctatcttggcggttccgtggccgcgagcgctatcgtcggctacaccgtcgatttcttcggctgggacggcggctttatggtgatgatcggcggcagcgtgctggcggttatcctgctggttatcgtgatgctcggtgaacgtcgccatcaccaacagctgaaacaagcctaa

SEQ ID NO: 137155 - DNA, 1623 bp, Enterobacter cloacae
atgacgggacgtattgatagcgaggtcattatcatcggcggcggagcaaccggcgccggtatcgcccgcgactgcgcccggcgcggattacgaacgctgctcattgagcgccatgatatcgccaccggggcgaccggccggaatcatggactgctgcacagcggcgcccgctacgcggtgaccgacaacgaatccgcccgcgaatgcatcagtgagaaccgcatcctgcgccgcatcgcccgccactgtattgaaccgaccaatgggctgtttatcaccctgcctgaagatgacctggcatggcagcaaacctttatcgacgcctgtcagcaggctggcatagaggccacgccgctctcgccgcaggaagcgctgcgccgggagcccgccgtcaacccgacgctgctgggcgcggtgcaggtcccggacggtaccatcgacccgtttcgcctcaccgcggccaatatgctcgacgcccgcgaacacggcgcgcagatccttaccggctgcgaagtaacaggcctgctgcgccggggcgatcgcgtctgcggcgtccaggtatacgaccgccaacttcaccaggcccgcactctgtacgccgggatggtggttaacgccgccgggatctggggacagcgtattgcggaatatgccgacctgcgcatcaccatgttcccggcgaagggatcgctgctgatcctcgatcatcggattaacaacctggtgatcaaccgctgccgtaagccggccgacgccgatattctggtgcccggcgataccatctcgctgatcggcactacctcaatgcatattccttatgacgaaattgacgacaaccgggtaacagcggcggaggtcgataccctgctgcgcgaaggggaaaagctggcgccggtcatgggccgcacccggatcctccgcgcctactccggcgtccgcccgctggtggccagcgataacgatcccagcgggcgcggcgtcagccgcggcatcgtcctgctcgaccatgcccagcgtgacggtatggaaggcttcattactatcaccggcggcaagctgatgacctatcgcctgatggccgagtgggccaccgacgccgtctgtcgtaagctgggaaacaccaccccctgtaccacggccgaagccccgctgcccggttcacaggagccaacggaaagtaccctgcaaaagattatctccctccccaccccgctgcgcggctcggccgtctaccgtcacggcgatcgcaccccgtcctggcttggcgacagccgccagcaccgtagcctggtctgcgaatgtgaagccgtcactgccggtgaagtgaaatacgcggtggaaaacctggcggtcaacaccctgctcgacctgcgccgccgcacccggattggcatggggacctgtcagggggaactctgcgcctgccgcgctgccggactgctgcagcgctttaacgtcaccacgcccgcgcagtcgttaacccagctctcggaatttctcaatgaacgctggaagggcgtgcagcccatcgcctggggcgatgcgctgcgcgaaagcgaattcacccgctgggtctacctcggcctgtgcggattgccacaggagcaccgggatgaagtttga

SEQ ID NO: 137156 - DNA, 1260 bp, Enterobacter cloacae
atgaagtttgattgcgcgattatcggcggcgggctcgccggcctgctgtgcgggctggccctgaatcagcacggcctgcgcagcgtcatcatcagccgcgggcagagcgcgctgcatttttcctccgcgtcgttagacctgctctcggcgctgcccaacggcgatcacgtcactgacgtcgcacaaggtctgcagcagctcgctgaacagcttcctgaacacccttattcccggctcggcgccgaggcggtactcaaatacgcgacacagaccgaagccctgctggccgcctgcggcgcggtgatgcagggcgatgcgcgccggccgcaccggcgggtaacgccgctggggacgttgcgcccggcatggctgtcgccccttgaggtgcctgtcgcgcccctgccgtcgcagggcgcctgtctggtggggatcagcggctttgctgattttcagccgcatctcgccgccgccgcgctcggtcaacacggagttaccgccgcggcggtggaaatcgagttaccgctgctggatgtgctgcgtgacaacccgaccgagtttcgcgccgccaatatcgcccgcgtcctggatgatgagaatatgtggccggccctgcatgcagcgctgctaccgctggcgcagcagtatgacctgctgatcatgcccgcctgttttggcctcgccgacgatcgcctgtaccactggctgcaggcgcgtctaccctgcccgctgcgtctgctgccgacgctgccgccttcggttcccgggatgcgtttgcattctcagctgcaacgccagttcattcgcgagggcggcgcctggctcgcaggcgatgaggtggtgaaaatcagccatcgacagaacgccgtcgaggcggtctggacgcgcaatcacggcgatattgcgctgcgtccgcgctttaccgtgctggccagcggcagctttttcagcaacggtcttgtcgccactcgcgatagcgtgcgcgagccgatcctcggcctcgaccttcaccagactctgccacgggaaagctggtaccagcgcgatttcttcgcctcacaaccgtggcagcgcttcggagtgaaaaccgatgccctgctgcgccccctgctgggcgggcagccgttccataatctgttcgccatcggctcattgctcggcgggttcgatgccattcagctcggctgtggcggcggcgtctgcgccgttaccgcgctgcacgccgccagacagatccacgcccttgccggaggccggccatga

SEQ ID NO: 137157 - DNA, 558 bp, Enterobacter cloacae
  misc_feature (424)..(433): n is a, c, g, or t
atgaacgatacccgttttgaaagctgcattaagtgcacggtctgtaccaccacctgcccggtaagtcgggtcaatccgcgctatcccggcccgaaacaagcggggccggacggcgaacgcctgcgtctgaaggatggcgcgctgtacgacgaggcgctgaagtactgcattaactgcaagcgctgcgaggtcgcctgcccgtcggatgtgaaaattggcgatatcattcaacgcgcccgggcacagtacggccagcaaaagccgaccctgcgcgacgccatcctcagccataccgacctgatgggtaccctttccaccccctttgcccccctggtcaacgccgccaccggcttaaaaccggtgcgccgtctgctcgacgcgacgctcaacatcgatcaccggcgtacgctgccgaaatatggtnnnnnnnnnntttcggcaccttccgccgcgcttaccgccagctcgccgcccgtcagaagcagtacagcgaacaggtggctttctttcatggctgctacgtcaactataaccatccacagttgggtaaagatctga

SEQ ID NO: 137158 - DNA, 693 bp, Enterobacter cloacae
gtggctttctttcatggctgctacgtcaactataaccatccacagttgggtaaagatctgattcgcgtcgtcaacgcgctgggtaccggggtgcagttgttatcaaaagaaaaatgctgcggcgtaccgctcatcgccaacggttttttcgacaaggcgcgtaagcaggcgcagagcaacgtcgccgcgatgcgggaaaacacgctaccgatcattgccacctcctcgacctgcgcctttacgctacgtgatgaatacccccatctcctcgatgtcgataacagcgatcttcgcgatcgcgtcgagcttgccacccgctggatctggaaacagctggctgccggcaggacgctaccgctgcgcccgctgccgctgaaggtggtctatcacaccccgtgtcatatggaaaagatgggctggtcgctgtataccctcgagctgctgcggctgatccccggcctgcagctggaggtgctggattcacagtgctgcggcatcgcaggcacctacgggtttaaaactgagaattacgcggtatcccaggctatcggcgccccgctgttccgtcagattgaggagagcggggccgacctcgtcgtcaccgactgcgagacctgcaaatggcagattgagatgtccaccagcaaacgctgcgagcatccgctgacggtgctggcgcaggcgctcgtctga

SEQ ID NO: 137159 - DNA, 804 bp, Enterobacter cloacae
atgaacgcactgttatctaaccccttcaaacggggattattacgcggtgagacgcaaatcggcctgtggctgagctccacctcatcctacatggcggagatcgctgcgacgtcgggatacgactggctgctgatcgacggcgagcatgccccgaacaccattcaggacctttatcatcagctgcaggcgattgccccctatgccagccagccggtcattcgcccggtcgagggcaaccgcagcctgataaaacaggtgctggatattggcgccagaaccttgctggtgccgatggtcgataccgccgagcaggctcgggaggtggtctcagcgacccgttatccccccatcgggagccgcggcgttggcgccggcgtggcgagagcggcgcgctggggaagggtggagaattatatggcggaggcaaatgacgaactttgtctgctgattcaggtcgagagccgaaccgcgctggagaacctggacgctattctcgaggtggacggcattgacggggtgttcatcggtccggcggatctctccgcctcgctgggctacccggacgatgccggtcaccctgacgtgcagcgggtgatcgagcagagcatccggcgcattcgcgcggcggggaaagcggccggatttctggcggtcgacccggcgatggcggaaaaatgtcttgcctggggggccaactttgtcgccgtcggggtggataccatgctgtatacccaggcgctggaccgccggctggcgatgtttaaatctgacagcgcccagccgcaagagaaaacgagctattga

SEQ ID NO: 137160 - DNA, 1293 bp, Enterobacter cloacae
atgatgagcaacactctgctggagagcgtggtgaagaaaaaccgcgcccgcttaatcccctttatgctggcgctgtacgtgctggcgtttcttgaccgttctaatatcggtttcgccaaagagacctaccagctggataccggactcagcaatgaggcctacgcgctgggggccggtatcttctttgtggtctatgccttcctcggggtgccggccaatctgctgatgcgcaaatttggcgccaggcgatggatcggctgcaccacgctgctgtggggcgtgctgtcggcggcgatggcgtgggcggatacggaagcgaaattcctgctggtacgtaccctgctgggcgcggcggaggcgggcttctttcccggaatgatctacctcacttcacagtggtttccccagcaaaaccgcgccagcattatggggctgttttatatgggcgcgccgctggccctgacgctgggatcgcctttatccggtgcgctgctggagatgcatggatttatgggccatcccggctggttctggatgtttgtcattgaaggcctgctcgccgtcgccgcgggagcgttcaccttcttctggctggacgattcgccgcagcatgcccgcttcctgagcgcagcggagaaacaggcgctgataagcgagctggcgcgcgaggaggagaaaaagattgcctcgcgcctgtccgatgcgctgcgtaacgggcgggtctggcagctggcgctgatttatctgaccattcaggtggcggtctatggtctgattttcttcctgcccacccaggttgctgcgctgctgggcaccaaagtcggcttcgttgcctcggtggtgacggccatcccgtgggtggcggcgctgtttggcacctggcttatccctcgctactccgatcgcaccggcgagcgacgcaatattgccgccctgacgctgctggcggcggcggtcgggattgcagtgtccggactggtggcgccggtgctggctatcatcgcgctgtgcgtggcggcggtcggggtgatcgccgtgcagccggtcttctggacgatgccgacgcagctgctgtccggcacggcgctggccgcagggattggctttgttaacctgtttggcgccatcggtggttttctggcgccgatcgtgcgcgtgcaggccgaaacgttgttcgccagcagcgccgccggactgttaaccctggccggcgtcgccattgtcggggtggtcattatcttttcattgagccttacccgcgcggtaccccagcgcggcagcgtacagcattga

SEQ ID NO: 137161 - DNA, 1206 bp, Enterobacter cloacae
atgaccctaccgaaaattaaacacgtccgcgcctggttcatcggcggcgccacagcagagcagggcgccggcggcggcgattaccatgaccagggggctaaccactggattgacgatcatatcgccaccccgatgagcaaatataaacagtatgagcagtcccggcagtcgtttggcatcaatgtgctggggacgctgattgtggaagtggaagccgacaacggacagaccggctttgcggtgtcgacggccggggagatgggctgctttatcgtcgaaaaacatctcaaccgctttatcgaaggcaaatgcgtcagcgatatcaaactgatccatgaccagatgcttaacgccaccctttactacgcgggatccggcggcctggtgatgaataccatctcctgtgtcgacctggcgctgtgggacctgttcgggaaagtggttggcctgccggtctacaaactgttgggtggggcggtgcgcgacgaaatccagttctatgccaccggcgcacgtccggacctggcgcaggagatgggctttatcggcggcaaaatgcctacccactgggggccgcacgatggcgacgccgggatccgcaaagacgtcgccatggtggcggatatgcgcgaaaaatgcggcccggatttctggttaatgctggactgctggatgagccaggacgttaactatgccaccaaacttgcccatgcctgcgccccttataacctcaagtggatcgaagagtgcctgccgccgcagcagtatgaaggctatcgcgagctgaagcgccaggcgcctgccgggatgatggtgaccagcggcgagcaccacggcacgctgcagtccttccgcaccctgtcggaaaccggcatcgatattatgcagcccgacgtcggctggtgcggcggcttaaccactctggtggagatcgcggccatcgccaaagcgcgcgggcagttggtagtgccccacggctcgtcggtttactcacatcatgcggtgatcaccttcaccaacacgccgttcagcgagtttctgatgaccagtccggactgcgccacgctgcgcccgcagttcgacccgatcctgctcggcgagccggtgccggagagtgggcgcattcataaatcggtcctggataaacccggctttggcgtcgagctcaatcgcgactgcaacctgaagcgtccttatcaacactga

SEQ ID NO: 137162 - DNA, 786 bp, Enterobacter cloacae
atgttggaatcaacgaaagtcccggcgctgacccgcgcgattgagatcctcaatttaattggccgcatcggctcctgcagcgcggcgacgataatagcggagctggggatcccgaaaagcacggtgtatctgctgctgggcgagctgaaaaagcagcgcttcatcagtatggataatcaggataactactgcctgtggaccaagctggtggagctggccgggcaggcgctgagcaaaatggacctgcgcgagctggcgcggccgcgcctcacccggctgatggatgagtgcggcctgctttgtcatctgggcattatcgatcagggtaacgcctactacattctgaaaattgagtctcccgccaccatcagcgtgcgctcgcatgagggtaagagcctgtcgctttaccgctccgggatcggcaaatgtttgctggcctggcagcccgccagcgttcaggcgtcgattatcgaagacctgcagtgggagcgggccacgccaacgaccatcaccgatgctcaacagctgcgggaagagctggggcggatccgcgcccggggctggagctttgataatggcgaggactatccggatgtgcgctgcgtggctgccccggtatttaacgccaataacgacctgaccgccgccatctcggtggtgggtacccgtctgcaaatcaatgaagacaatcgcgattacctggctggtaaggcgattgcctgcgcgaaagatatttcacgtctgctggggtggaaaagccccttcgaacaactcgcctcatcataa

SEQ ID NO: 137163 - DNA, 1197 bp, Enterobacter cloacae
atgttgaatgtggaaatgctgtccaccggcgatgaagtgttgcatggtcaaattattgatactaatgcggcatggctggcggatttcttttttaatcagggtttaccgttaacgcgccgcaataccgttggcgacgatctcgatgcgctggtggcgattctgcgcgaacgcagcgaacaggcggatgtgctgatcgtcaacggcggcctcggcccaaccagcgacgatctgagcgcgctggccgccgccactgcgaaaggcgaagggcttattttgcatccggagtggctggaaaccatgacccgcttttttgccgagcgcggcaggccgatggcggaaagcaaccgtaagcaggcggaaatcccggccagcgccgagatgatcaacaacccggtcggtacggcctgtggctttgccatccagctcaaccgctgcctgatgtttttcactcccggggtcccctctgaatttaaggtgatggtcgagcaggaaattttaccgcgtctgcgccagcgctttacgctgccggacccgccggtatgcctgcgtatgaccacctttggccgctcggagagcgagctggcgcaaagtcttaatccgctgacgctgcctccgggcgtggtgatgggttaccgctcgtcgatgccgattatcgaactcaagctaaccggaccggctgaccagcgtgacgccatgctggccctgtggccggaggtgcgtaaggtggctggcgacagcctgattttcgaaggtacggaagggttaccagcgcagatcgcccgctgtctgcaggagcggcagctgagcctgacgctcagcgagcagtttaccggcggcctgctggcgctccagctgtcccgcgccggcgcgccgctgctggccagcgaagtcgttccggcgcaggaggagacgctggcgcaggcggcccgctgggcggccgagcggcgcataaaccattttgccggcctggccctggcggtgagcggtcaggaaaacgatcatcttaacgtggccctggccaccccggacggcaccttcgcgctgcgggtgaagtttagcgccacccgccacagcctggcggtacgccaggaagtctgcgctatgatggcgttaaacatgctgcgtcgctggctgaatggtcaaccgctggccagcgaacatggctggattaacgtggtggattccctctcgctgtaa

SEQ ID NO: 137164 - DNA, 543 bp, Enterobacter cloacae
atgaaaaaaagcatttttatggcgctggcgggcgtgatgatggtttcttcggcggcccatgcgattagcgttaccggtgaagccggcgagcattacaccaaccttggcgtcggcttcggcaccgagtccaccggcctggccgtttcgggtaactggctgcacagcgataacgacggcgacgccgcgggtttaggcctgggactcaatattccgctggggccgttcctcgcgaccgtgggtggtaaaggtatttacaccaatccgaaacagggcgatgaaggttatgcggccgcggtcggcggcggcctgcagtggaaaatcggcgacagcttccgcctgtacggcgattattactactctccggattcgctctccagcggcattgatagctaccaggaagccaacgtcggcgccagctggaccattatgcgtccgcttagcatccaggccggctaccgttacctgaacctggcgggcaaagatggcaaccgcgataacaccatcgccgacggcccatacatcggcgccagcgccagcttctaa

SEQ ID NO: 137165 - DNA, 942 bp, Enterobacter cloacae
atggaaagggcgacgaattccccccacgatgctgtatttaaacacctgctgtcgcatcgggcgacggccagggattttctggacattcaccttcccgcaccgctgcgcgcgttatgtaacctgaacacgctgcggctggagtccgggagctttatcgacgacgaactgcgggcgagtcattccgatatcctttactcgctgcaaacgcaggcgggggagggctatatctatctgttgctagagcaccaaagctcggcggaccaccatatggcatttcgcctgatgcgctatgcgatagccgcgatgcagcgtcatctggataaagggcatacgcagctgccgctggttatcccgctgctgttttatcatggtcgcgtttctccctggccttacccgatgtgctggctggcaggctttgccgatccggacatcgcgcggcggatctatggtgaagattttcccttaattgatatcactagcaccccggacgatgaaatcatgcgccaccggcgcgtggcgatgctggagctgctgcagaagcatattcgccagcgggatttgatggacctgcatgagcagctggtcaggctcctggcgctgggatacactagccgcaggcagcttaagacgctgttgcactatttattacaggcaggaaacgccgccgatccggttgcttttttgcgtcatcttgcgcaaaacgttccccggcggccgcataaggagacgctaatgaatattgcccagtttctggaacaacgcggccatcagcaaggattaaagcaaggtcttgaacaaggtctacagcaaggtatcgagcaaggtgagcagcagaccgcggagcgtatcgcccgggcgatgcttgctaacggactcgacctgtcgctggtggcgaaactgaccggcctcgccccggaatgtctggcccggctgcagcattaa

SEQ ID NO: 137166 - DNA, 426 bp, Enterobacter cloacae
atgcgccaaaggacgattgtttgcccgctgatcgagaatgaaggccattatctgctttgcaaaatggccgccgaccgcggggtttttcccgggcaatgggccttatccggcggcggcgtggagccaggggaacgtattgaagaggcgctgcggcgggaaatacgcgaagagctcggcgaaaaactcatccttacccatatcgcgccatggtgctttcgcgacgatacccgcgtcaaaacctaccccgacgggcatcaggaaacgatctacatgatctatctcatcttcgactgcgtgagcgccaatcgcgatgtgacgatcaacgaggagtttgacgattacgcctgggtcaaagccgaagatctcaaaaactacgatcttaatgccgccacccgcgttactctcagcctgaaagggctactttag

SEQ ID NO: 137167 - DNA, 1341 bp, Enterobacter cloacae
gtgacctttaacgactggccctggcggcattggcatcagcggcgcggagaggccctcgccttacgtctgaataaccagccgctgacctggcgggagctatgcgcgcgggttgacgcgctggcgtctggttttgccgcgcagggcgtaatggaagggcagggcgtggcgatccgggcctataaccagccggaaactctgctggcatggctggcgctgctacagtgcggggcgcgggtgctgccgctgaatccgcagctgccagcggtgttgctgcaggaactgctgcctgcgttaaccgtacagcatcaactggtgcttaacggtgatacgctgccggggaatttaccggcgttaactctgcaggcggcagaaggcgcttgtgccgtttgttggcatggcgatcggttggtgtcgatgacgttgacctccggttcaaccggcctgccgaaagcggcggtacatagcgccaacgcccatctggccagcgcggctggcgtgctggcgctgatgccgtttgccgcaggagatgactggctgctgtcgctgccgttgttccatgtctccggtcaggggatcgtctggcgctggctgctggccggcgcgcgactcacggtacgtgacaaacagccgctggcgcagatgctgcacggctgtacccatgcttcgctggtgccgactcagctatggcgcctgctgaatgatgatgctgcggtttccctcaaggcggtgctgctcggcggcgcgtcgatcccggtcgaattgactgaacgggcgcgaaagcagggcatacgcagcttctgcggctatggcctcaccgaattcgcctccaccgtgtgtgccaaagaggccgacggcgctgcggatgttggcgaagcgctgccggggcgagaggtgaaaatagtcgccggcgagatctggctgcgggcgtcgagtatggccgcaggctactggcgggatggtcaattgttgtcattaaccaacaatgaaggctggtttgcgacgcgcgatcgcggagcattgcataacggtcggctgacggttgttgggcgactggataacctcttttttagcggtggagaaggtattcaaccggaagaggtcgagcgtgtgatactcgcccatccacaggtacagcaggtgtttatcgtgccgctggatgatgcggaatatggccagcgcccggtagcggtggtggaatgcgatgacggctgcgagttgagcgcgctggcggcatggagcgcgctgcggttgccggaaacgttaaaaaacggcgggattaagatttcgcgccgggcgctgtgcgagtgggtcaggcagcagacgcatgcgaccgtatcgtag

SEQ ID NO: 137168 - DNA, 966 bp, Enterobacter cloacae
atgcgcgtttcgcaggtttaccgctggcagataccgatggacgcgggcgtggtgctgcgcgagcggcggttaaaaacccgcgacgggctgttcatccgcctgcaggagggggaacgcgaaggctggggcgaaatttctcccctgccgggattcagtgtcgagacgctggaagaggcgcaaatggcgctgttaacatgggcacaggcctggcgcgacggcgccgagccgccgcttcccacgcagccctccgtcgcgtttggcatcagctgcgcgcaggcggagcttggcggcgaactaccgcaggccgcggattatcgcgcggcgccgctctgctccggcgatccggatgagctattcgccagactggcggcgatgcccggcgagaaggtcgctaaggtcaaagttggcctctgggaggcggtccgcgacggtatggtggtcaatctgctgctggaggcgatccccgacctgcagctgcggctcgatgccaaccgcgcctggacgccgctcaaagcgcaacagttcgccaaatacgttaatccggcgtaccgccagcgcattgcttttcttgaagaaccttgcaaaacgcgggaggattctcgggcctttagccgcgagacagggatcgctatcgcctgggatgaaagcctgcgcgaggcggatttccgctttgtcgccgagccgggggtgcgtgcggtggtgatcaaaccgacgctaaccggcagtttgcagaaggtgcagcaacaggtcgccgtggcgcatgcgctggggttgagcgtagtgatcagctcgtcgatcgagtccagtctcggcttgacccagctggcgcggattgccgcctggctgacgccgcagactattcctgggctggatacgctgtcgctgatgggcgcccagctggtacggccgtggcccgaaagtacgctgccggtgctcaacattgatgcgctggagccgctgctgtga

SEQ ID NO: 137169 - DNA, 681 bp, Enterobacter cloacae
gtgacgacgttaaaacccttgctggcccgcaaccgcagctgggcgctgcagaagtgtcagcatgacccggactatttcgaaaaatggatcgacgggcagaggccccactcgctgtggatcggctgctccgacagccgcgtgcccgccgaggtgctcaccggcagtcagcccggcgagctctttgtccaccgcaacatcgccaacatgctcgatcccgccgacgacaacgtcatgagcgtcctgcagtatgccctcgactaccttgaggtggagcgggtggtgctctgcggccactacggctgcggcggcgtgcaggcggcgctctccctgcccaccctgccgctggcgcaggagtcctcggcgctggctcgtcgcatcggccagctgcgccacaccctgcatcacgaaattgcgcagatcgccgatgactgttgtattgcggcctcccccggcgccagcaccagcgccagcgccaacgcggagcgttctcgccatgcgctggacgccctggtggaagccaacgttcgcgcccagttcgcccgtctgctggagagtgaaccggtgcagacggtgctcgccagcgggcgaccgctcagcctgcacggctgcgtctacgatctggcttccggccatttaaccaccctcgtcgaacacctctcaccgcaggagcacgccccatga

SEQ ID NO: 137170 - DNA, 1470 bp, Enterobacter cloacae
atgaacacgcttcgtcaggactctctcgccggcatcgtcgtcttccttgtcgccctgccgctgtgcctcggcatcgcccaggccagcggcttaccgcccttcgtcggcctgctgaccggcatcatcggcggcctggtcgtcaccgccctcagcccctcccgcttcgccgtcagcggccccgccgccggactggtcaccatcgtcgtcgccgctattgaatccctgggttccttctccctcttcctgatggcgctggcgctggccggcgtgctgcagctgctgttcggcatcctgcgggccgggcgctttatctcgctggttcccgccagcgtcatcaaaggcatgctggcggcgatcggcatcctgctgattatgcagcagatccccgtcgcgctcggcagcgcagaagagaccgggctcgttgatatcgtgaagggtaacgccaccttctccctcagtgctatcgccgtcgccgcgggcggtctgctggtgctctggctgtggggctcgccgcttattcgccgggtgaagagcctgcgctggatccccgggccgctgatcgccgtcctgctcggctgcgtgaccaccctgctgctgatccattttgcgccgcagcagctggccgctctgccgcgtattaccctgccggcgttcggcagcctcggcgacctgctgggcgagctggaatctccggcgtggagcgcgtggcgcaatccgtcggtgtgggtggtggcggtaaccctggcgctggtcgccagcctcgaaaccctgctgagccaggaggcgctgaaaaagctgcgtccgcaaaatccgccgccttcgccgaaccgcgaaatggtcgcccagggcgtgggcaatctgctctccggcgtgctgggggcgatgccgatcaccgcggtgatcgtccgcagctcggtgaacgtcagcaacggcgcgcagagcaaactgtcgatctttatccacggcgtcctgctgttaatctgcggcctgtggttcagcggcctgctaaccttaatcccgctcgccagcctcgccgccgtgctgctgtataccggctataagctggcgaccccgcggctgttcatcgagcagttccgccagggggcggcgcagtacgtcccgttcctcgccaccatcggcgggattatcgcctgcggcatgctggcggggatcgggattggccttgccacccagatggcgttcagcctctggcgcagccatcgccactcgctgcagctggcgcgctacgatgaccactacgtgctgcgcatccagcagaatctgacctttatgcacaatccgcatctgctggccctgctggcgaaaattccggaaaagagcgtggtgatcgtcgagcacgacagcgtcggctatctcgacccggacgtgcgggcggtgctggatgattttgccgagaacgccccgcagcgcggcatccgccttaatcagtggccgctggccagccgctga

SEQ ID NO: 137171 - DNA, 1020 bp, Enterobacter cloacae
atgagcatcattaaaagctacgccgccaaagaagcgggcgccgatctgtcgctgtgggaatacgatgccggtgagctgcagccggaagatgtcgaagttgaagtggaatactgcgggatctgccattcggacctgtcgatgatcgacaacgaatgggggatgtcgagctatccgctggtggccggtcacgaggtgattggccgggtggcggcgctgggcagcgcggcgcaggataaagggctgaagattggccagaaggtcggcatcggctggacggcgcgcagctgcggccattgcgacgcctgcatcagcggcaaccagatcaactgtctggaaggctcggtgccgaccattctcaaccgcggcggcttcgccaataagctgcgcgccgactggcagtgggtgatccccctgccggagagcatcgatctggcgtccgccggcccgatgctgtgcggcggcatcaccgtctttaaaccgctgctgacccaccacgtgaccgccaccagccgcgtcggggtgatcggcatcggcggcctcggccatatcgccattaagctgctgcgggcgatgggcgcggaagtgaccgccttcagctccaacccggccaaagagcaggaagtgctggcgatgggcgccgatcgcgtggtcaacagccgcgatccggaagccttaaaagcgctggccggtcagttcgacctgatcatcaacaccgtggcggtggacctcgactggcagccgtacttcgaagccctggcttacggcggcaacttccacaccgtcggcgcggtgatgaagccgttcccggtaccggcctttaccctgatcggcggcgaccgcagcatctccggctcggcgaccggtaacccgtccgaactgcgcacgctgatgaagtttgccgggcgcagcaaagtggctccgaccaccgagctgttcccgatgtcgcagattaacgaagcgctgaagcacgttcgtgaaggcaaagcccgctaccgcgcggtgctgaaagccgacttctga

SEQ ID NO: 137172 - DNA, 873 bp, Enterobacter cloacae
atgagaaagacctggcttccctggctgatcctgtcgccttccctgctgtttttactgctgtttacctggttcccgctggggcgttcggtgtatgacagcctgtttgatacccgcatggccagcgacggcgcacagtacgtcgggctggataacttcgcccgcctgtttgccgacggcgttttctggcagtcgctggtcaataatctgctctatatcctgctgacggtggtgcccggggtgaccctcgccctgctgctggcggtcgccctgagcgagaaccatcgcgtcaaccgctggctgcgcaccgcctttttcttcccgatgattatcccgatggtcagcgccgccgcgctgtggctgtttatctttatgcccggcctcggcctgctcgaccactatctggcgaagctgttcgggccgatgaacaacaactggctggggcgcagcaacagcgcgctgctggccctggcgctgatcggcgtgtggaagttcgccggctactacatgctgtttttcctcgccgggctgcagagcattccggcctcgacgcgggaagcggcgctgatggagggggctacccgcacgcaggtcttttttaaggtcacgctaccgctgctgcgcccgaccctgagctttgtgatcaccaccgcgctgatctactccatcacccagatcgaccacgtggcggtgatgacccgcggcgggccggacaacgccaccaccgtgctgctctattacatccagaatctcgcctgggatacccacgacctcggcaaagcctccgccgccaccttcctcaccctggccgggctgttcgccttctcgctgattaacctgaaactgctggagaaaggagcccactatgagcgctga

SEQ ID NO: 137173 - DNA, 888 bp, Enterobacter cloacae
atgagcgctgaaatctcgccgctgctggtccgcacgcccgccgccgcccgtccgctgtggctgcgcctgcgccgctcgtcgccctttacgctcacagtattaatgtgctgcatggcgctgctgtgggtcagcccgtttatctggatgctggcgacctcgttcagcgccaccaccttcggcgacgatatggcgtcgctgctgccgcgcctgccgctgaccctcgataacttccgcgacgcctggcagagcgccgactggctgagcctgtacgccaacacccttatcttcaccttcggcaccttctgcgtgcagctgttgaccatcaccaccgccgggtacgtcttcgcctgccacgaatttcgcggcaagcagacgctgtttctcctgttcctggtgcagctgatgatcatgccggtggtgatgatggtgccgaacatgctgaccctgaaaaccttcggcctgctcaacaccctcaccggggtgatgatgccctacttcacctcggcgttcggcgtgttcctgatgcgtcaggcgttcctcgccattccgaaagagctggaggaggcggcgctgatggagggctgccgctggtggcaggtgctgttccgcgtactgctgccgatgtcctggccgtcggtgctggccttcgccaccgtcagcattacctaccactggaacgagtacctgtggccgctgatgatgctcaacgatcccgataagcaggtgctgaccgtcgggctggtctctttcgccatgggcgccgaatccggcggccagtggggcaccatcggcgccgggacgctgatggtctgtctgccgctgatgctggcgttcatcctttttcagaaacagttcctgcggagcttcggcttctccgggatcaaataa

SEQ ID NO: 137174 - DNA, 825 bp, Enterobacter cloacae
atgctgttagcgcacatttccgatacccatttccgcagccgcggcgagaagctgtacggttttatcgacgtcaatgccgccaacgccgacgtggtctcccagcttaacgcgctgcgcgagagcccggacgcggtggtggtgagcggggatatcgtcaactgcggccgcccggaggagtatcaggtggcccgccagatcctcggcagcctgaactatccgctgtatctgatccccggcaaccacgacgacaaagcccattttctcgagcatcttcacccgctgtgcccgcagctgggcaacgatccgcaaaatatgcgctatgcggtggatgacttcgccacccgcctgctgtttatcgactccagtcatgccggcacttcaaaaggctggctgaccgacgagaccatcagctggctggaggcccagctgttcgagggcggcgacaaaccggcaacgatctttatgcaccacccgccgctgccgctgggcaatgcgcagatggaccctatcgcctgcgaaaacggccaccgtctgctggcgctggtggagcgttttccgtcgctgacgcgcatcttctgcggccacaaccacagcctgaccatgacccagtatcgccaggcgctgatctccaccattcccggcaccgtccatcaggtgccgtactgccacgaagacacccggccctattacgacctctccccggcctcgtgcctgatgcaccgtcaggtcggtgagcagtgggtgagctaccagcactcgctggcccactacgccgggccgtggctgtacgacgaaaacatcagttgcccaacggaagagcgctaa

SEQ ID NO: 137175 - DNA, 1074 bp, Enterobacter cloacae
atgctcagtctgcaaaacatcagtaaacgtttcgacggcaaaccggcgctcagcgccctgtcgctggatattcacgaaggcgaattcgtggtgctggtcggcccgtcgggctgcgggaaaagcaccctgctgcgcctgctcgccgggctggagccggtcagcgaaggacaaatctggctgcatgatgagaacatcaccgccaccacgccgcgcgagcgcaacttcgcgatgatcttccagaactatgccctgttcccccatctgtcggtgcgcgacaacatcaccttcggcatgaaggtgcgcaaggaagagaaaagcagctggcagccgcgggtggataaagtggcgcagatgctgcagctggaggcgctgcttgaccgcaaaccggcgaagctctccggcggccagcgccagcgggtggcgatggcccgggcgattgtgcgcagtccgcggctgttcctgatggacgagccgctctccaacctcgacgcccgcctgcgcagcgaagtgcgcgacagcattatggcgctccaccagcagctgaaaaccagcaccatctatgtgacccacgatcagaccgaggcgatgtcgatggccgaccgcatcgtggtgatgaacggcggccacgtgcagcaggtcgggcgcccggagtatctgtacgccaacccggccaatctgttcgtggccggatttatcggttcaccggcaatgaatctgctatcgctcccctgcgttgacggcaacgttcagcttggcgaacaacgccatccgctgccgccgcgccaccgggatcagacccacgtctggctgggcgttcgcccggaacatattactgaccgcgtggaggagggccatctgcgcctgccggccaccgttctgcaacgagaactgatgggggccgattacctgctccacgtcagcaccccgatcggcaccctgcgctttagccgccgccaccgcggcacggtgccggagaaaggcgagtcgctaccgatcggcttttcgcctgccgatgtgcatctttttcatgctgagacccagcataatttactgatggagtgtaatcatgtttaa

SEQ ID NO: 137176 - DNA, 1311 bp, Enterobacter cloacae
atgtttaaaccttttacgctagtcgcggttggcctcagccttgccctgagcggcgcggcgctggcaaaagagaaaatagacttcatgttcccggcgccggtggacggcaagctgaccatggagatgacccgcgtcattaagcaattcaacgactcgcagcaggatgttgaagtgcgcgggatcttcaccggcaactacgacaccaccaagatcaaagccgaatcggcgcagaaggccggccagccgccggcgctggtgatcatgtccgccaacttcaccaccgatctggcgctgaaggatgaaatcctgccgatggatgagctgtttaaatatggcgatcaaaaggccggcgattttctgcaaaaggaattctggcccgcgatgcataagaacgcccaggtgatgggcaccacctatgcgatcccgttccataactcgacgccgatcctctactacaacaagacgatgttcgatcgggccgggatcaaacagccgccgcagacctgggccgagctgctggccgatgccaaaaagctgaccgacgagagcaaaggccagtgggggatcatgctgccgtcgaccaacgacgactacggcggctggatcttctcggcgctggtgcgcgccaacggcgggaaatactttaacgaagactatccgggcgaggtctattacaactcgccgaccgccatcggcgccctgcgcttctggcaggatctgatctacaaggacaaggtgatgccgtccggggtgctgaactcgaagcagatcagcgccgcgttcttctccggcaagctcgggatggcgatgctcagcactggcgcgctgggctttatgcgcgagaacagcaaagactttgagcttggggtggcgatgctgccggccaaagagcagcgcgcggtgccgatcggcggcgccagcctggtgagttttaaaggcatcagcgaggcgcagaagaaagcggcgtatcagttcctgacctatctggtgagccccgacgtgaacggcgcgtggagccgcttcaccggctacttctcgccgcgcaaggcgtcatacgatacgccggagatgaaggcctatctgcagcaggatccgcgggcggcgatcgcccttgagcagctgaagtacgcccatccatggtactccacctgggagaccgtggcggtgcgtaaggcgatggagaaccagctggcggcggtggtcaatgatgccaaagtgacgccggaagcggcggtgcaggcggcgcagaaggaagccgacgcgctgatgaaaccgtatgtggataagaccgcgctggcggaagtgaagtga

SEQ ID NO: 137177 - DNA, 900 bp, Enterobacter cloacae
atgaacaaagataacgtcaaactggctatcgccccgatcggctggactaacgatgatatgccggagctcggcagcgaaaacaccttccagcagatcgtcagcgaaatggcgctggccggctttaccggcagcgaagtcggcagcaaatatccgcgcgacccggcggttctcaagccgatgctggatatccgcggcattcagatctgcaacgcctggttcagcacctttttcgccaacggccagcgggaaaaaaccattgatgaattcgtcaatcacatgaacttccttcatgcgatgggggcgaaagtgattggctgctccgagcagagcggcagcatccaggggctggataaaccgatcctcggcgatgcgaagccgtgcttcagcgacgaagagtggcagcgggtggcagaaggctacaacaccctcggccgcctggcggcggagaaggggatgcaggtctgtctgcatcaccacatgggcaccggcattcagaccaccgcggaaatcgacaaatttatgtcgctggtggacgagcgcgtcttcctgctgttcgacaccggccacgcctggtattccgaaggcggcgaagcgccgatgctggcgatcctcaaaaagtatctgccgcacatcaaccacgttcacctgaaagacgtccgtccgccggtgatcgaccaggtgcgccgcgacggcctgtcgttcctcgacggcgtgaaaaaaggcaccttcaccgtcccgggcgacggggtgatcgatttccgtccggtgttcaagctgctggacgactttggctataaaggctggatggtagtggaagccgagcaggatcctgctctggccaatcctttcgaatacgccgtcaaagcgcgcaaatatattcgcgaaacggcagggatctaa

SEQ ID NO: 137178 - DNA, 885 bp, Enterobacter cloacae
atgaaaattgcttttgatgtggatgtcattaaggacctcgggatcacccgcatggtccatcaggtagcggagtggggctacaagtacattgaacagtcgccgcacccgcagattaacccgttctacaagcacccgcgcgccagccgggagatcatggcggagtacaagcaggcgctgcgcgataccggccttgagctgtcgtcgtttatctgcgtctaccgctggtccggcccggacgaactgcgccgtcaggcggcggtgaaaaactggaaacggctggtggaaattgcggtggagatgggcgttcaggtgatcaacaccgagttctccggcgatccgaatcagcctgagatctgcgatgaaatgttctatcgctcaatggaagagctgttgccgatttttgagcgggaaggcatccgcgtggagatccaggcgcatccctgggatttctgcgaagagaacaatgaaaccgtcgatatcgtgaagtcgttccgcagcgataacgtgaagtacgtctacagcgtgccgcacacctttttctacgacaaaggcgtcggcgacgtggcgagcatgctgcgctatgccgggagcgatctctcccatgtcctgattgcggacacccgcaaccatacgaaacattgccgctatatcgttaacccgccgggcgtggatgccgtggtgcaccagcacgtaggcgtcggggaaggggatgtggatttcgacgcgctgttccgcaccctgcgcgaaatgaaattcgccgagcagaccttcaaggtcggcggggagccgattgtcgccacctcgctgtttggctacccggaaaaaatgaaataccaggcagtggaaacccgtgaacttattgaacgtgaattgctgcgccggtaa

SEQ ID NO: 137179 - DNA, 1014 bp, Enterobacter cloacae
atgtcgctcaaattaggtgtcatcggcgctggcgctatcggtaaagaacacatccgtcgctgcacccaggttctgcagggcgccaccgttgtggcggtgtctgatatcaatgccgacaacgcccgcgcggcggtcgcgctgccgggcgtgcaggcggaagtctacgccgacggtcacgacgtgattaacgccagcgatgtcgatgccatcctggtcacctcctgggacccgacccacgaagaatacaccctggccgccatcgccgccggtaagccggtattctgcgaaaaaccgctggcgatgaccgcggaaggctgccgccgcatcgtcgatgccgaaatgaaggccggccgtcgtctggtgcaggttggctttatgcgcccgtacgacgaaggctatctggcgctgaaaaaagtgatcgacgatggtgatatcggcgcgccgctgatgctgcgctgcgcccaccgcaaccagtcggtcggcgagaactacaccaccgatatggcgatcaccaacaccctgatccacgagctggacgtgctgcgctggctgctgaacgatgactaccgttccgtgcaggtgcgcttcccgcgctccacctcgcacacccatgcgcgcctgaaagatccgcagatcgtctcctttgaaaccaaaaaaggcaccctgatcgacgtcgaagtgttcgtgaactgccagtacgggtatgacatccagtgcgaagtggtcggcgagaccgggattgcccgtctgccggagccgtcggccgtccagatgcgcaagtccgccagcctgtcgaccgccattctcaccgactggaaagaccgctttatcaaagcctacgacgtcgagctgcaggcctttatcaacgacgtcaaagccggccagctgcacggcccgtcggcctgggacggctacgcggcgtcggtggcggcggacgcctgcattaaagcgcagggaaccagcgagccggttgaagtgacgctgcctgagtgcccggcattctacaaacgttaa

SEQ ID NO: 137180 - DNA, 1941 bp, Enterobacter cloacae
atgggcaaactgagactgacaacggcgcaggcgctggtgaagttcctcgataaccagtacctggaagtggatggcgtagagctgaagttcgtgaaaggcattttcgcgattttcggccatggcaacgtcctggggctggggcaggcgctggagcaggacagcggcgatatgcgcgtctatcaggggcgcaacgagcaggggatggcccacgcggccaccggttttgcccgccaggccctgcgccggcagattatcgcctgcacctcctccatcggtccgggagcggccaacatgatcaccgccgccggcaccgccagcgccaaccgcatcccgctgctgctgctgccgggcgatgtcttcgccacccgccagccggatccggtgctccagcagattgaacagagctacgatctcagcatcagcaccaatgacgccttccgcgcagtcagcaaatactgggaccgcattacccgcccggaacagctgatgagcgcctgcatcaacgccatgcgcgtcctgaccgacccggcggaaaccggcgcggtgacgctgtgcctgccgcaggatgtgcagggcgaagcctgggactacccggaatccttctttgcgcgccgcgtgcaccgtctcgaccgccgcccggccagcgccgcgcagctagcggatgccgtggcggccatcaaagccagccgtaaaccgctgatcgtctgcggcggcggggtgaaatactccggcgcgggcgaagcgctgtcccgtttcgccgagcgctacggggtgcctttcgccgaaacccaggccgggaaggggacggtggtctcttctcaccccctgaacgtcggcggcgtcggcgagacgggctgcctggcggcgaacctgctggcgaaagaggccgacctggtgatcggcgtcggcacccgcttcagcgattttaccaccgcctcgaaatggattttccagcacccggaggtgcgtttcctgaatattaacgtcagcaacttcgacgcctggaagctggacggcattgccatgctggcggacgcccgggaagcgatgaccgccctcgacgcggggctggcggacagcggctggcaggccggctggggcgcgcagatcgagagcgtgcagagccgtcagttaaaagagacccagcgcgtctaccaggcggtgtggcaggagaaatcctttgtgccggagatcgacgatcatctcgatcgcgaatcggtgtatcgcgagttccgccagatcaccgactccaccctgacccagagcagcgttcttggggtactgaatgaaacgctgccggccgaggcggtgatcgtcgcggcggcgggcagcctgccaggcgatctgcagcgcgtctggcgcaaccgcgcggaaaacacttaccacgtggagtacggctactcctgcatgggatacgaagtcaacgctgcgctgggcgtgaagctggcgcagccgcagagcgaagtctactccctggtcggcgatggctcgttcatgatgctccactctgagctggtcacctccctgcaggagcgggcgaagatcaacgtcgtgctgttcgacaacatggccaacggctgcatcaacaacctgcagatggagcacgggatggacagcttcggcaccgagttccgctaccgccagccggaaaccggccagctgcagggcggcctggtgccggtggacttcgccaccatcgccgccggctacggctgcaaaacctggcgcgtcaccaccctggacgaactgcgccatgcgctggacgccgcccgtcgcgaaacggtcagcactctgattgatattaaagtgctgccgaagaccatggtgcacaaatacggcagctggtggaacgttggggtcgcccagacggcgctctctgagcggatccgcaaggtggcgcaaatgattaatgaaaagcgcgcccaggcgcgtgattactaa

SEQ ID NO: 137181 - DNA, 1914 bp, Enterobacter cloacae
atgaatgcagcagtaaagcggctcgacgtcatctgtataggtcgggtggccgtcgacctctatgcccagcagattggttcgcggctagaagacgttgccagtttcgcgaaatatctcggcggctcctccggcaacgtggcctttggcaccgcgattcaggggctgaaatcggccatgctggcgcgcgttggcgatgaacacaacggccgtttcctgcgcgaaacgctgaaccgcgccggggtggataccgagtatctgattaccgacaaatctcgcctgaccgcgctggtgatgctggggattaaggatcaggagaccttccccctgattttctaccgcgataactgcgccgatatggccttaacgcctgacgacattagcgaggagtatattgcctcctcccgggcgctggcggtgactggcacccacctgtcgcacgccaacacccgcgccgcggtgctgaaggcgctggagtacgcccgccgtcacggcctgcgtaccgcgctggatatcgattaccgtccggtgctgtgggggctcacctcgctcggcgatggcgaaacccgtttcattgagtccggaccggtcaccagccagctgcaggaagtgctgcatctgttcgatttggtggtgggaaccgaagaagagtttcatattgccgggggcagcaccgataccctgaccgcgctgaaaaatgtgcgcaatgccaccaaagccactctcgtctgcaagcgcgggccgatgggctgcgtggtgctggaaggcgacatcccggacagctgggaccaggtgccgctacagcagggcgtgcgcgtggaggttctcaacgtgctgggcgccggggatgcctttatgtcgggtctgctgcgcggctggctcaacgacgaaggctgggagcaggcttgccgttacgccaacgcctgcggggcgctggtggtctcccgccacggctgcgcgccggcgatgccgaccaaagtcgaactcgacgactacctgcagcgcgccgaatcggtgccgcgcccggacgtcgacgagcgcctcaaccacctgcaccgggtcaccagccgccgtcagcagtggccggagctgtgcattttcgcctttgaccatcgtaaacagctggccgatctggcgcgggagaccgggcgcggcgaagcctgcattccgcagctcaagctgctgttgttggccgcggccgaagcggcggcgcaggaggcaggtctcgatcagcgcagcggcattctggccgacggcacctacggccagcgtgcgctcaacgccattaccggcaagggctggtggatcggccgccctatcgaactgcccagctcgcgaccgctgcgtctggagcatggcaacatcggctcgcagctgatcgactggccgctggagcatgtcgtcaaatgcctggtcttctatcacccggacgacccggcggcgctgcgtgcagagcaggatgccctgctgctcgaggtctggcaggcctgtaacaagtcaggccatgaactgctgctggaggtgatcctgccggaaaatggcccggacaaagacgagcgccattaccacaccatgctggaacacttctatcagctggggatcaagccggactggtggaagctgccgccgctctccagcgccagctggcagcagatcaccgccctcatcgagcgtgaagatccgtggagccgcgggatcctgatcctcgggcttgacgcgccttccgacaaactgcgcgccggtttcgccgaggcggccgcacacccgatgatcaaaggtttcgccgtcgggcgcaccatctttggccagccgtcgcggcgctggatgcagggtgagctcagcgatgaggccctgatagaggaagtgaaacgcaactacctgacgcttattggctactggcgcgaagcccgccgctga

SEQ ID NO: 137182 - DNA, 858 bp, Enterobacter cloacae
atggccaataacccaacacagctgaccatcctgcaggatgaaatcaggcgtcgctacgatacattaagcaaacgcctgaaacaggtcgcccgctatatccttgataacagcaatagcgtggctttcgataccgtggcctccattgcgcaacaggcggatgttcccccttccacgttgattcgttttgccaacgccttcggcttcagcggctttaacgaaatgaaacagatgttcaagcaacatttgatggaagagaccgccaactataccgagcgcgcccgtcttttccgccagaccaccagcgatgagtccagcccgccggaaacgccgacggaaatcctcaatatgttcacgatggtgaacaaccaggcgctgcagcagctggcgatgcagacctccagcgatgatctggagcgcgcggtggccctgctgggcgaggcgaaaaatatttacgtcattggtctgcgccggtcgtttagcgtcgcctcttatctgacctatgcgctgcgtcacctcgatcgcaaagcctttctgatcgacggcctcggcggcatgttcaccgagcagctgagcctggtcggtccgaaagacgtggtagtggcggtgagcttctcgccgtacgcccgggaagtggtcgagctggtggagctgggcgcgcagcgcaaagcgcgacagatcgccattaccgacagccaggtcagcccgctggcggccttcagcgatgtctgctttgtggtgcgtgaagcgcaggtggatggcttccgctcgcaggttgcttccctgtgtctggcccagacactggcggtttcgctggcgctgaacagcagccaggagtccgaggccaagcagaaggcgtga

SEQ ID NO: 137183 - DNA, 1014 bp, Enterobacter cloacae
atgaggcaacacggcaaggtatcggaagtgacggaaaagaagacggctgtctatgtggatgaccaacagcgcatcctgatcagcgagctggcgcgcggctggctgtggcgcagcgagctgccgacctggctgctgattgtgacggtttacggcggctggtttgcctgcgtggcgggctggcggacgctgggactgtttccggccacgctgctgttgatctggtttaccgcctggtatatgtccttacagcatgagctgatccatgggcatcccacccggctggcatggtttaaccagctgttggggacgctgccgctggcggtctggtatccctatggcgtctaccgcgacagccacctggcgcaccatcgcaaccatctgctgacgcaccctgaggatgaccccgaatcgtactacgtaacggcggaaagctggcagcgcttctcagcctggcagcgccgccttatccacctgcgcaacaccttctgggggcgtctgctgctggcgccgatgatggatattattcacaccctgaacagcgcgctgcgggctttccgcgagggcgaccgccgcgctatcgccatgtggagtctgcatctgttgctgctgacgggcctgctgacctggatggcggcgcagggtttttctccgctgtggtttgtgctggcggtgagctacccggcgctggccctgaccaaagtacgctcttttctcgaacaccgcgccgcggatgacccgctggcccgctcggtgatcaacgaggccgggctcccctggcgggcgctgttcctcaatctcaactaccatgcggtgcatcatgatctgccaggggtcccctggtacgctttacgtcaactgtatctgcatcgccaggcggcgtatctgcagcgtaatcaggggttcctggtgcgcgggtacggcgagtggcgacgccattttagccgccgggcggtggcggtgaacgcccatccgggctttggcgagcaggcgcaggcgggaggagaatatggctga

SEQ ID NO: 137184 - DNA, 801 bp, Enterobacter cloacae
atggctgaacgcatgacttttccgatgtatgccatccaccgtcaacagacccaggccctgtggcaggcggtgcagtcgctgctggacgaacgcggcgtgatggtggcgggggaccctccggcggctgaccccggggatctgctggctcactggcgccagccgacgctgttgctgagccagacctgtggctacccgctggtgacccaattgccggaggtgcagacggtgggctgcttccactacgctgcgcccggttgcgaagggcgccgctatcgcagcctgctggtggtccgcgaagcggatagtcaccggatgctgggggacttttttggccgtcgggcggtgtgcaatgccgagcactcgcagtccggctacaacgtactgcgtaaaatggtcgcgccgctctcccgggaggggcgttttttttcagcggtgatgttcagcggcagccatcggcaatcgctgcgcgaactgcagcaggaaaacgccgatatcgccgccatcgactgcgtgacctacgctctgctgcagcgccatcagccgcaggctctggctggcctggtggcgatcggctggagcccggccgcgccagggctgccgctgatcaccgccggcgccaccccggcggcaacgctgaatagcctgcgcgaggcgctccagcagctggtaagcgatgatcgctatcgttccctgtgcgacgccttgctgatctgcggctatagcgatatgtcgcgggaggcctatgcgccgctgctggcgtggcgggatgaggccgcggcgctgggggtcagccagctatag

SEQ ID NO: 137185 - DNA, 942 bp, Enterobacter cloacae
atgaatactttttctctgcctaaaacacagcatctgatagttttccaggaagtgatccgcagcgggtcaatcggggccggagcaaaagcgttaggactcactcagccggcggtcagtaaaattattggcgacatggagagttattttggcagcgaattaatcgtccggcgaaatactggcgtctcgctcaccgaggccgggcaggtatttctcaactggtcagaagcgatcacccgtgaaatgaaaaatatggtcaatgaaatgaatgctctgaccaacagcgcggtggtggatgtctcctttggtttcccttcgctggtcgggtttacctttatgtcggagatggtgcatcagtttaaaatgactttccccaaggcgcgggtctcgatgtatgaggcgcagctctccgcctttttgccggcaatccgcgacgggcgcctcgacttcgccatcgggacgctgagcgatgagatgaaactgcaggacctgcacgtcgagccgctgtttgagtctgagtttgtgctggtggcgaaccgggcgcggatcggcaacggcaccgtccgcctggcctcgctccagcacgagcagtgggtgctgccggagaccaatatgggctactacagcgaactgctgaccaccctgcagcgcagcggtatccgccgtgaaaatatcgttaataccgattcggtggtaacgatctataacctggtgctcaatgccgattttctgacggtgatcccctgcgacatgaccacgccgtttggctcgagccagtttgtcaccatccccattaaagaggccttgccggtggcgcgctatgcggcggtatggtcgaaaaattaccggttaaaaaccgccgcggcgtcgctggtggagatgacgaaacactattcctcggggcagggcaaccgccactggcagccattacaaattattgcgtaa

SEQ ID NO: 137186 - DNA, 936 bp, Enterobacter cloacae
atgcatattacctacgatcttccggtatctattgacgatattctcgaagcgaaacaacgcctcgcgggaaaaatatataaaacaggcatgccccgttcgaattattttagcgagcgctgccagggcgaaatatttcttaaattcgaaaatatgcagcgcacgggttcatttaaaattcgcggcgcctttaataaactgtgcggtttaaccgcggcggaaaaacgcaaaggggtggtggcctgctcagcgggcaaccacgcccagggcgtctcgctctcctgcgccatgctcggcattgacgggaaagtagtgatgccgaaaggggcaccgaaatcgaaagttgccgccacctgtgattattcggcggaagtggtgctacatggcgataactttaacgatacctatgacgacccgcaggttatcgccgggcaggggacgattggactcgaaatattagaagatctgtatgacgtggataatgtcatcgtgcccattggcggcggcggcttaattgccggtatcgcgattgcgattaaatccattaacccgacaatccgcgttatcggcgtgcagtcggagaatgttcacggcatggccgcctcctggtatgccggggaaatcaccagccatcgccacgccggcaccttagccgatggttgcgacgtcgcccgcccggggaaactgacctatgaaatcgcccgccagctggtggatgacatcgtcctggtgagtgaggatgacattcgccagagcatggtcgccttaattcagcgcaataaagtgatcaccgaaggggccggggcgttagcctgcgccgcgttattaagcggcaaactcgacagctatatccagaaccgcaaaacggtcagcctgatttccgggggcaatatcgatctctcccgggtatcgcaaattaccggttttgttgacgcttaa

SEQ ID NO: 137187 - DNA, 1332 bp, Enterobacter cloacae
atgagtacgactgagagcattgcatccagccagacaagcctttcgtcctggcgtaaatctgacaccacctggaccctgggcctgtttggcaccgctatcggcgccggggtgctgtttttcccgatccgcgcaggcttcggcgggctgatcccgatcctggtgatgctggtgctggcctatcccatcgccttttattgccatcgggcgctggcccggctatgcctgtcgggggctaacccctccggcaatatcaccgaaacggtggaagagcattttggcaaaaccggcggggtggtgatcacctttctgtacttcttcgccatctgcccactgctgtggatttatggcgtcacgatcaccaatacctttatgactttctgggagaaccagctgcagatgccggctctcaaccgcggggtggtggcgctgctcctgctgctgctgatggcgtttgtcatctggtttggtaaagacctgatggtcaaggtgatgagctatctggtgtggccgtttatcgccagcctggtggtgatctccctgtccctgatcccctactggaatagcgcggtgattgaccaggtcaacctcagcgatatcgccttaaccggtcacgacggcattctggtgacggtatggctgggcatctccatcatggtgttctccttcaacttctcgccgatcgtctcctcgtttgtggtctccaaacgcgaagagtatgaagcgcagtttggccgcgagtataccgaacgcaaatgctcacagatcatctcccgggccagcatgctgatggtggcggtggtgatgttcttcgccttcagctgcctgtttaccctctcaccgcagaacatggcggacgccaaggcgcagaatatcccggtgctctcctatctggcgaaccactttgcctcgatgtcgggcaccaaatccacctttgccaccctgctggagtatggcgcgtcgatcatcgccctggtggccatcttcaaatcgtttttcggccactatctcggcacgctcgaagggctgaacggtctgatcctgcgctttggctataaaggggataaaacccgggtctccagcggcaagctcaataccctgagcatggtgttcatcatgggctcgacctgggtggtggcgtatgccaaccccaatatcctcgacctgattgaggccatgggcgcgccgattatcgcctcgctgctgtgcctgctgccgatgtacgccattcgtaaagcgccttcgctggccaaataccgtggccgtctcgacaacctctttgtgaccgctatcggtctgctgaccatcctcaacattgcttacaaactgttctaa

SEQ ID NO: 137188 - DNA, 1209 bp, Enterobacter cloacae
atgactgaatttccggtagtactggtgattaactgcggctcgtcgtcgatcaaattttccgtcctggacgccgcaagctgcgactgcctgctcaacggcgtggccgagggcatcaacgcggaacgggcgtctctctcgctcaacggcggcgagccggtggcgctggcgcagcgcggctacgaaggcgccctgcaggcgattgccggagcattagcccaacgcgacctcatcgacagcgtggccctgattggccaccgcgtcgcccacggcggcgacctgttcaccgagtcggtcattattagcgaggaggttatcaataacattcgccaggtatcgtccctggccccgctgcataactacgccagtctcagcggcatcgcctcggcgcagcggctgttcccggaggtgatgcaggtggcggtctttgataccagctttcaccagaccctggccccggaagcttttctctatggtctgccgtgggagtattaccagaatctcggggtacgccgctacggtttccacggcacctcgcaccgctatgtgtcccagcgcgccctggcgctgctcgggttgccggagcaggagagcggcctggtgatcgcccacctgggcaatggcgcctcgatctgcgcggtgcgtaacggccgcagcgtggacacctcgatggggatgacgccgctggaggggctgatgatgggcacccgcagcggtgatgtcgacttcggcgccatggcgtggattgccggggaaacccggcagaccctcagcgacctggagcgggtagccaacaccgcctccggcctgctggggatctccggtctttcctccgacctgcgggtgctggagcaggcgtggcatgagggccatgcacgcgcccgcctggcgattaaaacctttatccatcgtatcgcccgccatattgccggccacgccgcggcactgcagcgtctcgacggcattattttcaccggcgggattggcgagaactcggtgctgatccgtcgactggtgagcgagcggctggcggtctttggccttgcgatggacgccgcccgcaatcagcagcccaattcggccggcgagcgcctgatctccgccgacggcagccgggtgcgctgcgcggttattcctaccaatgaagagcgcatgattgccctcgatgcgatccgcttaggccggatccacaccgcggcggcgctggcctga

SEQ ID NO: 137189 - DNA, 2295 bp, Enterobacter cloacae
atgaaagtagatatcgatacccaggatgtacgatacgccgacgcctggctgggctttcgcggtacggcgtggcaaacgcagatcgacgttcgcgactttattcagcataactacaccccttacgagggcgatgagtcttttctcgccgacgcgacgccagcgaccaccgccctctgggagcaggtgatggccgggatccgcgtcgagaacgccacccatgcgccggtggatttcgacaccaatgtcgccacctccatcaccgcccacgcggcgggctatatcaaccagccgctggaaaagatcgtcggcctgcaaacggaccagccgctgaagcgcgccctgcatccttttggcggcatcaagatgatcaaaagcgccttcgaggcctatggtcgcgaaatggatcctgactttgagtatcagtttacggcgctgcgtaagacccacaatcagggcgtttttgatgtctattccccggatatgctgcgctgccgcaaatccggggtgctgaccgggctaccggacggctatggccgcggacggatcatcggcgattaccgccgcgtggcgctgtacggcattcgctacctggtccgcgaacgtgagctgcagtttgccgacctgcagccggcccttgagcgcggcgaggcgctggaggccaccctgcgcctgcgcgaggagctggccgaacagcggcgcgcgctgctgcagatgcaggagatggcggcccgctacggctgcgatatctctcacccggcgcgcactgcccgggaggcggtgcagtggctctacttcgcctacctggcggcggtgaagtcgcagaacggcggcgccatgtcgctggggcgcacggccaccttcctcgacatctatatcgaacgcgatctgcgcgccggtttattgaatgaggagcaggcccaggagctcattgatcacttcatcatgaagatccgcatggtgcgtttcctgcgcaccccggaatttgattcgctgttctccggggatcccatctgggcgacggaggtgctgggcggcatggggctggatggtcgcaccctggtcagcaaaaccaccttccgctatctgcatactctgcacaccatgggcccggcgccggagccgaacctgaccgtgctctggtcgcaagcgctgccggcggcgtttaaaaaatatgccgcccgggtctctatcgccacctcgtcgctgcagtatgagaacgacgatctgatgcgcagcgattttcacagcgacgactacgccatcgcctgctgcgtcagcccgatggtgatcggcaagcagatgcagttcttcggcgcccgcgccaatctcgccaaaacgctgctctacgcgattaacggcggggtggatgagaaactgaagattcaggtagggccgaaaaccacaccgttgcgcgatgaggtgctggactacgacaccgtgatggccagcctcgaccactttatggactggctggcggtgcagtacatcagcgcgctgaacatcatccattgcatgcatgataagtacagctacgaggcggcgctgatggccctgcacgaccgcgacgtctaccgcacgatggcctgcggcatcgccggcctgtcggtggcagcggattcgttgtcggcgataaagtacgcccgggtgaagccggtgcgcgatcaccacgggctggcggtggactttgtcattgaaggcgactatccgcagtacggcaacaacgacgatcgggttgatgccatcgcctgcgacctggtggagcgctttatgcgcaaaattcaggcgctccccacctggcgtcaggcggtgccgacccagtcgatcctgaccatcacctccaacgtggtatacggccagaaaaccggcaacaccccggacggacgtcgggcggggacgccgttcgctccgggggccaatccgatgcatggccgcgaccggaaaggggcggtggcgtcgctgacctcggtggcgaaactgccgtttacctacgccaaagatggcatctcgtataccttctccatcgtgccggcggcgctcggcaaagccccgtcagcgcaggaaaacaacctggtgggcctgctggacggctacttccaccacgaggagacggtggaggggggacagcatctcaacgtcaatgtgctgaaccgggaaaagctgctcgatgcgatagaacacccggagcagtatccgaatctgacgatccgcgtctccggctatgcggtccgctttaacgcgctgacccgcgaacagcagcaggatgtgatctcccgaacgttcaccagccaactctga

SEQ ID NO: 137190 - DNA, 1065 bp, Enterobacter cloacae
atgagcatggccttttacgcccaggcagacgtgaagatcggcgtcgccgggccctttaccggccccaacgccacctacggcgcccagtactggaagggggcctcgcaggcggtggccgatatcaatgccgccggcggcatcaaaggcgaaaagattgtgctggtgcagggggatgacgcgtgcgaaccgaagcaggcggtggcggtggccaaccggctggtggatgaagcgaaagtctccgccgtggtggggcacttttgctcttcctcaacgatgccggcctccgaggtatatgacgaagccgggatcctgaccattacccccggctcgaccaacccgcagatcaccgagcgcggcatgaaagatctcttccgcatgtgtggtcgtgacgatcagcagggggcgatcgccgccaactatatgctggacgtgctgaaggcgaagaaaatcgccgtgatccacgataaagacacctatggtcaggggctggccgatgccacccgcgcggcgctggcgaagcggggtaccaaagaagtgttgtacgaaggcctttcccgcggtgaaaaagactttaacgccctggtgaccaagatcggcgccctcaagccggacgtggtctactttggcggctgccatccggaagcgggcccgctggtgcgccagatgcgcgagcagggggtgcaggccaaattcttctccggcgactgtatcgtcaccgaagaactggtcacggccgccggcgggccgcagttcaccaacggcgtgctgatgacctttggtcaggatccgcgcaccctcccggacggcaaagcggtgatcgagaagttccgcgccagcggctttgagccggaaggttataccctctacgcctacgcctccattcaggctatcgccgcggcctggaacgccgtcggtaccgataacgccaaagccagcgactggctgaagagccacgacgtcgagacggtgatgggcaagaaagcctgggatggcaaaggcgacctcaaggtgtccgactacgtggtctatcagtgggacgacaagggcaaatatcaccagctctga

SEQ ID NO: 137191 - DNA, 915 bp, Enterobacter cloacae
atgacggcgttttttctgcaacaactgatcaatgggctgacgctgggcgcagtgtacggcttaatcgccatcggctacaccatggtgtatgggatcatcggcatgatcaacttcgcccacggcgaggtgtatatggtctccgcctacctgtgcgccatcggcctggcgctgctctctttcttcgggatccactcctttccgctgctgattttcgccaccctggtgttcaccatcgtggtcaccggcgtatacggctgggcgatcgagcgcatcgcctaccggccgctgcgcaactcgacgcggctggcaccgctgatctcggctatcgggatgtcgctgatcctgcagaactatgtccagctgagccaggggccgaaccagcaggggatcccgacgctgcttagcggcgcgttgcgcatgacggtgggcgatggggtggtgcagatcacctggaccaaggtgtttattctcgtcgcggcgctggtggggatgctgatcctgacctggattattcagtatacccggctggggcgcatctgccgcgccacccagcaggaccggcgcatggcggcgatccttggcatcaataccgaccgggtgatctccctggtgtttgtcatcggcgcggcgatggccggtctggccggtgtgctggtgaccatgaactacggcaccttcgacttctatatcggatttattatcggcatcaaagccttcaccgccgcggtgctgggcgggatcggctcgctgcctggcgcgatgctgggtggtctgctgcttggggtggccgaagcccagttcgccgggctggtgaattcggattacaaagatgtcttttcctttgcgctgctggtggcgatcctgatttttcgcccgcaggggctgctgggacgtccgctggtggccaaggtctaa

SEQ ID NO: 137192 - DNA, 1287 bp, Enterobacter cloacae
atgggtgaaattacgcgccagcctgcgcgggctatccaaaacgcgctgatcgacagcgtactggccggcctttgcgcgttaattgtctttggcccgatcgtcggcgtggtgctcaaagggtatggttttaccctcgcgcctgcgcgggtggcgattctggtggcggtggtgatggccggcaggctggcgctcagtctgctgctgcagagccacaggggaaaagcctttattgcccgctttgagggggcggatgacggggtgtacgtccggccgccgggctaccgctcgcggctgcgctggataataccgctgctggtggggctggccattgtctttccgtttctcgccacaaaatatctgctgaccgtggccattcttgggctgatctacgttctgcttggcctggggttgaatattgtggtgggcctcgcgggcctgctcgatctgggctatgtggcgttttacgccatcggcgcctacggcctggcgctgggctaccagtacctgggacttggcttctgggcgatgctgccgctgggggcggtgatggcggctctcgccggggcgttgctgggctttccggtgctgcgtatgcatggcgactatctggccatcgtcaccctcggctttggcgaaattatccgcctggtgctcaacaactgggtgagcttcaccgggggccctaacggcgtaccggtgccatcccccacgctgtttggcctcgagtttacccgccgggcgaaagatggcggcatccccatccatgagtttttccacgtcagctacaaccccaacctgaaattcatctttctctacgccgtgctgtgtctggtggtgatgctggtgctgctggtgaagcatcgcctgacgcggatgcccatcggccgcgcctgggaggcgctgcgcgaggatgagatcgcctgtcgggcgatggggctcaatcacgtgctggtgaagctctcggcgtttatgctcggcgcgtcgacagccggcatcgccggggtgttcttcgccagctatcaggggtttgttaacccgacgtcgttcaccttttttgagtcggcgctgatcctggcgattgtggtgctcgggggaatgggctccaccctgggagtggtactggcggcgtttgttctgacggtcaccccggagctgctgcgcggttttgacgaatatcgggtgctgctgttcggcgtgctgatggtgatgatgatgatctggcggccgcgcggcctggtgcgcaccagccgcagcggggttgcgttgcgaaaaggagtcgcgccatga

SEQ ID NO: 137193 - DNA, 876 bp, Enterobacter cloacae
atgaccgacagcatcttacgcgttgagcatctgatgatgcatttcggcggcatcaaagcgctgaatgatgtcaatctggaggtggagcgggggtcgatcaccgccctgatcggccccaacggcgcgggcaagaccacggtgtttaattgcctgaccggtttttatcgggcgacggggggcagtatcgtgctgcgggcgcgggaaaaggtcaccgatgttattcaggtgctggggcagaagcttcacccggacgattttctccacccggcgcagctggggaggcggatctattacaagatgttcggtggcacccatctggtgaaccgcgctggcctggcgcgcaccttccagaatatacgtttattccgcgagatgtcggtgatcgagaacctgctggtggcccagcatacccaggtcaaccgccatctgctggccgggatcctcaatacccgtgggtatcggcaggcggagaatcaggcgctggatcgcgctttttactggctggaggtggtggagatggtggactgcgccaaccgtctggcggggaccctctcctacggacagcagcggcggctggagatcgcccgcgccatgtgcacccgtccggagatgatctgtctggacgagccggccgccggcctcaacccggtggaaacccaggcgctgagccggattattcgctttctgcgccagcagcacggcatcacggtgctactgatcgagcatgatatggggatggtgatggagatttcggatcatatcatcgtcctcgatcacggggacgtcatcgcccgcggcgcgccgcaggcgatccaggccaacgccagcgtgattgccgcctatctaggcgctgaggaagaggagacgcgccgatga

SEQ ID NO: 137194 - DNA, 720 bp, Enterobacter cloacae
atgagccagcctttgcttgcctttaatgaggtggatgtcttctacgggccgatccaggccctgaagcaggtctccctcaccgtcaacgagggggagacggtggcgctgatcggcgccaacggcgccggtaaatcaacgctgctgatgtcggtcttcggccagccgcgcattgccggcggggagattttctatcgcggggaggcgatcagccggaaatcgacccactttatcgccagcaacggcatcgcccaggccccggaagggcggcgcatctttcccgatatgaccgtcgaggagaatctgctaatggggaccattgccattggcaaccgctatcaggccgaggacaaggcgcgaatgtaccagctgttcccccggctggaagagcggcggggacagcgggcgatgaccctctccggcggcgagcagcagatgctggccatcgcccgggcgctgatgagccgaccgcgcctgctgctgctggatgagccgagcctggggctggcgccgctggtggtgaagcagatttttcagatcctgcgcgagctgacggcccaggggatgacgctgtttctggtggagcagaatgcccgccatgccctcaacctgtcggaccgcgcctacgtgatggtgaacggccagatccgcctgagcggtagcggccagacgctgctcaacgacccggaggtgcgtaaggcatatctggggatcagcggctga

SEQ ID NO: 137195 - DNA, 894 bp, Enterobacter cloacae
gtgttggcaaatctggaagtaaaatggctgtatgatgtgattgcccttgaggagtcgcgcagctttaccctggcggccaaagcccgcaacatctctcagtcttcgttcagtcgacgcatccagtcgctggaggcttccctcggattcagcatcttcgatcgtagcgccaaccctctgcagctgaccaaccgcgggaaaatttttgtcggctatgcgcgaaatatgctcgatgacatggattttcagatcagccgtattaaaggcttaaataacactacccagaaaataagaatcgacgccgccccttcgctgtcggtgttattactgccggagatcatcgccggttacaccgaccgtaaaaataagacttttcatgttgaatcgattaacgtcaacgacgccgtatttaacctgaaagagggaaaaagcgattttatcctctccttctataatgaagaattaatgaactatccgtttattaatcataaaatttttgattcttacctgcacctggtctccccctgcgacgaacatggccgcccgctgtttcatttacatcgcggcgtgctgccgctgatgaaatacgccaacgacagctatatggggcgccaagtgaaccaggtgatcgaccgcacgccggagatcaccttctctctcacctttgtttcttccatgagcgagctgctcaagcgcatgatcctcaatggcgacggcgtgggctggctgccgcaatactctattcagcgcgagctggacgaaggccggctgacgatcctcgatgagagcttgtcgctgccgatcggcgcctggctctaccgctccggctcgcggcttaaccaggccgccgaacgtttctggcagcacattaaaacccgtaacgaaccgcgggaataa

SEQ ID NO: 137196 - DNA, 921 bp, Enterobacter cloacae
ttgaatatccacgccttctttcgcttccacggcctggtgcaggccatcggaccagcgacgtccctgcatggtacggccggtgtgttcatcgacgatgataacttcgccgtctttaacgatgtagtcaacgtcgcgggtgaacagggcgtgcgcgcgcagtgcagccgttacgtggtgcatcagcatgatgttgctcggggagtacagagactcgccctcttccataatgccttcagccaccagcagctcttcgattttcaccaggccgcgttcggtcaggttgacctgacgcgctttttcatccacggagaagtgaccttcaccctggaaggtatcggagtcttctttctcctgacgcagcaggtgaggaatgattttgtcgactttacggtacatctcggagctgtcttcagccgggccggagatgatcagcggggtacgcgcttcatcgatcagaatggagtcaacctcatccaccagcgcatagtgcagcttacgctggacacgctcttccgggctgaacgccatgttgtcacgcaggtagtcgaagccgtattcgttgttggtgccgtaggtgatatccgcgttatacgcttcacgcttggcaggtgccggcaggccggacatgttaatgcccacggtcatgccgaggaattcgaacagcggacggttgttttcggcgtcgcgctgcgccagatagtcgttgacggtaacaacgtgaacgcccttacccgtcagcgcattcaggtaagccggcagcgttgcagtcagggttttaccttcaccggtacgcatttccgcgatgcagcgctcgttgagcaccatcccgcccagcagctgcacgtcgaagtgacgcatgccgaacacgcgtttactggcctcacgtacaacggcgaaggcttccgggatcaggctctctaa

SEQ ID NO: 137197 - DNA, 921 bp, Enterobacter cloacae
atggctgataagattgctgtcctgtttggcggcacttccgccgaacgcgaagtttctctgaattcgggcgctgccgtgctggcgggcctgcgtgaaggcggcgtggacgcgcatccggttgatccgaaagaggtggacgtcacgcagctgaaagcgatgggcttcgataaagcctttatcgcgttgcacggtcgcggcggtgaagacggcacgttgcaggggctgctggagctgatcggcatgccgtacaccggcagcggcgtaatggcatccgccatctccatggataaactgcgcagcaaactgctgtggcagggggcgggactgcctgttgcgccatgggttgcactgacgcgtcgtgaatatgaattgggcctgtcggacagcgttaatacacgcattgcggcactgggcttaccggttattgttaagccgagccgtgaagggtcgagcgtgggaatgtccaaagtcgataaagctgtagatttagctgacgctttagcactggcatttcaacatgatgtagaagttctgattgaaaaatggcttagcgggccggaatttaccgtcgcgatgcttggcgaagaaattttaccgtcaattcgcatccaacccgccggagtcttctatgattatgaggcgaagtatctctctgatgagacgcaatatttctgcccagcgggtcttgaagcagagcgtgaagccgaattacagtctctggtgcttaaagcctggaatgttctgggatgtcgtggctggggacgcattgacgtgatgcttgacggtgacgggcaattttatctgctggaagcaaacacgtctccgggtatgaccagccatagccttgtgccgatggcggcgcgtcaggcgggaatgagcttctcgcagttagtcgtacgtattctggaccaggcgggctga

SEQ ID NO: 137198 - DNA, 1476 bp, Enterobacter cloacae
atgaatacacaacaactggcaaaactgcgttctatcgtgcccgagatgcgtcgcgtccggcacattcactttgtcggcatcggtggtgctggcatgggcggtattgccgaagtgttagctaacgaaggctatcagatcagcgggtctgacctggcgccaaaccctgttacgcagcagctggcgtcgctgggggcgactatctatttcaatcatcgcccggaaaacgtgagcgatgcgagcgtggttgtggtgtccagcgctatctccgcagataacccggaaatcgttgcggcgcatgaggcgcgcattccggtgatccgccgcgcggaaatgctggcggaactgatgcgtttccgtcacggcattgcggtggccggtacgcacggtaaaaccaccacaacagcgatggtctccagcatttatgcggaagcgggtctcgatccgacgttcgttaacggtggtctggtgaaagccgctggcgtgcatgcgcgtctgggccacagccgttatctgattgcggaagcagatgagagcgatgcgtcgttcctgcatctacagccgatggtggcgatcgtcaccaacatcgaagctgaccatatggacacttaccagggcgacttcgagaacttaaagcagacctttattaacttcctgcacaacctgccgttctatggccgtgcggtgatgtgcgtggacgatccggttattcgcgaacttctgccgcgcgtcgggcgtcaaattacgacctacggcttcagcgaagacgcggatgtacgcgtagaagattacaagcagattggtgcgcaggggcatttcaccctggcgcgtcaggataaggatctgctgcatgtcaccctgaacgcgccgggacgtcacaacgccctgaatgcggcggcggcggtggctgttgcgacagaagaaggcattgacgatgaagcgatcctgcgcgcactggagagcttccaggggacgggtcgtcgcttcgacttcctcggtgaattcccactggagccggtaaacggtaagccagggtcagcgatgctggtggacgactacggtcaccatccgacggaagtggacgcaaccattaaagcggcacgcgcgggttggccggaaaagaatctggtcatgattttccagccgcaccgttacacgcgtacccgcgatctgtatgacgattttgccaacgtcctttcgcaggtcgataccctgctgatgctggatgtgtatgctgcgggtgaaacgccgattccgggtgcggacagtcgttctttatgtcgtaccatccgtggacgcggtaaagtggatcctattctggttcccgacccggcgcaggtagctgagatgcttgccccggtcctgacgggtaacgatctgatcctgattcagggcgcgggaaatatcggcaaaatcgcccgtaccttagctgaaatcaaactgaagccgcaaactcaggaggacgagcgtcatggctga

SEQ ID NO: 137199 - DNA, 1065 bp, Enterobacter cloacae
atgaatcaaccgaagcggttaatggtgatggcaggcggtaccggcggacacgtgttcccgggactggcggttgcgcaccatttaatggaacagggctggcaggtacgctggctgggaaccgcagaccgcatggaagccgacctggtacctaaacacggtatcgagatcgactttattcgtatttctggccttcgtggcaaagggatcaaggcgctgctgctggcgccggtgcgcattttcaatgcctggcgtcaggcgcgcgccattatgaagcgttttaagcctgacgtcgttctgggcatgggcggttacgtttccggtccgggcggactggcggcgtggtcactgggcatccccgttgttctgcatgagcagaacggtattgccggcttgaccaacaaatggctggcaaaaatcgccaccaaagttatgcaggccttccccggggcattcccgaaagcggatgtcgtaggaaatccggtacgtgtggacgtgctggcgctgccgctgccagatacgcgtctggcgggtcgcgaagggccggtgcgcgtgctggtcgtcggcggttcccagggcgcacgtattttaaaccagacgatgccgcaggttgcggcaaaactgggtgatgcggtgaccatctggcaccagagcgggaagggcgctcagcagaccgttgagcaggcctacgcgcaggaaggtcagccgcagcataaagtgactgaatttattgatgatatggccgcagcctatgcctgggccgatgtcgtggtctgtcgctcgggcgcgctgacggtgagtgaaatcgccgccgccggtttgccggcgctgtttgtgccgttccagcacaaagaccgacagcagtactggaatgcgctgccgcttgagaaagcgagggccgcgaagatttttgagcagccacaatttaccgctgatgcggtcgccactaccctggcgggctggaaccgggatgtattactggagatggcgcaacgcgcacgcgcgaccgctatcccggatgcaacggaacgggtggcaaaagaagtgagcctagcagcccaggcataa

SEQ ID NO: 137200 - DNA, 1245 bp, Enterobacter cloacae
atgcgtttatctctccctcgcctgaaaatgccgcgcctgccaggatttggtatcctggtatggctgtttacggcgctgaaaggctgggtgatggcttcacgggataaagattccgacagcctgatcatgtacgaccgcacgctgttctggctcacgctggggctggcagcgatcggctttattatggtcacctcggcgtcaatgcctgtcggacagcgtctggcgaacgacccgttcctgtttgccaagcgtgacgggctgtacatcattctcgcgttctgcctggcgctgatcaccttacgcctgccgatgtcgttctggcagcggcacagtacggccatgctcatcgcctcaatcatcatgctgttgatcgtgctggttgtcgggagctccgttaacggggcatcacgctggattgcctttggcccactgcgtattcagcccgcggagttcaccaaactgtcgttgttctgctacctggctaactacctggtgcgtaaagttgacgaagttcgtaacaaccttcgtggcttcttaaaaccgatgggcgtgattctggtcctcgcgatcctgctgctggcgcagcccgacctcggtacggtagtcgtactgtttgtcactacgctggcgatgctgttcctggcgggcgcaaaactgtggcagttcattgccatcatcgggatggggatttcggcggtggtgctgctgatcctcgccgaaccctaccgtatccgccgtgtgacctcgttctggaacccatgggaagatccgttcggcagcggttaccagctgacgcagtcgctgatggcgtttggccgcggcgaagtctggggtcaaggcctgggcaactcggtgcaaaaactggagtatttaccggaggcgcacaccgacttcatcttctccattattggggaagaactgggttatatcggtgtggtattggcgctattaatggtattcttcgtcgctttccgcgccatgtcgattggccggaaagcgctggagatcgatcaccgcttctccggtttcctggcctgctcaattggtatctggtttagcttccaggcactggtaaacgttggggcggcagcgggtatgctgccgaccaaaggtctgacgttgccgttgatcagttatggtggttcgagtctgttgatcatgtcgacggccatcatgtttttgttacgcatagattatgaaacgcgtctggagaaagctcaggcgtttacacgaggttcacgatga

SEQ ID NO: 137201 - DNA, 1317 bp, Enterobacter cloacae
atggcagattaccagggcaaaaaagtcgttatcatcgggttgggcctcactggcctctcctgcgtggactttttccttgcgcgtggcgtgacgccgcgcgtgatggatacgcgcgtctctccgccgggtctggacaagctgccggagcaggttgaacgccacctgggtggtctgaatgatgagtggctgctggacgccgatctgattgttgccagccccggtatggcgctggcgcatccttccctgagcgccgccgcggatgcaggcgttgagattgtcggcgatatcgaactgttctgccgggaggcgcaggccccgatcgtcgccattaccggttcaaacggtaaaagcaccgtcaccacgctggtgggggaaatggcgaaggcggcgggcaaaaatgtcggcgtgggcggtaacattggtctgcccgctttgatgctgcttgataaagggtgtgagctattcgtccttgagctttccagcttccagctggaaaccacttcaagcctgcatgcggcggcggcgacgatcctaaacgtcaccgaagatcatatggacagatacccgttcggcttgcagcagtaccgtgcggccaaactgcgcgtttatgaaaatgccaaagtttgcgtggtgaatgccgatgatgcactcaccatgccggtgcgcggcgcagacgatcgctgcattagcttcggtattaatatgggtgactatcacctcaaccgtcagcagggcgaaacctggctgcgggtgaaaggtgagaaggtgctgaacgtgaaagagatgatgctctccggccagcataactacaccaatgccctggcggcgctggcgctggcggatgctgttggcctgccgcgatcttcaagcctgaaggcgctgactacctttaccggcctggcgcaccgcttccagctggcgctggagcacaacggcgtacgctggattaacgattccaaagcgaccaacgtgggtagcaccgaggcggcactgaacggtctgcacgttgatggcacgctgcacctgctactgggcggcgacggtaaatcggctgacttctcctcgctgaagcagtacctcaacggtgataacgtgcgcctgtattgctttggccgcgatggtagcgagctggtggcgttgcgccctgaggtcgccgaacaaaccgagaccatggagcaggcgatgcgcctcatcgccccacgcgtgaagcccggcgatatggtactgctctcgccagcctgtgccagcctcgatcaattcaagaatttcgaacagcggggtgatgtctttacccgcctggcgaaggagttaggctga

SEQ ID NO: 137202 - DNA, 1083 bp, Enterobacter cloacae
atgttagtatggctggccgaacacttggtcaaatattattccggctttaacgtcttttcatatctgacgtttcgcgccatcgtcagcctgctgaccgcgctgttcatctcgttgtggatgggcccgcgcatgatcgcccgtctgcaaaaactcgcctttggccaggtcgtacgtaacgacggcccggagtctcatttcagtaaacgcggtactccgaccatgggcgggatcatgatccttaccgcgatcaccgtttccgttctgctgtgggcctatccatctaacccgtacgtctggtgcgtactgacggtattaatcggctacggcatcatcggtttcgttgatgattaccgtaaagtcgtgcgcaaagataccaaaggcctgatcgcccgctggaagtatttctggatgtcggtgatcgccctgggcgtggccttcgcgctgtatctggcggggaaagatactccggcaaccgagctggtggtgccgttctttaaagacgtaatgccgcagctggggctgttctatatcttgctggcctacttcgttatcgtcggtaccggcaacgccgtcaacctgaccgacggcctcgacggcctggcgattatgccgaccgttttcgtcgcggcaggctttgcgctggtggcatgggccaccggcaacatgaatttcgccaactacctgcatatcccgtatctgcgccacgccggcgagctggtgatcgtctgtacggcgattgtcggggcggggctgggcttcctgtggttcaacacctacccggcgcaagtctttatgggcgacgtcggttcactggcgctcggcggcgcgttgggcattatcgccgtgctgctgcgtcaggagttcctgctggtgatcatgggcggggttttcgtggtggaaacgctgtcggttattctgcaggtcggctcctttaagctgcgcggtcagcgcatcttccgcatggcgccgatccaccaccactatgaactgaaaggctggccggagccgcgcgtcattgtgcgcttctggattatttcgctgatgctggtgctgattggcctggcaacgctgaaggtacgttaa

SEQ ID NO: 137203 - DNA, 1128 bp, Enterobacter cloacae
gtgattgtgaacgatacccggcaggctttcggtgagttagccgcctgggtgcgtcagcaggtgccgactcgcgtcgtcgccttgaccggctcgtccggtaaaacctcggttaaagagatgaccgcggcgatcctcagccagtgcggcaacacgctgtataccgccggcaacctgaacaacgatatcggcgtcccgatgacgctgctgcggctgaccaaagagcatcagtacgcggtgatcgaactcggcgccaaccaccagggcgaaatcgcctggaccgtcagcctgacgcgtccggaagcggcgctggtcaacaaccttgctgcggcgcacctggaaggtttcggttcgctggcgggcgtggcgaaggcgaagggcgaaatctataccggtctgccggaaaatggcatcgccatcctcaatgccgacaataacgactggctgaactggcaggcggtgattggcgatcgcaaagtgtggcgcttctcgccgaacgcggcgaacagcgatttcacggcgaccaacgtgcagatcaccagccacggcaccgaatttacactgcagaccccaaccggcaacgttgacgtactgctgccgctgccgggacgccacaacatcgctaatgcgctggccgccacttcgctggcgatggcggtaggcgccgatttggcggcggtgaaagccggactggcgcagctgcaggccgttccgggacgtctgttcccgatccggctgaccgagagccagctgctgctggatgattcctataacgctaacgttggttcgatgaccgcggcggtgcaggtgctgtcagagatgcccggctttcgcacgatggtggtcggcgatatggcagagcttggcgcggagagcgcggcctgccatcgcgaagtcggcgaagcggcgaaagcggcggggctggattgcgtcctcagcgtcggcgccttgagcgcggatatcagccgcgccagcggcgtgggcgaacattttaacgataaagccgccgtggtggctcgcctgcgcgagctgctggcggagcacaaaataatgaccattttagtgaagggttcacgtagtgccgccatggaagaggtagtacgcgcattacaggagactgggacatgttag

SEQ ID NO: 137204 - DNA, 285 bp, Enterobacter cloacae
  misc_feature (240)..(249): n is a, c, g, or t
atgattcgctttacgttaagtcaacttgccgcgatcgcccatggcgaacggcagggtagcgatgtcgctatcgacgaggtgaccaccgatacccgtaaagtgacggcgggctgcctgtttgtggcgctgaaaggggagcgtttcgacgcccatgattttgccgaacaggcgaaagcggcgggcgccggcgcgctgctggtgagtcgtccgctggcctgcgatctcccgcaggtgattgtnnnnnnnnnnggtgattgtgaacgatacccggcaggctttcggtga

SEQ ID NO: 137205 - DNA, 1488 bp, Enterobacter cloacae
gtggcagatcgtaatttgcgcgacctactcgctccatgggtgccaaacgcaccggagcgcattctgcgagagatgacgctggacagccgggtggctgcttccggcgatctctttatcgcggtacagggtcatcaggcggacgggcgtcgttatatcccgcaggcgatagcgcaaggtgtggctgccattattgctgaagcgcagggcgaagctaaagacggtgagatccgtgaaatgcacggcgtgccggttatctacctgagccagcttaacgaacgcttatcggcgctggccgggcgtttttatcatcagccgtcgcagcatctgcgtctggtgggcgtcaccggcaccaacgggaaaaccaccaccactcagctgctggcgcagtgggcaaagctgctcggcgaaaccagcgcggtgatggggaccgtcggtaacggtctgctggataaagtcgttccaactgaaaacaccaccggttccgcggtggacgttcaacatgtgctctccagtctggtcgggcagggggctaccttcggcgcgatggaagtctcctcccatggtctggtacagcaccgcgtagcggccctgcagtttgccgcctcggtgtttaccaatctcagccgcgatcatctcgactaccatggcgacatggagcactacgaagcggcgaaatggctgctgtactccacccatcattgcggtcaggccatcgtcaatgctgacgatgaagtcggtcgtcgctggctggcaaaactgccggacgcggtggcggtatcgatggaagatcatatcaacccgaattgccacggccgctggctaaaggccaccgcggtgaactatcacgacagcggggcgaccatccagtttgactccagctggggcaagggcgaaatcgaaagccgcctgatgggcgcctttaacgtcagcaatctgctgctggcgctggccacgctgctggcgctgggctatccgctggccgatctgctgaagaccgcagcgcgtttacagccggtgtgcggccgtatggaagtgttcagcgcgccgggtaaacctgccgtggtggtagattatgcccatacgcctgacgcgctggaaaaagcgctgcaggcggcacgcctgcactgcagcggcaagctgtggtgcgtcttcggctgcggcggcgaccgcgacaaaggtaaacgtccgttgatgggcgctatcgcggaagaatttgccgacatcgtggtcgttactgacgataacccgcgcaccgaagagccgcgggcgattatcaacgatattctggccggcatgctcgatgcaggtcaggcgaaggtgatggaaggccgcgcggaagcggtgaccaacgccgtgatgcaggcgaaagagaacgacgtggtgctggtggcgggtaaaggccatgaagattaccagatcgtcggcaaccgccgtctggattattccgaccgcgtgaccgtcgcgcgtctgctgggagcggtagcatga

SEQ ID NO: 137206 - DNA, 471 bp, Enterobacter cloacae
gtgccgggcatctacgcggtgggcgataataccggcgccgttgagctgacgccggtcgccgtggccgcaggccgtcgtctctccgaacgcctgtttaacaacaaaccggaagagcatctggactacagcaacatcccgaccgtggtcttcagccatccgccaatcggcaccgtcggcttgaccgagccgcaggcgcgcgagcagtacggcgtcgacgccgtgaaggtctacaaatcttccttcaccgcgatgtataccgccgtgacctctcaccgtcagccgtgccgcatgaagctggtgtgcgtcggcccggaagagaagattgtcggcatccacggcatcggcttcgggatggatgagatgctgcagggctttgcggtggccctgaagatgggcgccaccaaaaaagacttcgacaacaccgtcgccattcacccgacggcggcagaagagttcgtcaccatgcgctaa

SEQ ID NO: 137207 - DNA, 624 bp, Enterobacter cloacae
atgctaacaattctgggtaaacgctcttcaattaatgtacggaaagtgctgtggacctgcgaggaagccgggctggcgtaccagcaggaagattacggcagcggatttaagcccctggatacgcctgagtttcagcgtctgaatcctaacagcctggtgccggtgttactggacgatgacttcgtgctctgggagtcgaacagtatctgccgctatctggcgcgcaaagcggagcgctgggatctgctgcccgccgagccgcagcccgccgccgaggtggagcactggatggactggcaggcgaccgagttcaatactgcctggcgccatgcttttatggggctggtgcgtaaagatccgcgctttcaggatccggtggcgattaaagagagtattgccgcctggacccactgcgtgcgcattgttgaagcgcagctgcagcgtaccggggcgtggatagccggcgagcgcttcaccctggccgatatcgtgctggggctgtcggtgcatcgctggaaaatgacccctttcgcccatccggagatgccagccgtggagcgctggtatatggcgctcaatcagcgcccggcgtttatgcgccatggcaataacggcgtggcctga

SEQ ID NO: 137208 - DNA, 1194 bp, Enterobacter cloacae
atgtgtatagttgattccagcctgtttgccgaaaaggaacccgacatgttgatcccttttaccgttttgatgcctgcaaatattcgttttggccgtggtcaggccgagagcgccgccccctggctggcgcaacagggcggcccaatcctgctggtgcatggcgccagcccgcagcgggcggcgtttctccgccagcagctggaggcgctgcagcttgcggtcacgacgctggcgataagtcgcgaaccctggcttagcgatatcgagcagggcgtccagctggcgcgcgagaaagggatcagagcggtggtcagcctcggcggcggcgcggtgattgacgccggtaaggcgattgcggcgctggtccccgccgccggcccggtgatcgactatctggaggtggtgggaacgggccgtcagctggaagccagtcccctgccgttcgtggcgatccccaccaccgctggcacgggcgcggaggtcaccaaaaatgcggtgatcaacgttccggaacagcagcggaaagtgagcctgcgcgacgaccgaatgctgcctgacctggcgattgtcgacccggcgctaaccgacaacgcgccgcggagcatcaccctgagctccggcctcgacgccctgacccaggtgatcgagccctggctctgcagccgggccactcccttcaccgatgctctctgccagcaggcgatcccgcggggaattcgcgcgctaaaaatcctgatggaacaagagtgtccggccagccgcgacgagatgacctgggtcagcctgtgcggcggactggcgctggcgaacgccgggctgggggtgatccacggcctcgccggcccgctgggcggcctgagccgcgcctcgcacggcgccctatgcggcagtttgttgccgtttggcctggcgctcaatgagtcgcagatcaacgaccctggcctgcgccagcgcgttaacgatgtccgccgctggctggccgacgggctggacgtccctgtggatcgggtctgggacagtctgcgggaatggagccatcgcgctggccttggcaccctgcgcgacctcggcgtagcgcgcgatgcgctggaaccggcggcgctggccgccagcacctcctcatcgatgaaggccaacccggtcagcctgagcggcgaacagctgctggagatgctggaggcggcgtgggagtga

SEQ ID NO: 137209 - DNA, 1653 bp, Enterobacter cloacae
atgttcagccagaaattacgccacgttgaagacgacgagttaaggatcgacatcgatccctgctacgaagccgatccgtacgaattaaagctggatgagatgatagacgctgaaccggagcctgaggtgatcgaggggcttccggcgtccgatgccctcacaccggcggatcgctatcttgagctgtttaccaacgtgcagaaatcacgcattttcgcggacagcaaaaccttccccgactgcgcgccaaaacacgatccgctggacatcctgcggaactaccgcaaggtcaaacgccagcccgacttcgatctgcggcagttcgttgaggacaacttctggctgccggagagccagagcgacatctatatctccgaccccagcctgaccctgaaagaacacatcgacaagctgtggccggtgctgacccgcgagcctcaggatcatatcccgtggtcatcgctactggcgctgccgcaggcctacatcgtgcccggcggtcgctttagcgaaacctattactgggactcttatttcaccatgctggggctggcggagagcggccgggaagatttgctgaaatgcatggccgataactttgcctggctgattgaaacctacggccacattccgaacggcaaccgcacctactacctcagccgctcgcagccgccggtgttcgccctgatggttgaactctttgaagaggatggcgtgcgcggcgcgaagcgctatctggaccatctgaagatggagcacgccttctggatggacggcgccgagtcgttgatcccgcaccaggcgtatcgccacgtggtgcgtatgccggatggctccctgctcaatcgctactgggacgaccgtgacacgccgcgggatgagtcgtggcgcgaagacgtggagaccgcccgacactccgggcggcccgccaatgaagtataccgcgacctgcgggcgggcgccgcgtccggctgggactactccagccgctggctgcgggatatcacgcggctggccagcatccgcacgacgcagtttatccccatcgacctgaacgccttcctgttcaagctggagacgaccattgccaacctctccggcctgaagggcgatcgcgagacggagacggccttccgccagaaggcccaggatcggcgggcggcggtcaaccgctatctgtgggatgatgagaacggctgtttccgcgattatgactggcgccgtgaacagctggcgctgttttccgcagccagtatcgtcaccctttacgtcggcctggcgacccacgaacaggcagaacgccttgccgatgcggtgcgggcccgcctgctcacccccggggggatcatggccaccgaatacgaaagcggtgagcagtgggataaacccaacggctgggcgccgctgcagtggatggcgatccagggatttaaacgttacggccaggatccgctgggagatgagattgcctggagctggctgcagacggtcaaccacttttacaagcagcatcacaagctgattgaaaaataccatattgccaccggcgtcccccatgagggcggcggcggggagtatcccctgcaggatggctttggctggaccaacggcgtggtgcgccgactgattggcctgtacggtgagccaacctag

SEQ ID NO: 137210 - DNA, 534 bp, Enterobacter cloacae
atgcctgaacttctgacgccgcgcctgcgctgctcaccgctgcagctggacgactggtcgttttttctttccctgcagcaggatccgcaggtcatgctctacgtcgccgatccccgaccgcaggcggccatccgcgaggcgttcgattcgcggctgccgccgtggacgcccggggatgaacactggctgtgcctggtggtgcgcgacaggctgacccataccccgctcggcctgaccggctaccagcatcatcagcgcgacattgccgaggttggctttctcttcgccccggcggcgcagggtcggggctacggctacgaatcgctgcgcgcgctgtgcgactacgcctttaccaccggcggcgtccgccgcctgaccgccagcgtcaccgccggcaacgaggcgtctaagcggttactgctcaaagccggcttccggctggagggagagctgcgggaaaactactggctcaacggacgctggcacaacgactggctgttcggtcggctgcgtggggagggcgatgcgccgtag

SEQ ID NO: 137211 - DNA, 759 bp, Enterobacter cloacae
atgacacaacgtatcgctttagtgaccggcggcagccgcggtctgggtaaaaacgccgcgttgaagctggcggcaaagggaaccgatattcttttgacctatcacagcaaccgccaggcggccctcgacgtggtggcggaaatagagcaaaaaggggtcaaagcggcagcattagcgctgaacgtcggcgattccacaacatttgacgcattcgccagcgaggtggcgcaggtgctggcgcagaagtggggacgcacaacctttgattatttactgaacaatgccgggatcggactcaacgcgcccttcgccgagaccagcgaagcgcagtttgacgagctgatgaatatccagttcaaagggccgtttttcctgacccagcgtctgctgcctctcctgcaggatggggggcgtatcctcaatgtctccagcggcctggcgcgctttgccctgccgggctatgcggcctacgccgcgatgaagggggcgatggaggttctgacccgctatcaggcgaaagagctgggcggacgggggatatcggtgaacatcatcgcgccgggggccattgagaccgactttggcggcggggaggtgcgcgataacgccgaggtgaatcggcatatcgccgcccagactgcgctggggcgcgttgggctgccggatgatatcggcgacgccatcgccgccctgctcagcgatgagctggcgtggatgaacgcgcagcgtgtggaagtctcgggcgggatgttcctctga

SEQ ID NO: 137212 - DNA, 900 bp, Enterobacter cloacae
atggataaaattcatgcaatgcagttattcattcgcgtagcggatctggagagcttctcccgcgccgccgagaccctggcgctacctaagggtagcgtctcgcgacagattcaggccctggaaagccatcttggcgtgcggctcctgcaccgcaccacccgccgggtccagctcacccaggatgggatggtctactacgagcgggcgaaagatctgctgagcaacctcgacgaactggacggcatgttccagcacgatccggcgagcatcagcggccggctgcgggtggatatgccggtcggttttgctaaaaaaatggtgatcccgcatctgccgacttttttacagcagtatccgggcatcgaactggagctgagcagcagcgatcggctggtggacgtgatccgcgaggggtttgactgcgtggtgcgcgtcggcgcgctcaaagactcagggctgattgcccggccgctgggcaagctgacgcaaattaactgcgccagcccggactatctggcgcgttttggctatccgcaatccctagaggatctggcggatcatgccctgatccactacgccagcaccctcggggtccgtccccccggctttgaggtaatgatcgacggcgcggtgcgctgggtaaaaaccggcggcatattgacggtcaacagtacggaaacctatcaggcagcctgtatcgccgggctggggattattcaggtgccacgcaccggcgtgcgcgaggcgttacgcgccggcgacctgattgagatcctgccccagtaccgcgccgagccgctgccggtctcgctgatctacccgcaccggcgcaatctctcccgccgggtaaatctgtttatggagtggctgggcggactgatgaaagcgtatgtcgattga

SEQ ID NO: 137213 - DNA, 1323 bp, Enterobacter cloacae
atgcaagccacagccaccactctcgaaaacacgcaggaaaccgccccggtcaactcacgcaacaaggttgttgtcgcctcgctcattggcaccgccattgagtttttcgacttctacatctatgccaccgccgcggtcatcgtcttcccgcatatctttttcccgcagggcgatgccgctgcggccaccctgcagtcgctggccaccttcgccatcgccttcgtcgcccggccgatcggctccgcgctgtttggccacttcggtgatcgcgtcggccggaaggtcaccctcgtggcctcgctgttaaccatggggatctccaccgtggtgatcggcctgctgcccggctatgaaagcattggcattgtcgcgccgatgctgctggcgctggcgcgtttcggtcagggccttggcctcggcggggaatggggcggcgcagcgctgctggctacggaaaacgccccggcgcgcaagcgcgccctgtacggctccttcccacagctgggcgcgccgatcggcttcttcttcgccaacggcaccttcctgctgctctcctggctgctgaccgaccagcagtttatggagtggggctggcgcgtgccgtttatcttctccgcggtgctggtgatcatcggtctgtatgttcgcgtctcgctgcatgagaccccggtcttcgccaaagtagcggcggcgaaaaaacaggtcaaaatcccgctgggtaccctgttgaccaaacacgtccgggtgacggtgctgggcaccttcatcatgctggccacctataccctgttctacatcatgaccgtctactcgatgacctttagcaccggcgcggcgccgaatggcctgggtctgccgcgtaacgaagtgctgtggatgctgatgatggcggtgattggctttggcgtaatggtgcctgtcgccggcctgctggcggacgcctttggtcgtcgcaagagcatgattatcatcaccacgatgattattttgttcgccctgttcgcctttaaaccgctgctgggctccggcaatccgctgctggtcttcgccttcctgctgctgggcttaagcctgatgggactgacctttggcccgatgggcgcgctgctcccggagctgttcccgacggaagtgcgctacaccggcgcgtcgttctcctataacgtgtcgtcgatcctcggcgcttcggtcgcgccgtacattgccgcctggctgcagggtaactacggtctcgcggcggtcggcacctatctggcggcgatggcggcgctgacgctgatcgccctgctgctgacccacgagacccgccaccagtcgttgtga

SEQ ID NO: 137214 - DNA, 867 bp, Enterobacter cloacae
gtgctgccggcggaccgctttgaaactgacaagtggcaggtgatggatgccgatgtgcgctttaagggccggagaattgagcacggcggcaccctgccgatcagcgatctgtcgacccatgtgattctggaggatggtggcctgcgcctgcagccggtgcgctttggcctggccaacgggtcgattgccggcagcgtacacctgcagggcgataaaaagccgctgcagggtgaggccaatctgcaggcgcgacgcctgaagctgaaggcgctgatgccaaacgtcgagatgatgcagaaaaccctcggcgagatgaatggcgacgtccagctgcgcggcagcggcaactcggtggcggccctgctcggcaacagcaacggtaacctgaagctgctgatgaacgacggactgatcagtcgcaacctgatggaaatcctcggtcttaacgtcggtaactacctgatcggccagatttttggcgatgaggaggttcgggtgaactgcgccgcggccaatatcgacgtaaccaacggcgtcgcccggccgcagatttttgccttcgatacagaaaacgcgctgatcaatgtgaccgggaccgccagcttcgcctccgagcagctggacctgaccatcgatccggaaagcaaaggctttcgggtgatcaccctgcgttccccgctgtatgtccggggcacctttaaatcgccgcaggcgggggtgaaggccgggccgctgattgtccgcggcgcggtagcggcggcgctggcaaccctggtgacgccggccgccgcgctgctggcgctgatctccccggcggagggcgatagcaaccagtgtcggaccattttgtcgcagatgaaaaagtag

SEQ ID NO: 137215 - DNA, 1161 bp, Enterobacter cloacae
  misc_feature (1143)..(1152): n is a, c, g, or t
atgagcagaacccgtaaaacgttggttatcatcacaggaacgatactattgctgatcgttcttttctttatcgtgctggccacctttgactggaaccggctgaagccgacgatcaatcagaaagtgtccgccgaacttaaccgcccgttcgccatccgcggcgatctcggcgtggtctgggaacggcagccggacgagcgcggctggcgcagctggatcccgtggccccacgtacacgcggaggatatcgtgctgggcaacccgccggccattccccaggtgaccatgatccatctgccgcgggtggaggcgacccttgccccgctggcgctgctgagcaaaacggtgtacctgccgtggatcaagctggagcagcccgacgtacggttgatccgcctggcggaagacaacaataactggacctttcagctggcgggcgataagcgtacttcgggcgacagcgcgccctccagctggtcctttcgcctcgataatattctctttgatcgcgggactatcgccattgacgacaagatcacccgcagcgatatcaccatcctcgtcgatcccctcggcaaaccgctgccgttcagcgaagtgaccggcacaaaggatcgccatagcgcggcgaaaccaggcgactatgtctttggtctgtcgctgaagggccgctacaagggccagccggtcaccggcaacgggaaaatcggcggcatgctggccctgcgcagcgcaagcgcccccttcccattgcagggcgacttccactccggtaacacccgggtagcgttcagcggcacggtcagcgacccgctcaacgtcggcggcattgacctgcggctaaaattcgccggcgactcgctgcgcgatctctacgacctgaccggcgtgctgctgccggagacgccgtcattctccaccgacggccgcctgcgcgccgactttacgcaaaaaaaccgcatgcgctttaactatcagaattttaacggccgaatcggcgatagcgacattcatggctccctgacctacaccaccggcaagccgcggccgaaactcagcggcgatatggagtcgaagcagctgcgtctggcggacctcgggccattaatcggcgttgattccggcaaaggaacgaagaaaagnnnnnnnnnnggcgggtga

SEQ ID NO: 137216 - DNA, 930 bp, Enterobacter cloacae
atgtctaaaaaaattgccgttattggcgaatgcatgattgagctgtcagagaaaaacggggccgttaaccgcggctttggcggcgataccttaaacacctcggtctatatcgcgcggcagacggatgccagcgcattgagcgtccactacgtcaccgccctgggaaccgatgcgttcagccagcagatgctcgacagctggcaacaggaaaacgtcaacaccgatcttatccagcggatggccgaccgcctgccggggctgtattacattgaaaccgatgataccggcgagcgtaccttctactactggcgcaacgaggcggcggcaaagttctggctggagagcgatcgcgcggcggcgatttgcgaagagctggccactttcgactatctctatctgagcggcatcagtctagccattctcagcccggccagccgcgacaagctgttcacgctgctgcgtgagtgccgcgccaacggcggcaaggtgatcttcgacaacaactatcgtccgcgcctgtgggccagccaggcggaaacgcagcaggtctatcaggagatgctcgcctgcaccgatatcgcgtttctgaccctcgatgatgaagacgcgctgtggggagaaaaaccggttgctgaggtgatagcccgcacccacgccgccggcgtggaagaggtggtggtgaagcgcggcgcggatgcctgcctggtctcggttagcgggcaaccgctgcgggaagtgccggccgtcaggctggccaaagagaaggtggtggataccaccgccgccggagactccttcagcgccggctacctggccgttcgcctgaccggcggcgatgccgaatccgccgccagacgcggacacctgaccgccagcacggtgatccagtatcgcggggcgatcatcccgcgggaagcgatgccgcagtaa

SEQ ID NO: 137217 - DNA, 1503 bp, Enterobacter cloacae
  misc_feature (1090)..(1099): n is a, c, g, or t
atgcagggcacaacaattaaactcttaacgggcggtttgctgatggtagcggcggccggttatgtgcaggcagaagcgctccagcctgatccggcctggcaacaagggaccttagcgaatggtttgtcgtggcaggtattggccacgccgcaacgtcccagcgaccgtatcgaagtccgtttgtccgtcaatattggctctctgagcgaaagcactcagcagagcggtttcagccgctttattccccgcctggcgttgacgcaaagcggcagcctgccgacgatgcaggcgcgctctttatggcagcagagtattgacccgaagcgtcctctgccgccggccatcgtctcctacgattacacgatgtttaatctcagcctgcccaataaccgcaacgatctgttgaaagaggcgctgagctggctggcggacgccagcggtaaactggccattacgcctgaatcgatcaatcatgcgctgcagggcagcgacatggtggcgacctggccactggataccaaagagggttggtggcgctatcgcctgaaagggtccaccatgctgggccatgaccccgccgcgccgctgaagcagccgatcgatgtggcgcagctgaaagacttttatcaaaaatggtacacccccgacgccatgacgctgatcgtggtggggaatgtcgacagccgcagcgttgccgagcaaatcaataagacctttggcgatctgaagggcaagcgggaaacccccgcagcggtgccgaccttatcgccgctgcctaccgtgccggtcagcatcatgaccaacgcggtgcgtcaggacaaactgtccatcatgtgggatgcgccatggcagccgatccgcgactccgcggcgctgcagcgctactggcgtgacgatctcgcccgtgaagcgctgttctggcacgtgcagcagagcctgagcaaaaataacgtgaaggatattggccttggctttgactgccgggtgctatatcagcgcgcgcagtgcgccatcaacatcgattcaccgggcgagcgcctgaacaacaacctgagcgtggtttcgcgcgagctggcgaaagtgcgggacnnnnnnnnnnctcaggaggagtttgacgcgcttatcgctcagaaaagcctcgagctgcagaagctgtttgccacctatgcgcgcactgacaccgacattctgatgagccagcgcatgcgctccctgcagaatcaggtggtggacatcgcgccggagcagtaccagaagctgcgtcaggagttcctcaactccctgacggtggacatgctgaaccagtatctgcgccagcagctctcgcaggacatggcgctggtgctgcaacagccgaagggcgaaccggaatacaatatgaaggaactgcaggccacctgggaaaaactgatggcgccgaatccggcggccacggcggctagcggcagcgccgatacggttgacgcccacagcgaggccagcgatatcccgccggggcagtaa

SEQ ID NO: 137218 - DNA, 1287 bp, Enterobacter cloacae
atgaaaacctctatctttaaaagcctctatgtccaggttctgacggccatagcgatcggtattctgctgggccatttttacccggaactgggcgcgcaaatgaaaccctttggcgacgccttcgttaagctgattaaaatggtgattgctccggttatcttctgtaccgtcgtgacggggatcgccgggatggaaagcatgaaagccgttggccgtaccggggcggtggcgttgctctatttcgaagttgtcagcaccatcgcgctgattatcggtctgattatcgtcaacgtggtgcagccgggcgccgggatgaacgtcgacccgtcgacgctcgatgcgaaagcggtggcggtgtacgctgagcaggctaaagatcaaggggtagtggcctttttactggatgtgatcccgggcagcgtcattggcgccttcgccagcggcaacattctgcaggttctgctgttcgccgtcctgtttggttttgccctgcaccgtctgggcagcaagggccagctgattttcaacgtcattgaaagcttctcccaggttatcttcggcatcatcaatatgatcatgcgcctggcgccgatcggcgccttcggagccatggcctttaccatcggtaaatatggcgtcggcaccctggtgcagctggggcagctgattatctgcttctatatcacttgtatcctgttcgtggtggtggtgctggggagcatcgcccgggccaccggcttcagcatcttcaaatttatccgctatatccgggaagagctgctgattgtgctggggacctcctcatcagaatcggcgctgccgagaatgctcgacaagatggagaagctgggctgccgtaaatcggtggtgggcctggtgatcccgaccggctattcgttcaacctcgatggcacctctatctatctgacgatggccgcagtctttatcgcccaggcgaccaacagccatatggatattttccatcagatcaccctgctggtggtgctgctgctctcctcgaaaggggcggcaggggtgaccggcagcggcttcatcgtgctggcggcgaccatctcggccgtcggtcatttaccggtggctggcctggcgctgatcctcggtatcgaccgctttatgtccgaagcccgcgcgctgactaacctggtgggtaacggcgttgccacggtggtggtggcgaaatgggtgaaagaactggatgccaaacagatggatgacgttctgaataaccgtgttccggcgaacaaaacgcacgaattatcctcttaa

SEQ ID NO: 137219 - DNA, 987 bp, Enterobacter cloacae
gtgctcactattattaatgagcgtttaccgctgcatgggctgcagctgcggccctacgccagcgtcgggatcgccatgttccacgccgggctcagcgccgagcagttttaccggcgcgcggtgtcggccgctgtcaccgcacgacgtaaaggcaaaaaccagatcgagttcttcgatcccgagcagatggaaaaggctcagcgccgcctgatggaagagcacgacattatgaccgcgctcgataaccagcagttcgcgatctggctgcagccgcaggtggcctgcgccagcggcgagatctgcggcgccgaggtactgctgcgccagcggcaggcggatggcagctggtcgctaccgccgtcgctgattgagcgcattgagtcctgcgggctgattatcccggtcggctactgggtgatggaagaggcctgccgccagctggcggcctggcaaagccaggggattatgctgccgctgtcggtcaatgtttccctgctccagctgctggaacacgaccgcggcgaggagatgctaaagctgatcgcccgctaccgcatcgccccgggcaccctcatcctcgaggtgacggagagctgccggatggacgatccgcaggatgtgatggcgcggttgcgaccgctgcgcgaggccggggtacagattgcgctggatgattttggcatgggttatgccgggttgcaccagctgcagcagatgaaagctctgccggtggatattctgaaaatcgataaagtattcatcgatatgctgccggaggatgtcagcatggtgccggcgatgatccagctcgcgcgcggcctgtcgctgcgtatcgtggcggaaggggtggagaacgacgcccagcgccgctggttgcaagccgccggcgtcgaggtgctccagggccatctgttcggttgcgctttgccgcaggaggcattcagcgcgcgctatctctccccggttcgggaggatgaaaatttgtaa

SEQ ID NO: 137220 - DNA, 318 bp, Enterobacter cloacae
atggccgctgatgtcccagccctccgcgcgacgggtcgccacggtgtccggcaggccgccccgcgccggggagcccagctccggctcgacgcgcaggctgttgatgaggccaccgtgttcgacagcatcgtgaaaaacctgctggcgcagcggcgcgtgccaggcgtcattttccgccagccgcaaatggtggagatactgcatgcagacgatcagcgctgtcgccggctctccccaggcgatggcggcgatgacctgctgcagctgggccagactggcgcccgcgccgccgcaggatggcggcacggcgagacttaa

SEQ ID NO: 137221 - DNA, 1086 bp, Enterobacter cloacae
atgagcattcagtttctcggcatgattggccaccgcctctcttccgaaacgattgccccggtggggccgatctttgaccgcgactatatcgttcgctttgcgcaaacccatgaagccgccgggtttgatcgtctgctggtcggccactggtccgatcaacccgacggctttctggtgacggccctggcgggactgtcgacgcagaaaattcagtacctgctggcccatcgtcccggttttgtttccccaacccttgccgcgcgcaaattcgctacccttgagcacctgctggggggccgcttggcggtgcatatcatcagcggcggcaacgatgccgagcagcgccgggatggcgattatctcgaccacgaccagcgctacgcccgcaccgacgccttcctcgacaccgtgcgccaggtgtggaccagcgagcagccggtggatattcacaacgatttctatcaggccgagcaggcctggtccgccattcgcccgctgcaaaagccgcatcttcccatctacttcggcggctcgtcggaagcggccatcgccgtcgccggcaaacatgccgacgtcttcgcgctgtggggcgagtcgctggcgcaaaccggcgagaccatccagcgggtgcgcgccgaagcggcgaaacaccagcgtgatatcggcttcagcgtctcgttccggccgattatcgccgacagcgaagccgaagcctgggagaaagccgagcatatcctgcacgtcgccaccgagcaggcggcgcagcgcgggggcgggttcaaagccaaaccggagagcatcggcgcccagcggctgcgggctactgcggcgcagggcagagtggtggacaaacgcctgtggaccggcatcgcccagctggtgggcggcggacataactccaccgcgctggtgggcaccccggagcaggtggcggatgcgctgctcgattactacgacctcggggtgcgtaacttcctgatccgcggcttcgatccgctgaacgacgcggccgactatggccgggcgctgctgccgatcgcccgggaaaaagccgcccggcgtgcagtggcggagcgcgcatcgtga

SEQ ID NO: 137222 - DNA, 894 bp, Enterobacter cloacae
atgcgcattgacgatatcgacgctttgctggccacggtgcagttttcctccctcaatcaggccgcggaatatctggggatcacccagtcggccatcacccggcgcctgcagcgtctggaacaggagctgaacgtcacgctgttagagcgccagacccgcccgctgaccctgaccgccgccggacaccgggtgtacgagcagtgtctgagcattaagcgtgagacgaaaaaactctacagcctgttggatccggaaggcgagccgcgcggcgcgctgcgtctcggcgtgccgcagagtctcagcgagattgccctgccggcggcgctgtcggcgctgagccagcagtttcccggactgtcgccgcagatcacctgcggctggagcggacagctgcagcgccggctggaaaacggcgagctggacggcatgctggcgatggggcccgcccagcaaagcttcgccgagggctacagtgggcgcctgctgtgtcccctggaggtggtgccgatcgtcggccggcgtttgaatttgcgcgcgtcatccctgcgggagtgcgccgaacggggctggatccttaaccccgacggctgtggcctgcgcgccgggctcattcgcgagctgcagagccagggattgcggttgacgctcaacgtcgagagcgcgggcgcgcagctgcagatagcgctggtggcgcaggggctggggctgggtctggtgccgagggcggcgctggccagcagcccgtggcgggacgaggtcgcggtcctcagcctcagcgattttcagcctgcggtctcactgtggctgatccacgcccagtatctggcgaacctgcagccgccgctgaccttttttgccagcaaagtggttcagcagctgaccgtatccgactga

SEQ ID NO: 137223 - DNA, 603 bp, Enterobacter cloacae
atgactgcaccacgactggaaaaattacgccatttcattcatgaggtagatcgcctgcaccgcgaacaccaccagaccgccccgctgcttgacgccgtggcgcagcggctggcggcgctggtgcgttacgacgactggctgccggaagagtacaccctgccgcatccgcaccattaccagcagtatctgctgcatgccgactccggggagcgcttctcgattgtcagcttcgtctggggaccggggcaagcgacgccgatccatgaccaccgggtgtggggggccattgggatgctgcgcggcgcggaggaaaaccagcgctaccagctggatgccgatggcataccgcgcgcgctcggcgccgccacgcttctggaagcaggccaggtggagaaagtctccgctgacgatggcgatattcatcgcgtcagcaatgcgctggcggatcgcgtctccatcagcattcatgtctacggcggcaatatcggcgtggtgaagcgcgccgtgtataccccggaagggcagcagaaaccgtttatctccggctactctaaccgccatttacccaatatctgggattcctcccgcgaacatcaaggataa

SEQ ID NO: 137224 - DNA, 720 bp, Enterobacter cloacae
atgtccacctatgcttatcgccaggcagccgggatccgccaggcgctgctcgaccgtcgtgaactggcgctgatcgacgtccgtgaagaggccgatttcgccaccgctcatccgctgtttgccgtcaatctgccgctcagcaaactggagctggaggtccgccggcggataccgcgcttcaccaccccgctcaccgtctacgacaatggcgagggtctggcggagatcgccgtcgaacggctgcggtcctggggctatcaggatgtggccctgctggccgagggtctcgccggctggcgccgcagcggcggcgagctgtttcaggacgtcaactccgccagtaaagcctttggcgagctggtggaaagcgtgcatcacacaccgtcgctcagcgcccaggaggttcaggcgctcatcgacagccggcaggaggtggtgatcgtcgacgcccggcgcttcgatgagtaccagaccatgagcatccccggcagcatcagcgtgcccggcggcgagctggccctgcgggtagagagcctgacgccctccccgcagacgccggttatcgtcaactgcgccggacgcacccgcagcatcatcggcacccagtcgctgatcaacgccggcgtgccaaacccggtccatgccctgcgcaatggcactatcggctggacgctggccggccagacgctggcgcaccaggtcactatcccggcagcctga

SEQ ID NO: 137225 - DNA, 660 bp, Enterobacter cloacae
gtgcaggagaccgaccacttcgccagcgtacgaggggcgcgcattgtgctgctggatgacgatggcatccgggcggcgataaccggctcgtggctggcgcagatgggctgggagacggcgcggctgagcgcgctgtcgaccagccagttgagcgaacgcggggtgcctgccgccgaggtgccgcccggcccgcaggcggaggagataagcccgacgcagctggcgcaacagctggaagaacccggtacggtggtgctcgattttaccaccagcgccaactttgtcgctcgccatatccccggcgcgtggtggctaacgcgctcgcagctgcgccaggccctggaagcaatccctcccgcccaacgttacgtggtgacctgcggcagcagtctgctggcccgctacgcggtgccggaggtggcggccttgaccggtaaaccggtgcagttgcttaccggcgggacgctggcgtggatcgccgccggtctgccgctggcgcatggcgacagcggcctcgccgtcgagcgccgtgaccgctatcgtcgtccgtacgaaggaaccgataattccgccgaggccatgcaggcctatctggagtgggagtatggcctcgtggatcagctggcccgcgacggcacccacggttttcgggtgctctag

SEQ ID NO: 137226 - DNA, 726 bp, Enterobacter cloacae
atggcttacacctcccgtttgctcaatgcgatccctggcatccgccacgcttttctcgatgtccatgaaaccgccgcctttccctatgccgagctggctccggtgaagctggtgcatggtaatgaggttcatcattatcagcagccgctgccgacgcgcccgcacgccgacgcggtgtttaccgcggtagccgggcaaaaggtgggggtggtgaccgccgactgtctgccgctgctgatcgcctcgcgcgacggtcgctacgtctgcagcgtgcatgccggctggcaggggctggtcagcggtattgtcgacaacagtctggcctgttttcgccagcagggggtggcattggccgatctggtcatcgccgtggggccgtatattcacccctgctgttacgaagtctccgccggattctatcagcaactgctggaccagcccggcggtgaccgggtggcccgccatcgccagcggctgttccactcccgttcgggcccggtcagcgatccgctcaaagccgccgcgcgaggcagcgataatctgtggtttgatctgcgcgcctttgccgaagcgatcttcgcagaggcgggggtggcgccggcgagcgttgaatggctggggagttgtacctactgcaccccgcagtcgctgggctcctaccggcgccggacccattttccggcgccgaagagctttcagtattcgtggatcatgcgcgaagcctga

SEQ ID NO: 137227 - DNA, 1197 bp, Enterobacter cloacae
atgaccaagataacgactgcaaccccctcgcgcctggtggtcaccatcgggctctgttttatggtggccctgatggaagggctggatctgcaggcggcggggatcgccgccgtcggcatggcgcaggcctttgcgctggataaaatgcagatgggctggatcttcagcgctgggatcctcggcctgctgcccggcgcgctggtgggcggcatgctggcggaccgccacgggcgtaagcgcattctgttggggtcggtgctgctgtttggcctgttctcgctggccaccgcgctggcatggagcttcccgacgctgctgctggcgcgcctgctcaccggcgtcgggctcggggcggcattgccgaacctgattgccttaacctcggaagccgctggctcacgtttccgcggccgggcggtaagcctgatgtactgcggcgtacccattggcgccgcgctggcggcagcgctgggcttttccggtctcgccgcggcctggcagattattttctggattggcggcgtggtcccgctgctgctgatcccgttgctgatgcgctggctgccggagtcgcaggcgtttcagcgcgcggaggccagcgtgccgctgcgcaccctgcttgccccgggccaggccgccgctacgctgctgctgtggctgggttattttttcaccctgctggtggtctatatgctgatcaactggctgccgatgctgctggtgggccagggattccgcgccagccaggcggcgggagtgatgttctctctgcagatcggcgccgcctgcggcacgctgctgctgggggcgctaatggataagctcaccccgctgcggatgtcgctcctgatctacagcggcattctggcgtcgctgctggcgctgggcagcgcgtcgtcgctgactggcatgctgctggcggggtttgtcgccgggctgttcgccaccggcggacaaagtgtgctttacgctctggcgccgcttttttatcccgcggccatccgcgccaccggggtgggcaccgccgtggcggtggggcgtcttggggcgatgagcggcccgctgctggccggcaagatgctggccctcggtaccggcaccgtcggggtgatggcggcctcggcgccgggcattgtgctggccggcgtggcggtgttctggctgatgcatcgccagcagcgcgcggccatggtctga

SEQ ID NO: 137228 - DNA, 1017 bp, Enterobacter cloacae
atgaacggtaaaaaactttatatctcggacgtgacgctgcgcgatggtatgcacgctattcgtcaccagtattccctggcgcaggtgcagcagatcgccagcgcgctggataaggccggggtcgactccatcgaagtggcccatggcgatggcctgcagggatccagcttcaactatggctttggcgcccacagcgacatcgcctggattgaagcggcaacggatgtcgtgagccaggcgaaaatcgccaccttactgctgccgggcatcggcacgctgcacgatctgaaagcagcgtatcaggccggggcgcgggtggtgcgggtcgccacccactgcagcgaagcggacgtcgccgcgcagcatattgcctttgcccgcgagctggggatggacaccgtcggttttctgatgatgagccatatgatctccccgcaggcgctggcgcagcaggcgctgaagatggaatcttatggcgcgacctgtatctatgtggtggattccggcggggcgatgaacatgaacgacattcgcgaccgcttccgcgccctgaaggcggtgctgaagccggagaccgccaccgggatgcatgcccatcataatctgagcctcggggtggcgaactcgatcgtcgcggtggaagaggggtgcgatcgcattgacgccagcctggccgggatgggggcgggggcgggcaatgcgccgctggaggtgtttattgccgccgccgacaagctcggctggcagcatggcaccgatctctacgccctgatgaacgcggccgatgagctggtgcggccgctgcaggatcgcccggtgcgtgtcgaccgcgaaacgctggcgctgggctacgccggagtctactccagcttcctgcgccacagcgaagcggcggccaagcgctatggcctcagcgcggtggatattctcgtcgagctgggcaagcggcggatggtcggcggccaggaggatatgatcgtcgacgtcgcgctggatctgcttaaccgcaataaataa

SEQ ID NO: 137229 - DNA, 951 bp, Enterobacter cloacae
atgcgtaaacgtaaagtcgccattatcggctccgggaatatcggcaccgatttaatgattaaaatcctgcgccacggccagcatctggagatggcggtgatggtcggcatcgacccgcagtcggatggcctggcccgcgcccggcgcctgggcgttgcgaccactcacgaaggggtgggcggcctgatgcagatggcggaatttgccgacatcgattttgtttttgacgccaccagcgccggggcgcacatcaaaaacgatgccgcgctgcgcgaagcgaagccggggatccgcgttatcgacctgacgccggcggcgattggcccgtactgcgtaccggtggtcaacctcgcggacaatctccatcagggcaacgtcaatatggtgacctgcggcgggcaggcgaccatcccgatggtcgccgcggtctcgcgagtggcgaaggtgcattacgcggagattgtggcctcgatcgccagccaatccgccgggccgggcacgcgggccaatattgacgaattcaccgaaaccacctcgcaggcgattgaaaaagtcggtggggcgggcaagggcaaagcgattattgtactgaaccctgcggagccgccgctgatgatgcgcgataccgtctacatcctgagcgagctggcgtcgcaggaggcgattgccgcctcgatcgccgaaatggcggcagcggtgcaggcttacgtcccgggctaccggctgaagcagcaggtgcagtttgaggttatccccgaggataagccggtcaacctgcccggcgtcggctgtttttccggcctgaaaaccgcggtgtacctcgaagtggaaggggcggcgcactatctgccagcgtacgcgggcaacctcgatattatgacctcggcggcgctggcgacggcggagcaaatggccggggcaatgcacagcgcggcgggagcgacagcatga

SEQ ID NO: 137230 - DNA, 807 bp, Enterobacter cloacae
atgactttttctcttgacgcgctggcccggcagctccgcgacgcggaacagagcggccaggcgatcgccccgctgcgcgatattctcggcgtcgacaatgccgacgccgcctatgccatccagcgcctgaacgtccagcaccatgtggcccatggccggcgggtggtgggccgcaaggtgggcctgacccatcccaaagtgcagcagcagctgggcgtcaatcagccggacttcggcaccctgtttgccgacatgtgctacggcgacaacgccgaggtgccgtttggccgcgtgctgcagccgaaggtggaggccgagatcgccctggtgctgaagcaggatctgccgcatgccgataccacttttgatgaactgtataacgccatcgaatgggtattgccggcgctggaggtggtgggcagccgcattcgcgactggtcaatcggctttgtcgacaccgtcgccgataacgcctcctgcggcctgtacgtcattggcggcccggcgcagcgtccggcgggactggatctgaagcagtgcgccatgcacatgacccgcaaccaggagctggtctccagcggccgcggcagcgagtgtctgggacatccgctgaactccgcagtctggctggcgcgcaagctggcgagtctcggcgaaccgctgcgggcgggggatatcgtcctgaccggggcgttaggcccgatggtgacgattaacgagggggacagctttgtcgcccatatcgaaggtattggctcagtcgcggcacgcttcgttgccgccggagaaggagatcgtgatgcgtaa

SEQ ID NO: 137231 - DNA, 867 bp, Enterobacter cloacae
atgagctatcaaccgcaaactgaagccgccaccagccgattcctcaatgtcgacgaggggggccgcacgctgcgtatccatatcaatgactgcggcgacgggaaagagaccgtggtcatgctgcacggctccgggccgggggccaccggctgggctaacttcagccgcaatattgacccgctggtcgaggcgggctatcgcgtgctgctcctcgactgtccggggtggggcaaaagcgatgctatcgtcaacagcggctcgcgttcggacctcaacgcccgcattctgaaaagcgtggtcgatcagctggggatcgataaagtccatctgctgggcaactcgatgggcggccatagcgcggtggccttcaccttgagctggccggagcgggtggctaagctggtgctgatgggcggggggaccggcggcatgagcctgttcacgccgatgccgaccgagggcatcaagctgctgaacgccctgtaccgcgagccgaccattgaaaacctcaaaaagatgatgagcatcttcgtcttcgacacccgcgacctcaccgaggcgctgttcgaggcgcgtctcaacaatatgctgtcgcgccgcgaccatctggacaacttcgtcaagagcctggaagccaacccgaagcagtttcctgactttggcccgcggctgggcgaaatcagcgcgccaactctgatcgtctggggacgcaatgaccgcttcgtgccgatggacgccgggttgcgcctgctcgccgggatcgccggttcggagctgcatatttaccgcgactgcggccactgggcgcagtgggaacatgccgacagttttaatcagctggtgctcaatttcctcgcacggacttaa

SEQ ID NO: 137232 - DNA, 762 bp, Enterobacter cloacae
atgccgccgttctgcctcggggtcggcgccaccgcgattggcgacttcgccagcgccgccggcgacctgccggtgcccgccgagctggcggaagcctgcgcccacgccatcctcaacagcggtatcgacctggcggtgtcgtacaacatgcaggtggaccatggcttcgcccagccgctggagtttctgctgggtggcctggaccgtgtgccggtgctgccggtgtttattaacggcgtcgccgcgccgctgccgggttttcaacgtacccggctgctgggcgaggcgatgggccgctttctcaataccctcaataagcgggtgctgatcctcggctcgggcggactctcgcaccagccgccggtgccggagctggcgaaggccgacgcccatctgcgcgatcgcctgctcggcggcggaaagcagctgccgccggacgaacgcgaacggcgccaacagcgggtgatcaatgccgcccgacggtttaccgaagacccgcactcgctccatcccctcaacccggtctgggacaaccgctttatgagcctgctggagcaggggcggctgagcgaactggacgcgatcggcaatgacgagctgtcggcgatggccggcaaatcgacgcacgaaattaagacctgggtggccgcttttgccgcgctatccgcttttggccgctggcgcagtgaaggccgctattaccggccgatccccgagtggatcgccggattcggctcgctgagcgccaccaccgagatttga

SEQ ID NO: 137233 - DNA, 1665 bp, Enterobacter cloacae
atgacaacatctacacccgatattcaacccgccgtgcagcataccgctcaggtcgccatcgttggcgccggtccggttggtctgatgatggccaactaccttggccagatgggcatcagcgtgctggtggtggaaaagctcgccacactgatcgattacccgcgggccatcggcattgacgatgaatccctgcgggcgatgcaggcggtggggctggtgaatgacgtgctgccgcataccacgccgtggcacgccatgcgttttctcaccccaaaaggccgctgctttgccgatatccaaccgatgaccgatgagtttggctggtcgcggcgcaacgccttcattcagccgcaggtcgatgcggtgatgtatcacggtctgcagcgtttcccgcaggtccgctgcctcttctcccgcgaagttgaagcctttagccagaccggtgacagtgtcacgttaaatcttaaaggaccggacggcgaacgggagacggtgcgcgcggactggctggtggcctgcgacggcggcgccagctttattcgtcgtacgctgaacatccccttccaaggtaagaccgcgccgaatcagtggatcgtcatcgatatcgctaacgacccgctggccaccccgcacgtttatctgtgctgcgacccggtgcgaccctacgtttccgccgcgctgccccacggcgtgcgccgctttgaatttatggtgatgcccggagaaaccgaagctcagctcagcgagccgcacaatatgcgccgtctgctgagcaaagtgctgccggacccggaccgcgtcgagctgatccgccagcgggtctatacgcataacgcccgccttgccgagcgctttcgcattaaccgggtgctgctggccggcgacgcggcacacatcatgccggtctggcaggggcagggatacaacagcggcatgcgcgacgccttcaacctggcgtggaagctggcgctggtggtcaacggtaaagcgggagaggcgctgctcgacagctaccagcaggagcgccgcgaccacgcgaaagcgatgattgatctgtcggtcaccgccggctacgtgctggcgccgccgaagcgctggcagggggccgtgcgcgacggtctctcctggctgctaaattacctgccgccggtgaaacgctacttcctcgagatgcgctttaagccgatgccgcagtaccgcgagggggcgctgctgaccgacggcgccggcaagacctcgccggtgggcaaaatgtttattcaaccgcaggtgacgctggagagcggcgagagcgtgctgctcgacgaggttatcggggcgaatttcgccattatcggctggggctgcaacccgcagtgggggctcaacgccgggcagatcgcccgctggcgcgcgattggcgtgcgctttatccaggtggtgccggaggtgcagatccaccgcgagcaggataacgcccccggcacgctgcgggtgggcgatacgcaaaaccgcctcaaaagctggtttgcactgcataacaccgccatcgccgtggtcaggccggaccgctttgtcgccgctcttgccatcccgcagaccctcggcgcgcagctgaccgctctggcggaaaaaatgaccctcgcaaccggggataccgcccacgctgaagagaaggtggcctga

SEQ ID NO: 137234 - DNA, 813 bp, Enterobacter cloacae
atgcgtgacgatgagtccgcagcgtacaaaacggtgcgcggattaagccggggtttattgttattaaaattgttaaataaattcgacggcggcgcgacgccgggcctgctggcggagtttagcggcctgcatcgcaccaccgtgcgccggctgctggagacgctacaggaggagggttttgtccgccgcagccgctccgatgacagcttccggttgaccattaacgtccgccagctgagcgatggatttcgtgacgaacattggatttctgccctcgccacgccgctgctcggcgagctgctgcgcgaggtgcagtggccaacggacatcaccaccctcgacgtcgacgccatggtggtgcgcgagactacccaccgcttcagccgactgtcgtttcaccgcgcgatggtcggacggcggctgccgctgctgctcaccgcctccggactgacgtggctggcctttgcccccgacgcggaacgcgacgccgtcgtcagcatgctggccgcccgtccggaagctgagtatcagctggcccgcgaaccggaacggctggcggcgatcctcgcccgcacccgccagaacggctatggcgaaaacttccgcggctggcggcaggaggagaaaatcgcctcgatcgccgtgccggtctgcagtcagcagcgggttatcggctgcctgaacctggtctatatcgccagcgcgatgaccattgagcaggcggcgcagaagcatctccctgcgctgcagagggtggcgaggcagatagaagcccgcatggaagaggaagaagtgtggtacgaaatgccctga

SEQ ID NO: 137235 - DNA, 1059 bp, Enterobacter cloacae
atgtcaaaacaccccttactgctgggcctgacgctgctcagcgccagcctgttcaccggccagaccttcgccgaccgcaccgtcaccgaccagctgggtcgccaggtcaccctccccgaccacgtcacccgcgttgtggttctgcagcatcagacgctcaacctgctggtacaactgcatgccgccgaggatatcgtcggcgtcttaagcagctggcagaaacagctcgggccgcagttcgcccgctttatgcccgagatcgggcaactggcgaccccgggcgatctcacccaggtcaatattgaaagcctgttggcgctgcgtccgcaggtggttttcgtcgccaactatgcgccgccggcgatgatcgcgcagatccaacaggccgggatcccggtagtggccatctcgctgcgccacgatgccgccggggaaaaaaataaaatgaaccccaccatggctgacgaagagcaggcctataacgccgggctgatggaggggatccgccttatcggcgaggtggtcgagcgccagcccgaggccgaggcgctgattcactacaccttcgaggcgcgcaagcaagccaatgcgccggtggccgatattccccagaaccagcgggtgcgggtgtacatggccaaccccgatctgaatacctatggcgctggcaaatacaccgggctgatgatggcgcacgccggggcgctgaacgtggcggccgccagcgtaaaaggcgcccgccaggtgtcgctggagcaggtgctggagtggaatccacaggtgatcttcgtccaggaccgttatccgcaggtggtcaaacagatagagaacgacccgcagtggcaggcgatcgatgcggtgaaacatcaccgcgtgtggctgatgccggagtatgccaaagcctggggttacccgatgccggaggccctggcgctgggcgagctgtggatggcgaaaaaactctatcctgcgcgctaccagagcatcgatgtggacagtaaagccagggattattatcagcgtttttaccgcgtggcgtggatgccagatgcccgctaa

SEQ ID NO: 137236 - DNA, 1008 bp, Enterobacter cloacae
atgcccgctaactctcagccctggctggtgcagggaagcctggcgctggcgacgctggcgatcgcggtcgcctcgctctgtttcggccagtacccgttaagcctgagcgccgttggccacaccctggtccatctgccgccaggtgaaggggtgatcgggcagatcgtctggtcggttcgcctgccgcgcgtggtgatggccctgctggccgggggcgcgctggggctgtgcggcgccaccttgcagggcgtgttccagaacccgctggtggacccgcacatcatcggggtgaccgccggctccgcctttggcggcacgctggcgatcctgttgggcgtcggcagtctgctgatgatggcctcgacctttttcttcggcctcgtcgcgctggggctgatttacgccctcgccgccctgcaggggcgggacagcacgctggggctgattctgtccgggatcattctcagcggcttcttcgccgcgctggtcagcctgatgcagtacctcgccgacagcgaagagacgttaccgaacatcgttttctggctgctcggcagcttcgcgaccgccagctggcataaggtactgcttatgtccctgccgatggcgcttgccgccggggtgctgtggaagctgcgctggcggatcaacctgctggccctggaggagcgcgatgcccgcagtcttggcgttccggtggctgcgctgcgtcgcggcgtgctggtctgctgcgcggtgctggtggcagcccaggtggcggtcagcggcagcatcgcctggatgggtctggtggtcccgcacctcgcccgcctgctggtgggcgctgaccatcgtcgcctgctgcccaccgccttctggctcggcgccgccctgatgctggtggtggacgatctggcgcgcacgctgacccaggcggagatcccgatcgggatcatcaccgccctgctcggggcgccgctgtttacctttttactggtgcaatcccgacgccggagtacgacccgatga

SEQ ID NO: 137237 - DNA, 276 bp, Enterobacter cloacae
  misc_feature (257)..(266): n is a, c, g, or t
atgctcggatgggtcattacctgtcacgatgagctggcgcaggagatgctggatcgtcttgaacaaaagtttggtccgctggcccagtgccgggcggtcaattactggcgcaatctcagcagcaatatgttgagccggatgatgtgcgatgcgctgcatgccaccgactccggggacggggtcatttttctcactgacaaaaccggtgcggcgccttatcgggccgcggcgctgatgagtcacaaacatacccactnnnnnnnnnngcggcgctga

SEQ ID NO: 137238 - DNA, 1254 bp, Enterobacter cloacae
atgcgtatgcttgcccgatttttgaccctgcttcttttcctgacctcactcagcgcctccgccagcctgcttagccagcagggcaaggctgtgcgctatatgcaaaccaccgaagacgcggtcatctgggcgcaggtgggaaaccatgtggtcagcgtcggcaatgttcgtgccgggcagatcctcgcagtcgtcccgacggcggctgactactatgagtttcgtttcggctttggcaccgggtttattgataaagggcatctcgagccggtgcagggcaagcagcgggtggaggaccgtctgggggatcttaataaaccgctgagtaaccaaaatttactcacctggaaagatacaccgctctatgacgctccctcggtaagcagcgcgccgttcggcacgctggccaacaatctgcgctatccgatcctcagcaagctgaaggaccggctcaatcagacctggtttcagatccgcattggcgaccggctggcgtgggtcagtagtctggacgcgcaggaggatcacggtattcccgtgctgacctatcaccatattctgcgcgatgaagagaacacccgttttcgtcatacgtcgaccaccacctcggttcgcgccttcacgaatcagatgacctggctgcgcgatcagggctataccacgctgaccctgtatcagctggaaggctatgtgcgtaataaaatcaatctcccggcgcgggcggtggcgatcactttcgatgatggcttgaaatcggtgaaccgctacgcctatccggtgctgaaacagtacggtttccatgccaccgcgtttattatctcctcgcgtattaagcgccatccgcagaagtgggatccgaaatccctgcagtttatgagcatttccgagctacgccagatccaggacgtctttgatattcagtcgcatactcacttcctgcatcgggttgacgccggccggcggccgattttattcagtcgcaattaccataatattctgtttgatttcgcccgctcgcgccgggcgctgagccagtttaatccgcacgttctctacctttcctatcccttcggcggctataacgctacggcggtgcaggcggcgaatgacgccgggtttcatatggcggtaacgacggtgcgtgggaaggtgaagccgggggacaatccgtttctgttaaagcggttatatatcttacgcacggattcgctggagacgatgtcgcggctgatcagtaaccagccgcaggggtaa

SEQ ID NO: 137239 - DNA, 381 bp, Enterobacter cloacae
atgatgcgtaatatgctgcagggcaagctccaccgcgtaaaagtcacgcaggcggacctgcactatgaaggttcttgcgccattgaccaggacttcctggatgcggccggtattctggagaatgaaactattcacctctggaacgtcaccaacggcaaccgtttctccacctacgccattgccgccgagcggggctcccggatcatctccgttaacggcgccgccgcgcactgcgccagcgtcggcgatattttgatcatcgccagcttcgttaccatgtcggacgaagaggcgcgcagctggcagcctaacatcgcctacttcgaaggcgacaacgaaatgaagcgccaggcgaaagctattccggtacaggtcgcctga

SEQ ID NO: 137240 - DNA, 855 bp, Enterobacter cloacae
gtgctgattattgaatccgtactgctgctgcggcagcatatccgccgtctgcgtcaggaaggtaagcgtatcgcgttggtcccgacgatgggcaacctgcatgatggtcatatgaagctggttgatgaagccaaagccagtgcggacgtggtggtggtcagtattttcgtcaatccgatgcagtttgaccgcgtcgacgacctggcgcgctacccgcgcaccttacaggatgattgcgaaaagctgaacaaacgtcatgtcgactttgtcttcgcgccgacgccggcggaagtgtacccccagggtactgaaggccagacctacgtcgacgttccgggattatccaccatgctcgaaggcgccagccgcccgggccatttccgcggcgtgtcgaccatcgtcagtaagctgttcaaccttgttcaaccagacgtcgcctgcttcggcgagaaagacttccagcagctggcgctgatccgcaagatggtcgccgacatgggctacgacattgagatcatcggcgtgccgatcgtccgcgcgaaagatggcctggcgctgagttcgcgtaacggctacctgaccgccgaccagcgcaaaatcgcgcctggtctgtataaagtgctgagcgcggtggcggaaaagctggccgccggcgatcggcagctcgatgagatcatcgctatcgctgaacaagagctgaatgagaaaggcttccgcgccgacgacattcagatccgcgatgccgacaccctgcttgagctgaccgatgccagccagcgcgcggtgatcctgatggccgcctggctggggcaggctcgcctgatcgacaaccggatcgtcacgctcgctcagtag

SEQ ID NO: 137241 - DNA, 792 bp, Enterobacter cloacae
atgaaaccgaccaccattgccctgctgcagaaatgcaaacaggaaaagaagcgctttgccaccattaccgcctacgatcacagcttcgcgaagctgttcgccgatgaaggcataaatgtgctgctggtaggcgactcgctgggaatgacggtgcagggtcacgactccaccctgccggttaccgtggaagatatcgcctatcacacccgcgccgtccgccgcggcgcgccaaacagcctgctgcttgccgacctgccgttcatggcctatgccacccccgagcagacctttgcaaatgccgccatcgtgatgcgcgctggcgccaatatggtcaaactcgagggcggcgcctggctggccgacaccgtgaggatgctggcggagcgcgcggtgccggtttgcggccatcttggcctgacgccgcagtcggtgaacgtattcggtgggtataaagtgcagggtcgcggcgatgcggcgcagaccctgtttgaagacgcgttagcgctggaggcggcgggtgcgcagctgttggtcctggagtgcgtgccggttgaactggcgaagcgcatcaccgacgctctgaccattccagtgatcggcatcggcgcgggcaacgtcaccgacgggcaaatcctcgtgatgcatgacgctttcggcattaccggcggccacattcctaaatttgccaagaatttccttgccgaagcgggcgacatccgcgccgcggtgcggcagtatattgccgaagtcgaatccggagtctatccgggcgaagaacacagtttccattaa

SEQ ID NO: 137242 - DNA, 480 bp, Enterobacter cloacae
atgactctggtctatatcgctcttggcagcaaccttgcttctccactggagcaggtgcaggcggctatccgcgccttgggcgaaattccgcacagccgcgtggtcgccgtctcttcgttctaccgcacgccgccgctgggcccgcaggatcagccggactatctcaacgccgccgttgcgctggaaaccgccctgccccccgagacgctgctcgatcatactcagcgcatcgaactgcagcaggggcgagtgcgcaaagccgaacgctgggggccgcgcacgctggacctcgatatcatgctgtttggcgatgctgtcattaacagcgagcgcctgaccgttccgcactacgatatgaaaaaccgcagctttatgctctggccgctgttcgagatcgccccggaccttcactttcctgacggcccggcgctgcgcgccgtgctggataatctcggcgcggaaaagcccgccagctggtaa

SEQ ID NO: 137243 - DNA, 1362 bp, Enterobacter cloacae
gtgctaagccgtgaggagcgcgaggcagaagccgccgtcgaaccaacgcctatgacggtgatcccgcgtgagcagcatgctatttcccgcaaagatatcagtgaaaacgccctcaaggtcatgtaccgcctcaacaaggcgggctacgaatcctggctggtcggcggcggcgtccgcgacctgctgcttggcaaaaagccaaaagattttgacgttaccaccaacgccacgccggatcaggtacgcaagctgttccgcaactgccgtctggttgggcgacgtttccgcctggcacatgtgatgttcgggccggaaatcattgaggtcgccaccttccgtggccatcacgaagggcataccaccgatcgcgtcacctcccagcggggccagaacggcatgctgctgcgcgataacatcttcggctcgatcgaggaggatgcccagcgtcgcgacttcactatcaacagcctctattacagcgtggcggattttaccgttcgcgactacgtcggcggcatgaaggatctgcaggacggcgtgatccgtctgatcggcaatccggaaacccgctatcgcgaggatccagtgcgcatgctgcgcgcggtgcgctttgctgccaagctcaatatgaccatcagcccggaaacggctgaaccgctgccgcgcctggccgccctgctccacgatgtgccgccggcgcgtctgttcgaagaagtgctcaagctgctgcaggccgggtatggctaccagacctacatgctgctgcgggaatacagcctgttccagccgctgttcccgaccatcacccgctactttaccgagcgcggcgacagtccgatggagcggatcatcagccaggtgctgaagaataccgatacccgcattcataacgatatgcgcgtcaatccggccttcctcttcgcggtgatgttctggtatccgctgctggagacggcgcaaaaaatcgctcaggagagcggcctggcgtactacgacgccttcgccctggcgatgaacgatgtgctggacgaagcctgccgtacgctggcgatccctaagcgcatcaccacccttattcgtgatatctggcagctgcagctgcgcatgtcccgtcgtcagggcaaacgcgcctggaagctgatggagcatccgaaattccgcgccgcctatgacctgctggagctacgcgccggcgccgagaacaaccacgaactgcagcgcctgaccaaatggtggggcgaattccaggtcgccgcaccgccggcgcaaaaagatatgctcaacgacctcggggacgatcctgcgccgcgccgtcgtcaccgtcgtccgcgcaagcgcgcgccgcgccagggtagcgcatga

SEQ ID NO: 137244 - DNA, 882 bp, Enterobacter cloacae
atgactgactcacgctatatagggcgcttcgccccctccccctccggcgaactccacttcggctctctgatcgccgcgctcggcagctacctgcaagcccgcgcgaaccagggcatctggcgtgttcgtattgaagatatcgacccgccgcgcgaagtccccggtgccgccgataccatcctgcgccagcttgaccactacggtctgcactgggatggcgacgtgctgtggcagtcgcaacggcacgaagcctaccgcgaggcgctgacgtggctgggcgagcaagggctgagctattactgcacttgcacccgcgcgcggatccacgccgtgggcgggatctacgacggccactgccgcgatctcgggctgggggcggaaaacgccgcgctgcgcctgcgccaaacccgtccggtgctgcagtttagcgaccgtctgcgcggcacgctcatcgccaatgagccgctggcgcgtgaggattttattatccaccgtcgcgacgggctgttcgcctacaacctggcggtggtggtcgacgaccactttcaggggatcaccgagattgtccgcggcgcagacctgattgagccgacggtgcggcagatttcgctgtatcagcattttggctggcaggcgccggattacctccatctgccgctggctctcaatggcgacggcaataaactctctaaacaaaaccacgcgccggcgctgccggaaggcgatccgcgccccgaaatcgtccgggcgctccgctttctgaatcaggcgatccccgaggagtggcaggccctgagcatcgatgatttactcgcccaggccgtcgccaactggcagccggcgaaaatcgagcattctcaaatggctcccgctgagctatga

SEQ ID NO: 137245 - DNA, 456 bp, Enterobacter cloacae
atgcaagaagggcaaaaccgtaaaacatcgtccctgagtattctcgccatcgctggggtggagccgtaccaagagaaaccgggcgaagagtatatgaacgaagcccagctggcgcacttcaagcgtattcttgaagcatggcgtaatcaactcagggatgaagtggatcgcaccgtatcgcacatgcaggatgaagcagctaacttcccggacccggtagaccgtgccgcccaggaagaagagttcagcctggaactgcgtaaccgcgaccgcgaacgtaaactgatcaaaaagatcgagaaaacgctgaaaaaagttgaagacgaagacttcggctactgcgaatcctgcggcgtggagatcggcattcgccgtctggaagcgcgtccgacagcggatctgtgcattgactgcaaaaccctggcggaaattcgcgaaaaacagatggcgggctaa

SEQ ID NO: 137246 - DNA, 717 bp, Enterobacter cloacae
atgcagtttgatccgccgttgcagcccgccattttgcttaaacgttacaaacgatttcttgctgacgtggtcacccccgatggccgcgagctgacgctccactgcccgaataccggggcgatgaccggctgcgccgtcccgggcgacaccgtctggtattccacctcggacaatgcgaagcgcaaatatgcccacacttgggaattaactgaaacccagcagggcgcagttatttgcgtcaatacgctgcgcgcgaattctttggcgaaagaggcgatttccgccggaataattcctgaactttcaggctataaccagctgaaaagcgaagtgaaatatggcgaagagaatagccgtatcgatattatgttacaggcagatgaccgacaaaactgctatattgaagtgaaatcggttacgttggcggagaaagaatacggttattttcccgatgcggtgaccacgcgcggtcagaagcatctgcgggaactgatggccgtcgcggcaaatggcgaccgcgcggtgattttatttgccgtcctgcattcggcaattgaccgtttttctcccgcgcatcatattgatgccagatacgcacagctgttaacagaagcccaggacaagggggtggaaattctcgcctggaaagcggaactttctacgacgaggatgactctgaataagccgatcgccgtggtgttaaaccccggtaaataa

SEQ ID NO: 137247 - DNA, 537 bp, Enterobacter cloacae
atgtctgagccgaaaaggctgttttttgcgcttgaactgccgtctgccgtccagaagcaaattgtccagtggcgggcaacgcacttccccgaagatgccggcaggcccgtcgcggcggataatcttcatctgacgctggcgtttctcggcgaggtgagcgcggaaaaacagcgggcgctggccgctctcgctggtcgcctgcgccagccgggctttaccctgacgctggacgatgccggacagtggctacgttcgcgagtggtgtggctcggaacccgccagccgccgcgcggcctgctgcagctcgccagcatgttgcgcgctcaggcggcgcgcagcggctgctatcagagcccgcagccgtttcacccgcatattaccctgtggcgcgatgctcgccaggcggtgccgatcccggcccccggctttcgctggacgtttccggtgaacgagttcgtgctctatgagtccagctttagccgggggcgcacgcgctacacggcgctggaacgttatccgtttgataaggaaagttga

SEQ ID NO: 137248 - DNA, 1077 bp, Enterobacter cloacae
  misc_feature (1054)..(1063): n is a, c, g, or t
atgaaaatcaaaactcgcttcgcgccaagcccaaccggctatctgcacgttggcggtgcgcgtactgctctctattcctggctttttgcccgtaaccacggcggtgagtttgtgctgcgtattgaagacaccgatctcgaacgctccaccccggaagcaattgaagccatcatggatggcatgaactggctgaatctgcaatgggacgaaggcccctatttccagaccaaacgtttcgatcgttataacaacgtaatcgatgagatgctggaagccggtaccgcttacaaatgctattgctcgaaagaacgtctggaagcgctgcgcgaagagcagatggcgaagggtgagaagccgcgttacgatggccgctgccgccatagccacgagcaccatgctgacgatgagccgtgcgtcgtgcgtttcgccaacccgcaggaaggttcggttatttttgacgatcagatccgcggacctatcgagttcagcaaccaggaactggacgatctgatcattcgccgtaccgatggttccccgacctataacttctgcgtggtggtagatgactgggatatggcgatcactcacgtgatccgcggcgaagatcatatcaacaacacgccgcgccagatcaacatcctcaaagcgctgaatgcgccggtgccggtttatgcgcacgtgtcgatgatcaacggcgatgacggtaaaaaactttccaagcgccacggcgcagtgagcgtgatgcagtatcgcgacgacggctacctgccggaagcgctactcaactatctggtgcgcctgggctggtctcatggcgatcaggagattttcactcgcgaagagatgattgagttcttctcgctgggcgcggtgagcaaatccgccagtgcctttaacaccgataaactgctgtggttaaaccatcactatatcaataccctgccggcggagtatgtggcaacgcatctgcagtggcatatcgagcaggaaaatatcgacactcgcaacggcccgcagctggctgagctggtgaaactgctgggcgagcgttgcnnnnnnnnnnttgcaagacgctga

SEQ ID NO: 137249 - DNA, 384 bp, Enterobacter cloacae
  misc_feature (5)..(14): n is a, c, g, or t
ttgcnnnnnnnnnnttgcaagacgctgaaagagatagcccagagctgccgctacttctatgaagagttcgctgaattcgatgccgacgccgcgaaaaaacatctgcgtccagtggcgcgtcagccgctggaagtggttcgcgataagctggcggcgattagcgactggacggcggaaaacgtccatcacgcgattcaggcaactgctgatgagctggaggtggggatgggtaaagtcggtatgccgctgcgcgtggcggttaccggggcagggcaatctcctgcgctagacgttactgtccatgctatcggtaaatcccgtagcgtagatcgtatcaataaagcgctggcttttatcgctgaacgcgaaggccaggcgtcctga

SEQ ID NO: 137250 - DNA, 393 bp, Enterobacter cloacae
atgatgaaactgaaagataaaatgacgcccgcagagcttgccgattgcctggggctggccagacaaacgatcaatcgctgggttcgcgagaaacaatggcgcaccgaagcaatacccggcgttaaaggggggcgagcgcgactggtggttatcgaccaaccggtacgcgagtttctgaccaacatccctgccagacgccatctgcttaccgacaatcatctcgcggaatcgccaggtgcatacctggtcaatgaggcagacgcgatctggcggcaaatcacggaaaccctacagctgatgactccggcagaacagctgcagctccgcgatctgctggcccgggaagggattagcggttttcttgcccgcctcggcatcgccagtccggaataa

SEQ ID NO: 137251 - DNA, 354 bp, Enterobacter cloacae
atgctcaaggaacgaatgacacctgaagaaattgcccatctaaccggctacagtcggcaaactatcaataagtgggtgcggaaagaaggctggcaaacctctccgcgacctggcgtccagggcggcaaagcgcgcctggtccatgtcaatgagcaagtcagggagtttatccgcagcgcccagcgcgtggcggagacgcccggcatctattctccccatgatagcgatctggaatcgctgctgctgaccctcagtaaagaactcacccccagcgagcagaagcagcttatgtcattgttgctgcgcgaggggatcaccgggttactgcttcggttagggatccgcgatcggtaa

SEQ ID NO: 137252 - DNA, 2172 bp, Enterobacter cloacae
atgcttgataaaattaacattaatatcaaaaaaactctattggcctttatcatttgtttagtcgctattccgctggcccgttttatttcaccgcaaacgataattgacggcaaccttatttatattgcctggctgccaatcagcgtgatgttttctgttatttttatctttggccgctatgcgattgcgccattaattctcgcgtttgccatcaccaatagttttctcattaaattaacgctgccgcaggcgtttatcttacttttttgtcaactgttcgccgtgtttgtctcctgcgctattctgcgactgttggtggggaagcgctggcgctgcggtccaacggcaaagcatatgggggcgcggatcttctggggcggcttcttcgcgccggtgctcctgaaaatcaccatgtatctcgccggacaatattttgcgtttccattagctattaccagttactttggtagtatgccgttgatttatactgtaatagatatccaaagtttaatcagtgcggcattaatttttacgacgtttctttattatccaatgcggatgattatcagtccgcgctacgcccgacgtttctggcagcaggaatgtttaccgtggctggcaccgcaatatcgctcctttaccctatattggtttatcgcgttggcggtgatattaacgctattgtgtgcgccgtatcagtctgaatttattgccggttatttagttccggttatttttattgtttactttatcggtatcagtcgaataggccatgcgctattgcgtatttcatggtctgtctcggcctttttgctggtggtatataacaaaaactttctccagggggtgcaaagcgagtattcactctcctttgtgctgtcggttctgatctcctttactatctgtttgttttatatggccgacatctatgcccgcagcgaccgcaacaaacgccgctggcgtagccaggcggaagaggatccgctgaccggcttgcctaacctgcgcgcgctggagagccatttacagagctgtcctcagcaggctatctgcagcctgcgtattgataatctcgactttctcagtcggcattatggtctgatgatgggggtggactgtaaacggcagattattcgggcgctgcaaccgctgctgggagcggcggataaagtcttccaggtaccgggcagcgaactgatcctcgtgcttgatggaccggagccgtcgtcccgcttgaaccatatggtcgcggtcctcaaccacaaaaagttcagctggcacaatcagccgctggatttggagtttggcgcggcctggggccgcgatgacggccagggtgagggactttaccagatgctgggccagctaagctggctttccgaacaggcgggcagtgaacgtcgggtgctggcgctggacgaggagcaggatctggtggtggatcaaactaccgagcaggtgcgcctcctaatgcgcgtcaagcaagtgctcaaagatcgcgcgctgatgctctatgcgcaaccgattcagaatccggagggggagggttatcatgagatcctcacgcgcatgcgctgtggcgatagcgtcattatgcccgaccgattcattccgctgattgtgcagtttaacctcagccaacgttttgacatgctggtgctggagaccttgttcagtatgctccataagcatcccggccagcgattctcggtcaacctgctgcctgcaactctgatgcaaaagaacagcgcagggcagattatcgcgctgtttcaacgctatagcgtctcgccagaacttataactattgaggtgaccgaagagcaggccttctctaatgcggacaccagtcggcaaaatcttgaagcgttgcgcgcgtttggctgcgccatcgctattgatgactttggcaccggctatgcgaactatgaacgtctgaaacatctacaggccgatatcattaagattgacggctgcttcgtccgcgacatcctcacggacccgctggacgccatcatggtgaaatcgattgtcgagatggcgcgggcgaaacagatgagcgtggtggcggaatatgtcgaaagcgaaccgcaaaaagcgcgcttgctggagctgggcgtgaattatctgcagggttatctgatcggtaaaccacagccgctgggtgaatga

SEQ ID NO: 137253 - DNA, 1203 bp, Enterobacter cloacae
atggaccgcgtcttgcattttgtcctcgcgatcgttgtggtggctatactggccctgttggtcagccatgaccgccaaaagatccgtattcgttatgttgttcaactgcttgtcattgaagtcctgctggcctggttcttcctcaactccgatattggtctgggttttgtgaaaggattttccgagatgtttgaaaaactcctcgggtttgccaacgaagggacaaacttcgtgttcggcggcatgaacgataaaggcctggccttcttcttcctcaaggttttgtgccctatcgtcttcatttcggctttgatcggcattttgcagcatattcgtatcctgccgattgtcattcgcgcgatcggtaccgtcctgtcgaaagttaacggcatgggcaagctggagtccttcaacgccgtgagctcgttgatcctcggccagtcggaaaactttatcgcgtataaagatattctcggcaaaatgtcgcgcaaccgcatgtataccatggcggcgacggcgatgtccaccgtgtccatgtccatcgtaggcgcttacatgaccatgctgcagccaaagtatgtcgttgcggcgctggtgctcaacatgttcagcacctttatcgttctgtcattaattaacccttaccgcgtggaagagagcgaagaaaatctgcagatgtcgaatctgcacgaaggtcagagcttcttcgagatgctgggcgagtatattctggcaggttttaaagtcgcgattatcgtggcggcgatgttgatcggcttcatcgcgctgatctcggcgctgaatgccctgttcgccaccgtgaccggttggttcggctatagcatttccttccagggtatcctcggctatatcttctacccggtcgcctgggtgatgggtgtgccggcaagcgaagcgctgcaggtgggcagtattatggctaccaaactggtctccaatgaattcgtcgccatgatggatctgcagaaaattgcctcgacgctctccccgcgcgcggaaggcattatctctatcttcctggtctccttcgccaacttctcatctatcggtattattgccggggcgatcaaaggtctgaacgaagaacagggcaacgtagtttctcgcttcggtctgaagctggtgtacggctccacgctggttagcgtgttgtccgcctcgattgcggcgctggttctgtaa

SEQ ID NO: 137254 - DNA, 1242 bp, Enterobacter cloacae
atgactagcagtcgcgttgagaatagcagtagtcgcgccgcgcgcaaggtgaagctcgccttaatgggcccggctttcgtcgctgccattggctatatcgatccgggtaatttcgccactaacattcaggccggcgccagctttggctaccagctgctgtgggtcgtggtgtgggctaacctgatggcgatgctgatccaggtgctttctgccaaactgggcattgccaccggcaaaaacctggccgagcagatccgcgaccattacccgcgtcctgttgtctggttttactgggtacaggcggaaattatcgctatggccaccgatctggctgaatttatcggcgccgcgattggctttaagctggtgctcggcgtgtcgcttctgcagggggcggtgctgaccggggtggcgacttttctgatcctgatgctgcagcggcgcggacaaaaaccactggagaaggtgatcggtggattgttgctgtttgtcgccgtggcctatgtcgtggagttgatcttttcccagcccgcgctggctcctctgacgaaagggctggtgatccccacgctgcccaacggggaggcggtattcttagccgccggggtactgggtgcgacaatcatgccgcacgttatctacttacattcctcgcttacccagcatctgcatggcggaacgcgaaaagaacgctataacgcgacccgctgggatgtggcgatcgctatgaccattgccgggttcgtcaatctggcgatgatggcgaccgctgcggcggcattccactttaatggccataccggcgtcgccgatcttgatcaggcctacatgacgctggagccgctgctgagccacgcggcggcgaccatctttggcctcagcctgattgccgccggtttatcgtcgaccgtggtgggcactctggcaggtcaggtcgttatgcaggggtttatccgctttcatattccgctgtggtttcgccgggcgatcaccatgctgccgtcgtttgtcgtcattctgctggggctggatcctacgcgtatcctggtaatgagtcaggtgttgctcagctttggcattgcgcttgccctggtgccgctgctgatatttaccagcaatgcgaagctgatgggggacctggtgaatacccgttgggtgagaggcatcggctgggcgatagtcgctattgtggtgagcctgaacggctggttaatagtggggtcgctgctcggggtggattaa

SEQ ID NO: 137255 - DNA, 360 bp, Enterobacter cloacae
atgttcaggtcactgattctggcagcagtactgctggccgcagggccactggtcgctaacgctggtgaaatcaccctgctgccgtcggtaaaattacaaataggcgatcgtgacaattacggtaactactgggacggtggcagctggcgcgaccgtgattactggcgtcgtcactatgaatggcgtgataaccgttggcatcgtcatgacaacggctggcacaaaggctggtacaaaggcagagataaagcctgggagcgcggctatcgtgctggctggaacgaccgcgatgaccaccgcggcggctggggacgcggcccgggtgggcgcggtcacggtcatggacatggccatcactaa

SEQ ID NO: 137256 - DNA, 993 bp, Enterobacter cloacae
atggtttaccaggcaagcaccacgcgatatcaaacgatggagtaccgtcgctgcggccgcagcggtctgcagctaccggccatttcccttggcctgtggcataactttggcgatgaaacgcgagtggaaactagccggcagatgctcctgcacgcttttgacctcggtataacccatttcgatttggccaacaactatgggccgccgccgggctcggcggaaagcaactttggccgtatcctgaaagagtcgctcctgccttatcgcgatgagttaatcatctccactaaagcaggttacacgatgtgggacggcccttacggcgactggggatcgcgaaaatatctggtagccagtcttaaccagagccttaaacgcatggggctggaatacgtcgatattttttaccatcaccggcctgatccacagacgccgctgatggaaacgatgcgtgcgctcgatcatctggttcgtcagggtaaagcgctatatgtcgggatctccaactatcctctggcccaggcgcgggaggcggtgaagatccttaacgacctcggcaccccctgcatcatccaccagcctcgctactcgatgttcgaacgcggcgtggaagaaggactgctggattttctgcagacggaagggattggaagcatagcgttttcaccgctggccggcgggcaacttaccgaccgctatctcaacggcattccggccgactcgcgcgccgccagcagcagtcgttttctgcagccggagcaactgactccagcccgattagaaaaaattcgtcagcttaacaggcaggcggaagcgcgtgggcagaagctgtcgcagatggcgctggcctgggtgttgcgtgaagagaaagtcacctcggtgctgatcggcgccagcaaaaccgcgcaactggatgatgccgtcggcatgctgcagaatcgccatttcaccaccgaggagtgcgcggccattgacgccatccttgcgctgtaa

SEQ ID NO: 137257 - DNA, 1662 bp, Enterobacter cloacae
atgcaaccgacctacactattggggattatctgctggatcgccttgtcgactgcggtattgaccgcttgttcggcgtgccgggagattacaacttacagtttctcgatcgcgtcatcgcgcacagcgccttggggtgggtcggctgcgccaacgagctgaatgcggcatatgccgctgacggctatgcgcgcatcaaaggggccggtgcgctgctgaccacttacggcgtcggcgaattgagcgcgctgaacggcattgcgggtagctatgcggaacatattccggtattgcatattgtcggtgcgccctctaccggcgcccagcagcgcggcgaactgctgcaccataccctcggcgatggcgattttcgccatttcgcccgcatgagcgagcagatcacctgtagccaggcgctgctgaccgccggcaacgcctgccatgaaatcgaccgtgtgctgcgcgatatgttgacgcatcatcgccccggctatttgatgctgccagccgatgtcgccagagcggcagcgattgccccagcccagcgcttgctggtggagcccgctccggcggatgaaaaccagcttgccgggttctgcgaacatgccagccgcctgctgcggggcagccgacgcatttccctgctggcggacttcctggcgcaacgttatggcctgcagaagacgctccgggagtgggtggcgaaaacgcctgtcgcccatgcgacgatgctcatgggcaagggattgtttgatgagcagcagagcgggtttgtcggcacctacagcgggattgccagcgcgccgcagacccgggaggcgattgaaaacgccgacaccatcatctgcattggcacgcgcttcaccgacaccatcaccgcaggatttacccaacatctggcgcgggaaaagactattgagatccagcccttcgccgtcagggtgggcgatcactggttcagcggggtgccgatggataaggccctggccgcgctgatgacgctttccgccccgctggcggcggagtgggctacgcctcaggtcgtggcgccggaggctgaggagggcgctgaaggcgagttgacccagaaaaatttctgggcgacggtgcagggcgccctgcgtccgggggatattattctcgccgatcaggggacggccgcctttggcattgcggcgctgaagctgccctctgaagcatcgctgatcgtccagccgctgtggggctcgattggttttactctcccggccgcctatggcgcacaaaccgcggcggcggagcggcgggtggtgctaattgtcggcgatggcgcggcccaactgaccattcaggagatgggctccatgctgcgtgataagcaaaagccgcttattctgctgctgaataacgaagggtataccgtggaacgggcgattcatggtccagagcagcgctacaatgacatcgctctgtgggactggcagcggctgccggaagccttcgcccctgacgttgcttcgcgctgccggcgggtcactcagacgtctgaactgcgggaggcgatgacggagagcatcacctccgataccctcaccctggtagaagtgatgctgccgaaaatggatatccccgatttcctgcgcgcggtgacgcaggcccttgaggagcgaaacagccgcgtttaa

SEQ ID NO: 137258 - DNA, 1236 bp, Enterobacter cloacae
atgctccatcctcgcgccagaacaatgctgatcctgtcggtgccggccatcctgataggtatcgcctgcagcctgatcctgatcgtggcgatgaaggttgccgcgctgctgcagcgcgtgctgtggagcaatctgcccgcgcagttgggggtgagcgccgacagcccgctgtggatcatcgccatgctgacggcgacaggcatcgcggtgggtctggtcattcgttacagccccgggcacgccgggccggatccagcgaccgagtcgttaatcggcgctcccattgccaccggcgcgctgcccggactcctggccgcgctgatcctcggcctcgccggcggcgtcagcctcggcccggagcatccgattatggtggtgaatatcgcgctggctgtcgccgtcggctcccgactgtttccgcgcgtcagctcgctggactggaccatcctcgcggcctcaggcaccatcggcgccctcttcggtaccccggttgccgccgcgctgattttttcgcaaaccctcaatagcagcaacgatacgccactgtgggatcgcctctttgctcccctcctcgccgccgccgccggcgcgttgacgacgggtctgtttttccatccccatttttcactgccgatcccgcactatggtcagatgcgcttcgttgatattctcagcggcattatcgtcgccctgatcgctatcgccgtcggcatggtggccgtctggtgtctgccgcgactgcatgccctgatgcatcggttgaaaaatccaatcctgaccctcggcatcggcgggctgctgctggggatcgtggggacgataggcgggcccttaacgctatttaaagggctggatgagatgcagcagctggccttcagccagacgctaaccgccgcggattttctgcttatcgcgctggtcaaactggcggccctggttcttgcctcagccagcggctttcgcggcgggcgaattttcccggcggtgttcgtcggggtagcgctggggctgatgctgcatgctcatgttgacgcagtgccggcggcaatcaccgtttcctgcgcgatcctcggcatggtgctggtcgtcactcgcgacggctggttgagcctgtttatggccgccgtggtggtcccggatacgactttgctgccgctgttgtgtatggtgatgctcccggcctggctgctgctggccgggagaccgttgatgattgccaaacggcataccgattaa

SEQ ID NO: 137259 - DNA, 966 bp, Enterobacter cloacae
atgacaaaatttgctttagtaggagatgtcggggggaccaacgcccgcctggcgctatgtgatctggcgagtggagagatctctcgcgcaaagacctattccgggctcgattaccccagtctggaggcagtggtgcgcgtctatctcgaggagcaccaggtaacggtcaacgaaggttgtatcgccatcgcatgcccgattaccggcgactgggtggcgatgaccaaccatacctgggctttctctatcgccgaaatgaagcgcaacctcggctttgcccatctggagataattaacgattttaccgctgtttcaatggccattccgatgctgaaagctgagcaccttattcagtttggcggcagtgcgccggtagcgggcaaaccgatcgccgtttatggcgccgggaccgggctcggcgtggcgcatctggtccacgttgataagcgttgggtcagcctgccgggcgaaggcggtcatgttgattttgccccgaacagcgaagaagaagggatcattctggaagagctacgcgccgagctggggcatgtttccgcagaacgcgtgctctcaggtcccgggctggtcaacctgtatcgcgcgattgtcaaatcggacggccgactgccggagaacctgcagccgcgtgaggtgaccgagcgagcgctggcggacagctgcactgactgtcgtcgggcgctgtcgctgttctgcgtcattatgggacgcttcggcggtaacctggcgctgaccctcgggacgtttggcggggtgtatatcgccggcggcatcgtgccgcgcttcctggagttctttaaagcctctggtttccgcggcggttttgaagacaaaggccgttttaaagcttatgttcaggatatcccggtttacctgatcgtgcatgataacccaggcctgctgggctccggcgcgcatctgcgtcagacgctgggccaggtgctttaa

SEQ ID NO: 137260 - DNA, 738 bp, Enterobacter cloacae
atgaaagttatcattgtggaggatgagtttctggcccagcaggagctctcctggcttattaacacccatagccagatggagatcgtcggcagctttgacgacggcctggacgtgctgaaatttctccagcacaacaaggtcgacgccatctttctcgatatcaatattccgtcgctcgacggggttctgctggcgcaaaacatcagccagtttgcccataaaccttttatcgtctttatcaccgcgtggaaagaacatgcggtggaagcctttgagctggaagcctttgactacatcctgaaaccctaccaggaatcgcgcatcatcaatatgctgcaaaagctgaccaccgcctggcagcagcaaaataacgctgcttcaggattagccagcgcggcgccacgggaaaacgacaccatcaatctgatcaaagatgagcggatcatcgtcaccagtattcatgatatttattatgccgaggcgcatgaaaagatgacattcgtctatacccgccgggagtcattcgtcatgccgatgaacattactgaattctgcagcaaactgcccaccgcgcatttcttccgctgccaccgctcgtattgcgtaaatctcagcaaaattcgggaaattgagccgtggttcaacaacacctatgtgctgcgcctgcgtgacctggagtttcaggttccggtcagtcgcagtaaagtgaaagagtttcgccagctgatgaatctgtag

SEQ ID NO: 137261 - DNA, 1698 bp, Enterobacter cloacae
atgcacgaaatctttactatgatgctggcggtctatgatcgtgcggccctgatgcttatttgcctctttttccttattcgcctgcgcctgttccgcgaactgttgcataagtcggcccatactccgaaagagctgctggcggtgacagccattttctcgctgttcgcgctatttagtacctggtccggcgtcccggttgaggggtccctggtgaacgtccgcattatcgccgtgatgtccggtgggatcctgtttggtccctgggtgggcgcgattgtcggggcgattgccggcgtgcaccgctatttgattgatatcgacggcgtgaccgcagtgccctgctttatcaccagcattgtcgccggcctgctgtcggggttgattaatcgtaaagtggcccgcgaacaacggtggaaaatcggcattctggcggggatgatgtgtgaaactctgaccatgatcctggtggtggtctgggcgccttccctgagtctcggcgtagatattgtttcgaaaattggtatcccgatgatcctcggcagcgtctgcatcggctttatcgtgctgctggtgcagagcgttgaaggggaaaaggaggccagcgcggcgcggcaggcgaaactggcgctcgatatcgccaacaaaaccctgccgctgtttcgacacgttaacagcgattctctgcgccaggtttgcgagattatccgccgcgacattaccgccgacgcggtggcgatcaccaataccgagcacgtgctggcctacgtgggcgtcggtgaagccaactatcaacgccacgacgatataattagccccaccacccggcaggcgattcgttatgggaaaatcatcataaaaaacaatgacgaagcccaccgcaccccggagatccactccttgatggtgatcccgctgtgggaaaaaggggtggtgaccggcacgctaaaaatctattactgccacgcccatcgcatcacttcgacgctgcaggagatggcgattggcctgtcgcaaataatctccacccagctggaagtctcccgcgccgaacagttgcgggagatggccaacaaagcggagctgcgcgccctgcaaagcaaaattaacccgcattttttatttaatgcgctgaacgcgatctcctcctcgattcgccttaatccggacaccgcgcgccagctcatttttaatctgtcgcgctacctgcgctataacatcgaattaaaagacgatgagcagattgatatcaaacgagagctgtatcagatcaaagattatatcgctattgaacaggcgcgattcggcgacaagctgacggtcatctacgatattgacgacgacgtcagctgcgtgatcccgagcctgcttatccagccgctggtggaaaatgccatcgttcacggtattcaaccctgtaaaggcaaaggcgtggtgacgatcggcattaacgagtgcggcaatcgggtacgcatcagcgttcgcgatacgggcaacggtatcgatcccgccgtggtcgcccgcgtggaagccgatgagatgccgggtaacaaaatcggcctgctcaatgtgcatcatcgggtgaaacttctctacggcgagggtttgcatatccgcaatctgacgccgggaaccgaaatcgccttttatgtccccaataactctacgccgcaggcgctgacggagtcgctgttgtcatga

SEQ ID NO: 137262 - DNA, 1275 bp, Enterobacter cloacae
gtggaacttggcgttcagaacgttgtgtttgatgcctgctttggtcagctcgttagataccacttcggatttctcgatggagatggtccccaccagtaccggctggcccttcgcggtacgttcgcgaatatcttcgatgatcgcctgaattttttccgcttcagtcatgtataccaggtccggcatatccttacggatcatcggacggttggtaggtactaccacggtatccagcttatagatggagctgaactcaaacgcttcggtatctgcggtaccggtcatccccgccagcttctcgtacagacggaagtagttctggaaggtgatggatgccagcgtctggttttcgttttgaatatccacgccttctttcgcttccacggcctggtgcaggccatcggaccagcgacgtccctgcatggtacggccggtgtgttcatcgacgatgataacttcgccgtctttaacgatgtagtcaacgtcgcgggtgaacagggcgtgcgcgcgcagtgcagccgttacgtggtgcatcagcatgatgttgctcggggagtacagagactcgccctcttccataatgccttcagccaccagcagctcttcgattttcaccaggccgcgttcggtcaggttgacctgacgcgctttttcatccacggagaagtgaccttcaccctggaaggtatcggagtcttctttctcctgacgcagcaggtgaggaatgattttgtcgactttacggtacatctcggagctgtcttcagccgggccggagatgatcagcggggtacgcgcttcatcgatcagaatggagtcaacctcatccaccagcgcatagtgcagcttacgctggacacgctcttccgggctgaacgccatgttgtcacgcaggtagtcgaagccgtattcgttgttggtgccgtaggtgatatccgcgttatacgcttcacgcttggcaggtgccggcaggccggacatgttaatgcccacggtcatgccgaggaattcgaacagcggacggttgttttcggcgtcgcgctgcgccagatagtcgttgacggtaacaacgtgaacgcccttacccgtcagcgcattcaggtaagccggcagcgttgcagtcagggttttaccttcaccggtacgcatttccgcgatgcagcgctcgttgagcaccatcccgcccagcagctgcacgtcgaagtgacgcatgccgaacacgcgtttactggcctcacgtacaacggcgaaggcttccgggatcaggctctctaa

SEQ ID NO: 137263 - DNA, 516 bp, Enterobacter cloacae
gtggtggagcaagtgagcggaatactgacgcgctggcgacaatttggcagacgttacttctggccgcatctcttattggggatggtcgcggcgagtttcggcttgcctgtgctcagcaacagcgcagacgcggccacgccagcacgttccacgacgaccaaacacgatctcaccacgcgggttaacttcactaatctcgcatggcttgaagccagccgtcgtcccaatttctccgttgattactggcagcaacacgcgattcgcacggttatccgccatctgtcgttcgcgatggcgccgcagacgatgcctgttgcggaagaaacgctgccggtccaggcgcagcatcttgccctgctcgatacgcttaatgcgctgctgacgcaggacaaccagccgccagtgaccgtgaatcagacggcgaaaacggattttgtttcccctgcatccttctctgtttcgacatggattagccaggttcacggcatccgtgccgggcctcaacgcctcagctaa

SEQ ID NO: 137264 - DNA, 918 bp, Enterobacter cloacae
atgatcaaacaaaggacacttaaacgtatcgttcaggcgacgggtgtcggtttacataccggcaagaaagtcacactgacgttacgccctgcgccggccaataccggggtcatctatcgtcgcaccgacttgaatccaccggtagattttccggccgatgccaaatctgtgcgtgatactatgctctgtacttgtctggtgaacgagcatgacgtgcggatttctaccgtagagcacctgaacgccgccctggcgggtctgggtatcgacaacattatggttgaagtcgatgcgccagaaatcccgatcatggacgggagtgctgctccgttcgtttatttgttgctggatgccggcatcgaagaactgaactgcgcgaagaaatttgttcgcattaaagagaccgttcgcgtcgaagatggcgacaaatgggctgaattcaaaccgtacaatggtttctcgttggacttcaccatcgattttaaccatccggcgattgactccagcacccagcgctatgcgatgaacttctctgcggatgcgttcatgcgtcagatcagccgagcacgtaccttcggctttatgcgtgatatcgaatatctgcaatcccgcggcctgtgcctgggcggcagcttcgattgtgccatcgttgttgacgattatcgcgtactgaacgaagacggcctgcgttttgaagatgaatttgttcgtcacaaaatgctggacgcgatcggcgacctcttcatgtgtggtcacaacatcattggtgcctttaccgcgtttaaatccggtcatgcactgaacaacaaactgttgcaggccgtcctggcaaaacaggaagcctgggaatatgtgaccttcgaagacgaagctgaactgccgctggcgttcaaagccccgactatggtcctggcgtaa

SEQ ID NO: 137265 - DNA, 1152 bp, Enterobacter cloacae
atgtttgaacctatggaattaaccaacgacgcggtgattaaagtcatcggcgtcggtggcggcggcggtaacgccgtagagcacatggtgcgcgagcgcatcgaaggtgttgaattcttcgcggtgaacaccgatgcgcaggcactgcgtaaaacggctgttggccagacgattcagatcggtggtggcatcaccaaaggtctgggagcaggggctaacccggaagtgggccgcaacgcggctgaagaagatcgtgaagcgctgcgcgctgcactggacggtgcagacatggtcttcatcgcagcgggtatgggcggcggtacaggtaccggtgcagcacccgttgtggcggaagtcgctaaagatttaggtattctgaccgttgctgtcgtgaccaagcctttcaactttgaaggtaagaagcgtatggctttcgcggagcagggtatcaccgagctgtccaagcacgtggactctctgattaccatcccgaacgacaagctgctgaaagtgctgggtcgcggcatctctctgctggacgcctttggcgcggcaaacgacgtgctgaaaggcgcagttcagggtatcgctgaactgattacccgtcctggcctgatgaacgttgactttgcagacgttcgcaccgtgatgtccgagatgggctacgcgatgatgggctctggcgtggcgagcggtgaagaccgtgcggaagaagccgctgaaatggcgatctcttctccactgctggaagatatcgatctgtctggcgcgcgcggcgtgctggtcaacattaccgctggctttgacctgcgtctggatgagttcgaaaccgtgggtaacaccatccgtgcattcgcctctgacaacgcgaccgtcgttatcggtacgtcccttgacccggaaatgaacgacgaactgcgtgtgaccgttgtggccaccggtatcggtatggacaagcgtcctgagatcaccctggtgactaacaaacagactcagcagccggtgatggatcgttaccagcagcacggtatggcgcctctgactcaggagcaaaaacccgctgcgaaagtggtgaacgacccgactccacaaacggcaaaagagccagattatctggatatcccggcgttcctgcgtaagcaagctgactaa

SEQ ID NO: 137266 - DNA, 1257 bp, Enterobacter cloacae
atgatcaagtcgacggacagaaaattggtagtaggactggagattggcaccgcgaaggttgccgctttggtaggggaagttctgcccgacggtatggtcaatatcattggcgtgggcagctgcccctcccgtggtatggataaaggtggggtaaacgaccttgagtcggtggtgaaatgcgttcagcgcgccatcgaccaggctgaattgatggcagattgccagatttcctctgtctatctggccctttctggtaagcacatcagctgccagaatgaaatcggtatggtgccgatttccgaagaagaagtgacgcaggaagacgttgagaacgttgtccacacggcgaaatccgtgcgtgttcgcgacgagcaccgtgtgctgcatgtgatcccgcaggaatacgcgatcgactaccaggaaggtatcaagaatccggtcggtctgtcgggcgtgcgtatgcaggctaaagtgcacctgatcacatgtcataacgatatggcgaagaacattgtaaaagccgttgaacgttgtggcctgaaagttgaccaacttattttcgccggtcttgccgcgagctattccgtgctgaccgaagacgaacgtgaactgggcgtctgtgtggtcgatattggtggtggtacaatggacatggctgtctataccggcggtgcgttacgccacaccaaagtgatcccgtacgccgggaatgtggtgaccagcgatatcgcttacgcctttggtacgccaccgagcgatgcagaggcgattaaagtgcgccatggttgcgcgctgggctctatcgtcggcaaagacgaaagcgttgaagtgccgagcgtaggcggacgaccgccgcgcagcctgcaacgccagacgctggcagaggtgattgagccgcgttataccgagctgctcaacctggtcaacgaagagattttgcagttacaggaacagcttcgccagcagggtgtgaaacatcatctcgcggcggggattgtattaaccggcggggcagcgcaaattgaaggtcttgcggcctgcgctcagcgcgtgttccatacgcaggtgcgtattggtgcgccgctgaatatcaccggtttaacggattatgctcaggagccgtactattcaacggcggtgggcctgctgcactacgggaaagagtcccatttaagtggtgaggcagaggtggaaaaacgcgtctcggtggggtcgtgggtcaaacgacttaacacctggctgcgaaaagaattttaa

SEQ ID NO: 137267 - DNA, 843 bp, Enterobacter cloacae
atgtctcaggctgcattgaacacgcgcaaccgcgatgacgaagaagaatattcctcttcgcgccggagtaatggaacgcgtcttgcagggatcatcttcctgctcggggtgctgtgcaccgtgtttatcagcggctggatggtgctgggctggatggaagacgcgcagcggttgccgctgtcgaagctggtggtgaccggggagcgacactacacgcgtaacgatgacattcgccagtcgattctggcgcttgggtcgcctggcacctttatgacgcaggacgtcaacattattcagagtcagattgaacgtctgccgtggataaaacaggcgagtgtcagaaagcaatggcctgatgaattgaagattcatctggttgaatatgtgccgattgcgcgttggaatgatcagcatatggttgacgtagacggaaattcgttcagcgtcccgagcgatcgtgtcaacaagcagaatttaccgatgttgtatggcccggaaggcagcgaaaacgaagtattgcagggttttcgtgagatggggcaggtgctggctaagaatcgctttacgttaaaagatgctgcgatgacggcgcgccgttcctggcagttgaccttaacgaatggcattaagctcaatcttggccgcggcgacacaatgaaacgtctggcgcgttttgtagaactttacccggttttacagcagcaggcgcagacggatggcaaacggataagctacgttgatttgcgctatgactcaggcgcagcagtcggttgggagccggctccggtcgaggaacctaatcagcaacaaaatcaggcacaggtacaggcagaacaacaatga

SEQ ID NO: 137268 - DNA, 453 bp, Enterobacter cloacae
gtgatccagacccgcgataccgttcagcgcggacgcgtaaacgatcgggaagtccagctgttcgtcggtcgcatcgaggttaacgaacaggtcgaacacctgatcgacaacccagtccggacgcgcgcccgggcggtcaactttgttgatgaccacgatcggcttcagaccgtgggcaaaagcttttttggtcacgaagcgcgtttgcggcatcgggccatcaaaggcatctaccaccagcagcacagagtcaaccatggacataacacgctcaacttcacctccgaagtcggcgtgccctggggtatcaacgatgttgatacggtaatcattccatttgattgcggtgtttttcgcgaggatggtaatcccacgctctttctccaaatcgttggagtccatcacacgttcttgtgcttcagtacgtgcgtcgaacgtaccggattgctgtag

SEQ ID NO: 137269 - DNA, 1410 bp, Enterobacter cloacae
atgtccgctgaacacgttttgacgatgctgaacgagcacgaagtgaagtttgtcgatctgcgcttcaccgataccaaaggtaaagaacagcacgtcacgattccgtctcatcaggtaaatgccgaattcttcgaagaaggcaaaatgtttgatggctcctcgattggtggctggaaaggtatcaacgaatctgacatggtcctgatgccggacgcgtccaccgcggtcattgacccgttctacgaagaaccgaccctgatcatccgctgcgatatcctcgagccaggcaccctgcagggctatgaccgtgacccgcgctccatcgcgaaacgcgctgaagagtacctgcgcgccaccggcatcgctgataccgtcctgttcgggccagaaccagaattcttcctgttcgacgacatccgctttggcgcctctatctccggctcccatgtcgcgatcgatgacattgaaggtgcgtggaactcctctaccaaatacgaaggcggtaacaaaggtcaccgtccgggtgtgaaagggggttacttcccggttccgccagtagactcttctcaggacatccgttccaccatgtgtatgatcatggaagagatgggtctggttgttgaagcccatcaccatgaagtagcaaccgcaggtcagaacgaagtggcaacccgcttcaataccatgaccaaaaaagcggatgaaattcagatttacaaatacgttgttcacaacgtcgctcaccgctttggtaaaaccgcgacctttatgccgaaaccgatgttcggcgacaacggctccggcatgcactgccatatgtctctggcgaaaaacggtaccaacctgttctccggcgacaaatacgccggtctgtctgagcaggcgctgttctacatcggcggcgtaatcaaacacgctaaagccatcaacgccctggcgaacccgaccaccaactcctacaagcgtctggtcccgggttacgaagcgccggttatgctggcttactctgcccgtaaccgctctgcctctatccgtattccggtggtgacctctccgaaagcgcgtcgtatcgaagtgcgcttcccggacccggctgccaacccgtacctgtgctttgcggcgctgctgatggctggccttgatggtatcaagaacaaaatccatccgggcgaagcaatggataaaaacctgtatgacctgccgccggaagaagcgaaagagatcccgcaggttgccggttctctggaagaagccctgcaggccctggatgctgaccgcgagttcctgaccgctggcggcgtgttcaccaatgacgctatcgatgcctacatcgccctgcgtatggaagagaacgaccgcgtacgcatgactccgcatccggttgagttcgaactgtactacagcgtctaa

SEQ ID NO: 137270 - DNA, 1050 bp, Enterobacter cloacae
atggcaacaggcacactgcccgatgctgggcagatccttaactcccttatcaacagtattttactggtcgatgatgacctggcggtgcactttgccaaccctgcggcgcagcagctgctggcgcagagctcgcgcaaactgtttggcaccccattacctgagctgttgagctatttttcgttgaatatcgggctgatgcaggagagcctgcaggcgggccaggggtttaccgataacgaagtgacgctggttatcgatggccgttcgcacatcctgtcgttgaccgcccagcggctgccggaaggctttattctgctggaaatggcgccgatggataatcagcgccgcctgagccaggagcagctgcagcatgcgcagcaggtcgccgctcgcgacctcgtccgcggcctggcgcatgagataaaaaacccgttaggcggcctgcgcggcgcggcccagctgctcagcaaagcgctgcccgacccggcgctaacggaatataccaaagtgatcattgagcaggccgaccggctaagaaatctggtcgaccgcctgctcggaccacagcatccgggcatgcacgttaccgaaagcatccacaaagtcgccgaacgggtagttaaactggtttccatggagttgccggacaacgtgaagttgatccgcgattacgaccccagcctaccagagctaccccacgacccggatcaaattgaacaggtgttgctgaacatcgtccgtaatgcgctgcaggctctggggccggaagggggcgaaattattcttcgcacccgcaccgctttccagctgacgctgcacggggtgcgttatcgcctcgccgcccgcatcgacgttgaagataatggcccgggtattccgccccatctccaggatacgctgttctatccgatggtcagcggccgcgaaggcggtaccggcctgggcttatctatcgcccgtagccttatcgatcagcactccggcaaaattgaattcaccagctggccgggtcataccgaattttcggtatacctgcctattcggaagtag

SEQ ID NO: 137271 - DNA, 1410 bp, Enterobacter cloacae
atgcaacgagggatagcctggatcgttgatgacgatagctccatccgctgggtgcttgaacgcgcgctcaccggagccggcttgagctgcacaacgttcgaaagcggcaatgaggtgctagatgcccttaccaccaaaaccccggatgtactgctgtcagatatccgtatgccgggaatggatggtttggcgctgctcaaacagattaagcagcgccatccaatgcttccggtcatcataatgaccgcgcattccgatctggacgccgcggtcagcgcttatcagcagggcgcgtttgattatttgcctaaaccttttgatatcgatgaagccgtcgccctcgtcgaccgggcgataagccactatcaagagcagcagcagccgcgaaatgcgccgataagtagcccaactgccgacatcatcggcgaagcgccagctatgcaggatgtctttcgcattattggccgcctgtcgcgctcatccatcagcgtgctgatcaatggcgaatccggtaccggtaaagagcttgtcgcacatgccctgcatcgccatagtccacgctcaaaagcgccgtttatcgcgctgaatatggcggcgatccccaaggacctgattgagtccgagctgttcggccatgaaaaaggagcctttaccggcgcaaataccgtccgtcagggtcgctttgaacaggctgacggcggtacgctgttcctggatgaaattggcgatatgccgcttgatgtccagactcgtctgctgcgcgtgctggcggatggtcagttttatcgcgtgggcggttacgcgccggtcaaggtcgatgtgcggatcatcgccgctacccaccagaacctggaacagcgcgtgcaggaggggaaatttcgtgaagatttgttccaccgcctgaacgtcatccgggtgcatttaccaccgctgcgcgagcgccgggaagatattccacgcctggcccgccattttctgcagatagccgcccgcgagctcggcgttgaagccaaacagctgcatccggaaacggagacagcgctgacccgcctggcgtggccaggcaacgtccgtcagctggaaaacacctgtcgctggctcaccgtcatggccgccggccaggaggtgctgacgcaggatctgccgagcgaactgtttgagaccacgattcctgatagcccaacgcagatgcagcctgacagctgggcgacgctgctgggtcagtgggccgatcgggcgttgcgatccggccatcaaaacctgctctcagaagcgcaacccgaaatggagcgcacgctgctaacgaccgccctgcgccatacccagggacacaaacaggaggctgcgcgcctgctgggatggggacgtaataccctgacgcgtaagctaaaagagttgggtatggagtag

SEQ ID NO: 137272 - DNA, 1374 bp, Enterobacter cloacae
atgtctgagcagataatcgactgggatctggccctgatccagaaatataactattccgggccgcgctatacctcgtatcccaccgcgctggagttttcaccgcaatttggcgcggcggaattcgatgccgctgtggcccgttacccacagcgtcccctgtcgctgtacgtgcatatcccgttttgccataagctgtgttatttctgcggctgcaataagatagtcacccgccagcagcataaggccgatcaatatctcgatgtccttgaacaggagatcatccaccgcgcgccgctgtttgccactcgccaggtgaagcaactgcactgggggggcggcacgccaacttatctcaataaggcgcaaatcagtcgcctgatggatctgttgcgcagccatttccatttcagcccggaagccgagatctccattgaggtcgatccgcgtgagatcgagctggatgtcctcgatcatttacacgctgagggtttcaaccgcctgagtatgggcgtacaggacttcaataaagaggttcagcgtctggttaaccgtgagcaggacgaagcgttcatctttgatttgctcaaccatgcgcgggagattggttttacctcgaccaatatcgacctcatttatggcctgccgaagcaaacgccggagagcttcgcctttaccctgcaaaaggtcgccgagctcaatcctgaccgcctgagcgtgtttaactatgcgcatctgcccacgctctttgccgctcagcggaagattaaagatgccgatctgccctccgctgagcagaagctggagatcctgcaggaaaccatcggctcgctgacgacggcaggctatcagtttatcggcatggaccatttcgcccgtcccgatgatgaattagcggtcgcgcaacgtcacggcgtactgcatcgtaatttccagggctacaccactcagggcgataccgatctgctggggatgggcgtttcggcgatcagcatgattggcgacagctacgcccagaaccaaaaagagctcaagcagtactaccagcaggtagcagagcaagggaacgccctgtggcgcgggatcgcgttaactcgcgatgactgtctgcgtcgcgacgtgattaaagcgttgatctgtaacttccagctggatatcgcggcggtcgaggcgcagtgggatgtggattttgcgtcttatttcgccgaggatctgaagctgctggcgccgctggcgcatgacgggctggtggctgtggatgataaggtcattcaggtgacggcgaaaggccgcctgctgatccgcaacatctgtatgtgctttgatgcctacctacggcaaaaggcccgaatgcagcagttctcacgggttatttaa

SEQ ID NO: 137273 - DNA, 507 bp, Enterobacter cloacae
atgaaaaaaccgacatccgccacccgtggcaaatccggccgcaagtcgcgtgaagagttaaatcaggaagctcgcgatcgcaaacggcagaagaaacatcgtggccacgcggcaggcagtcgcgcgaacggcggcgatgcggcttcagcgggtaaaaaacagcgtcaggcgcaagatccgcgcgtgggtagcaaaaaaccgatcccgctgggcgtgagcgaaagcagcgctccagcccccaagcagcataaaccaaagagcgagaaacctatgctttcaccgcaggctgagctggagttgctggagaatgatgagcgcctggacgcgctgctggaacgtctggaagagggcggcaccctgaatgctgaagagcagagctgggtggacgccaaactggatcgcattgatgagctgatgcagcagctcggcctctcttacgatgatgaagatgaagaagaggaagagcgtcaggaagatatgatgcgtctgctgaagggtggaaactaa

SEQ ID NO: 137274 - DNA, 633 bp, Enterobacter cloacae
ttgaccaactggaattatcaactgacgcactttgtcactagcgcgccagatatccgccatcttcctgccgataccggtattgaagtggcgttcgccggccgctccaacgcgggaaaatccagcgcgctgaatacgctgactaatcagaagaacctggcgcgtacctccaaaaccccggggcgtacgcagctgattaacctgttcgaagtcgctgagggcaagcgccttgtcgacctgcccggctatggttatgcgcaagtacccgaagagatgaagatcaagtggcagcgcgcgctgggggaatacctggaaaaacgtctgtgcctgaagggtctcgtggtgctgatggacatacgtcatccgcttaaagatctcgatcagcagatgatcgaatgggcggtagagagcgatattcaggtgctggtactgctcaccaaagccgataagctcgccagcggcgcgcgtaaagcgcaagtgaatatggtgcgtgaagcggtactggccttcaatggcgatgtccaggttgaacccttctcttcgctgaaaaaatctggcgtcgataagctgcgacagaagctggatagctggtttaacgaaatcccgccgcaagaagccgtcgaagacgccgagtaa

SEQ ID NO: 137275 - DNA, 2793 bp, Enterobacter cloacae
atggttcagatcccagaaaaccctctcatcctcgttgacggctcctcctatctttatcgggcgtatcatgcgtttccgccgctgactaacagcgcaggggagcccaccggggctatgtacggcgtactgaatatgctgcgcagtttgatactgcagtatcaaccgactcatgccgtcgtggtctttgatgcgaaagggaaaaccttccgtgatgaattgttcgagcattacaaatctcaccgcccgccgatgccggacgatctgcgcgcgcagattgagccgttgcataagatggtgaaagcgatggggctgccgctgatggcagtcccgggcgtcgaagctgacgatgtgattggcaccctggcgcgggaagcggaaagggcaggtcgcccagtcctgatcagcaccggcgataaagacatggcccagctggtgacgccgggcatcaccctgatcaataccatgaccaacactatcctcggaccggatgaggtggttactaagtacggcgtcccgccggagctgattattgatttcctggcgctgatgggcgactcctcggataacattcccggcgtgccgggcgtgggcgaaaagaccgcccaggcgctgctgcaaggcctcggcggccttgatacgctgtatgcggaaccggagaagatcgctgaactgagcttccgcggcgcgaaaacgatggcggcgaagctcgagcagaacaaggacgtggcttatctctcttatcagctggcgaccatcaaaaccgacgtcgagctggagctcacctgcgaagagctggaggtgcagccgccggcggcagacgatctgctggcgctgttcagacagtatgaatttaagcgctggaccaccgacgttgaggccggaaaatggctgcaggctaaggggggcaaaccggctgcgaaacctgcagcgcctgcagcagcggcagaagcggaagaagaggttgaagccgctactgcactttcagcagagcattatgtcactatccttgatgaggctacgctgctcacctggatcgataagctgaagcaggcgccgctctttgcctttgatacggaaaccgacagcctggataacatctccgccaacatggttggtctttcattcgctgttgagccgggcgtagccgcctatgtcccggtagcgcatgattatcttgatgcgccggatcagatcccgcgcgagcgcgtgctggcgctgcttaaaccgctgctggaggatgagaaggtgctcaaggtcgggcaaaatctcaaatacgatcgcggcattttggctaattacgacattgagctgcgcgggattgcgttcgataccatgctcgagtcttacattctcgacagcgtggcgggccgccacgatatggacagtctttccgaccgctggctgaaacataaaaccattaccttcgaagagatcgctggcaagggtaagaatcagctcacctttaaccagattgcgctggaagaggctggtcgctacgcggcggaagatgccgacgttacgctccagctgcatctgaagatgtggccgaagctacagcagcatgaaggcccgctgaatatcttccagcatattgaaatgccgctggtgccggtgctgtctcgcgttgagcgcaacggcgttaaaatcgaccccgccgtgctgcatgcgcactcgcaggaaattgcccagcgcctggttgagctggagcagcgagcacatgagatcgccggggaagcgtttaatctctcctccaccaaacagctgcaaacgatcctgtttgaaaaacagggtatcaagccgctgaagaagacgccgggcggtgcgccgtccacctctgaagaggtgctggaagagctggcgctcgattatccgttgccgaaagtgattctggagtatcgtgggctggcgaagctgaagtcgacctataccgataagctgccgctgatgattaaccccaaaacgggccgcgtgcatacctcctatcatcaggcggtcaccgccaccggccgtttgtcgtctaccgatccaaacctgcaaaacattccggtgcgtaacgaagaagggcgccgtattcgccaggcgtttatcgcgccggaagattacgtcattgtctcggcggactactcgcaaatcgagctgcgcattatggcgcacctgtcgcgggataaaggcctgctgaccgccttcgcggaagggaaggatattcaccgggcgacggcggctgaagtatttggcttaccgctggacagcgtcagcagcgaacagcggcgcagtgcgaaagccatcaacttcggtctgatctacggcatgagcgcctttggcctggcccgccagctgaacatcccgcgtaaagaagcgcagaagtacatggatctttatttcgagcgttatccgggcgtcctggagtatatggagcgcacccgcgcacaggcgaaggagcaagggtatgttgaaacgctggatggccgtcgactctatttgccggatatcaagtccagcaatggcgctcgtcgtgccggcgcggagcgtgcggcgattaacgccccgatgcaggggacggctgcggatattatcaagcgggcgatgattgccgttgatgaatggctgcggagcgagaaacctcgcgtgcggatgatcatgcaggttcacgatgaactggtctttgaagtgcataaggatgagctcgatgccgtatcgaaaaagatccacgaactgatggagaatagcactacgctggcggtaccgttgctggtggaagtgggcagcggcgaaaactgggatcaagcgcactaa

SEQ ID NO: 137276 - DNA, 900 bp, Enterobacter cloacae
atgtcgagattactcgctgcgataacacttccgctgagtatcgccttaaccatcttagtcaccattatctgctctgtaccgatcatcgtcgccgggctgattaaactgctggtccccattccagcggtatggcgctctatatccgttttttgcaattttatgatgtactgctggtgcgaagggctggcgctgctgttgcatctcaatccctggctaaaatgggacgtccagggtctggaaggcctgaacaaaaagaactggtatctgctgatcagcaaccaccacagctgggcagacatcgtggtgctgtgcgtgctgttccgcaagcatattccgatgaataagtacttccttaaacaacagctggcgtgggtacccttcattggcctcgcctgctgggcgctggatatgccttttatgcgccgctactcgcgcagctatcttattcgtcacccggagcgccgcggtaaagatgtcgaaaccacccgccgttcgtgtgaaaaatttcgcgcgcatccgacgactatcgtcaattttgtggaaggctcgcgttttaccgaagaaaaaaggcgcgaaacgcgctctccttaccacaacctgttaccgccgaaagccgctggtatcgccatggcgctcaacgtactcggttcgcagttcgataaactgctgaacgtcacgctgtgctacccggataatcatacaagaccattttacgatatgttaagcggccgcctgacgcgcatcgtggtccgtatcaatctggtccctattggcgaagagctgcacggcgattacgttaacgataagaactttaagcgcggcttccagcgctggctgaatggcctatgggaagagaaagaccgtcagttgactgacatcatgagggacaaagaacggtag

SEQ ID NO: 137277 - DNA, 624 bp, Enterobacter cloacae
atgaaaaaagtttggctggcgctggctggtatgattctggcttttagtgcatccgctgcccagatcaccgacggcaagcagtacatcacccttgataagccgattgctggcgagccgcaggtgctcgagttcttttcgttctactgcccgcactgctaccagtttgaagaagtgctgcatgtctctgacaatgtgcgccagaaactgccggaaggcactaaaatgaccaaataccacgttgagttcctgggtccgctgggcaaggatctgacgcaggcatgggcggtggccatcgcgctgggcgttgaagacaaaattactgcgccgatgttcgaagccgtgcagaaaaaccagactgtgcagagtgtggctgacattcgtaaagtgtttgtcgacgctggcgtgaaaggggaagactacgatgccgcatggaatagcttcgtggtgaaatctctggtcgctcagcaagagaaagcggcagccgatctgcagctgcagggcgtaccggctatgtatgttaatggtaaataccagctgaatccgcaggggatggacaccagcaatatggatgtcttcgtcgctcagtatgcggataccgtgaagcaactggtagagaagaaataa

SEQ ID NO: 137278 - DNA, 987 bp, Enterobacter cloacae
atgcacgataaggcttttacttttcagacgcttcgcccggataccattatcgatgggttattcgatctgggtatgcgggtggactccggtctcaccccgctaaacagctatgagaaccgcgtttatcagttccaggacgaagagcgccatcgctatgtggtaaagttctatcgtcctgagcgctggtccgcagaacagatccttgaagaacaccagtttgcgcatcagcttgtagaagatgaagtgcccgttgctgcgccgctcttatttaatgacagcacgcttcatcagcatcagggattctactttgccgttttcccaagccttggcggtcgtcagttcgaagcggataaccttgatcagatggaatgggttggccgctatctggggcgcctgcaccagacgggctgcaaacagcgctttactgcccgcccggaaattggcgtgcaggagtacctgctggaaccgcgtcaggtgtttgagcaggcgacgctgatcccctctggcctgaaggccgatttcctgaaggcgaccgataaactcattgctgccgtcatggagcaatggcacggccgcgggaacacgttgcgcctgcacggtgactgccatgccggtaatatcctctggcgcgacggaccactgtttgtcgacttagacgatgcgcgtaccggcccggcgattcaggatctgtggatgctgctcaacggcgataaggctgaacagcgtatgcagctggagactattgtcgaggcctatgaggaattcagcccctttaacagcgatgaaatcgcgctgattgaacctttacgcgctatgcgactggtttattatctggcgtggttgctcagacgctgggacgatcccgctttcccggtcaatttcccctggttaaccggggaggattactggcgggggcagacgtcgacttttcttgagcaggtgaaggttctacaggaacccccgcttcagttaacgccaatgtattaa

SEQ ID NO: 137279 - DNA, 270 bp, Enterobacter cloacae
atgaaatgtaaacgtctgaatgaagtaattgaactcctccagccagcctggcaaaaagagcctgaactgaacctgatgcaatttttgcagaagctggcgaaagaggccggctatgatggcgaactgagcgatctttccgacgatattctgatctatcacctgaagatgcgcgactcttccaaagatgctgtcatcccgggtattcagaaggattatgaagaggactttaaaaccgcgctgctgcgcgcccgcggggtaataaaagagtaa

SEQ ID NO: 137280 - DNA, 582 bp, Enterobacter cloacae
atgcaaagcgaggcgataaccggcgtcgtgctggcgggcggcagggccacgcggatgggcggcattgataaaggattacaggcgctaaatggtcgccctctctggcgacacgtcgcggaagcattagccccgcaggtagatgagttagtcattagcgccaatcgtcatcttgaacagtggcgtgccagcggatttccggtctttcgagacatacaggagggttatcagggaccgctggccggaatgcttgctgtgatgcagcaggtcgcgagcccatggtttgttttttgcccctgcgacacgccgttcattccgtcctttttggtggagcgctttatccagcagagaggggacgcaccggtcgtttgggcccatgacggcgaacgggatcatcctgccgttgcattagttcatcgtcaaatcattcctgaactggaggcttatctggcacatggagagcgcagggtgatggtttttatgcgacaaatgggtgggcgcccggtgaatttcagcgatgtgaaaactgctttcattaatgtaaatacgctcgaagatttgcagcagatgcaggagccatcatga

SEQ ID NO: 137281 - DNA, 507 bp, Enterobacter cloacae
atgatcccattactggcgatcgccgcatggagcggtaccggaaaaacaacattattaaagcgtcttatccctgagctttgcgctctaggattacgcccgggactgataaagcacacccatcatgatatggacgtggataagccgggcaaagatagctatgaactgcgtaaggcgggcgctgcgcaaactattgtcgccagcgaacagcggtgggcattgatgaccgagacgccagagaagccggaattagatctcacgtggctggtcagtcgaatggatgccagcaaactggacctggttttagtggaggggttcaaacatgaacccgtgccgaagatcctgctttttcggcaaaacagcggccatcgtgtagaagagctggtaattgatgagcataccatcgccgtggccagcgatgtatcgatcgcgacctcacttccgctgctggatttaaatgatgtaccacagatcgcgacatttattgtgagttggttagagaggcaatag

SEQ ID NO: 137282 - DNA, 543 bp, Enterobacter cloacae
ttgcagggtgccttccaggtcaacgtttggcgcaggaacgcgatccacaatcgtctggtacagcggagtcatgtcttccgccatgtcttcgtgatccagaccggcgataccgttcagcgcagacgcataaacgatagggaagtccagctgttcgtcggtcgcgtcgaggttaacgaacaggtcgaagacctggtcaacaacccagtcaggacgcgcgccaggacggtcaaccttgttgatcacaacgataggtttcaggccgtgggcaaatgcttttttggtcacgaagcgcgtttgcggcatagggccatcaaatgcgtcaaccaccagcagcacggaatccaccatggacatcacgcgctcaacttcaccaccgaagtcggcgtgccctggggtatcaacgatgttgatacggtagtcattccatttgatagcggtgtttttggcgaggatggtaatcccacgctctttctccaaatcgttggagtccatcacacgctcttgagtttcggcacgagcatcaaacgtaccggactgctgtag

SEQ ID NO: 137283 - DNA, 168 bp, Enterobacter cloacae
atggctaaaggtattcgtgagaaaatcaagctggtttcttccgctggtactggtcacttctacaccaccacgaagaacaaacgtaccaaaccggaaaaaatggaactgaaaaagtacgatccggttgtacgtcagcacgttatctacaaagaagctaaaattaaataa

SEQ ID NO: 137284 - DNA, 810 bp, Enterobacter cloacae
atgcctgaattaccagaggttgaaaccagccgtcgcggcatcgagccgcacctggttggcgcaaccattctgcacgccgtcgtgcgcaacggacggctgcgctggccggtttccgaagagatctatcgcctgagcgacgttccggttctcagcgtgcgtcgccgcgccaaatacctgcttctggagctgccggacggctggatcatcgtccatcttgggatgtcggggagcctgcgcatcctgagcgaagagctgcctgctgaaaaacacgatcacgttgacctggtcatgagtaacggcaaggtgttgcgctacaccgatccacgccgctttggcgcctggttgtggaccagaacgctggaaggccatccggtactggcccatcttggcccggagccgctcagcgacgcgttcaacgccgactatctccagcaaaaatgcgcgaagaagaaaaccgcgatcaaaccctggctgatggataacaagctggtggtgggcgtggggaatatctacgccagtgaatcgctgttctccgccgggatccatcctgaccggctggcgtcctcgctgtcgcgggaagagtgtgagcagctggtgaaggtgattaagctggtcctgctgcgttcgatagagcagggcggcaccacgttaaaggatttcctgcaaagcgatggcaagccgggctatttcgcccaggagctacaggtctatggccgcaagggcgaaccctgccggatctgcggcacgccggtcgtcgggaccaaacatgcccagcgggcgaccttttattgccgccagtgtcagaaatag

SEQ ID NO: 137285 - DNA, 480 bp, Enterobacter cloacae
atgagcacaaaagcgatctatccgggtaccttcgaccccatcaccaacggtcatatcgatattgtcacccgcgcggcaagtatgttcgataaagtggtgctggctatcgccgccagcccgagtaaaaagccgatgttcagccttgatgagcgcattgcgctggcagagcaggcgacggcccacctggtgaacgtggaggttatcggcttcagtgatttgatggccaatttcgcgcgcgcgcagcaggccaatatcctgatccgcggcctgcgggcggtggcggatttcgagtatgagatgcagctggctcatatgaaccgccacctgatgcccacccttgagagcgtgttccttatgccgtgcaaagagtggtcgtttatctcttcctcactggtgaaggaagtggcgcgccaccagggcgacgtttctcactttctgccagctaatgtgcatcaggcgctgttgaataagctgaagtaa

SEQ ID NO: 137286 - DNA, 777 bp, Enterobacter cloacae
atgtcgaaccggctttccgtggtgatgatcgctaaaaacgccgccgacctgctgccggattgtctgggctccgttagctgggcggatgaagttatcgtcctcgactccggcagcaccgacaacaccgttgagctggcccgccgcctcggcgcccaggtctatacccataccgactggcgaggctatggcattcagcgccagcgcgcgcaggattacgccaccggcgactgggtgttgatgatcgataccgatgagcgcgtcacgccagaactcaggcaggctattcttaaggtactggacgctccccagcgcggcgccatctacagcatcgcccgccgtaactattttctcggacgctttatgcgccacagcggttggtatcccgatcgcgtcctgcgcctgtacgaacgcgcccgttaccgctataacgataatctggtccatgaatcgctggatagcctgggcgccgaggttattccgctgaccggcgatctcctgcacctgacctgccgcgacttcgctggcttccagcaaaaacagctggcgtatgccgccgcgtgggcgcttgagcgtcaccagaaaggcaagaagacctcgatggcagggattttcagccatacgctgggcgcgttcctcaagacgttgctattgcgcggtggggtgctggacggtaaacagggatggttactggcgatggtcaacgcgcagtatacgtttacgaaatataccgagctgtgggcgctgagccacggctactcggagaaagagtcatcatga

SEQ ID NO: 137287 - DNA, 1275 bp, Enterobacter cloacae
ttggaattgctttataccaccctactttaccttattcagccgctggtgtggctgcggctgctgctgcgcagtcgtaaggctcctgcctatcgcaaacgctgggcggaacgctatggcttctgtcagaacaaggtagagccggatggcattctgctgcactccgtttccgtcggcgagaccttagccgccattccgctggtccgcgccctgcgccaccgctacccttctctgccgatcaccgtcaccaccatgacgccgaccggctccgagcgcgccatgtcggcgtttggcaaagatgttcatcacgtctatctgccctacgatctgcccggcgccatgaaccgcttcctgaacaccgttcagccgaagctggtgatcgttatggagaccgagctgtggccgaatatggtggccgcgctgcataagcgtaagatcccgctggtgatcgccaacgcgcgcctgtccgaacgttccgccaaaggctatgccaaactgggcggctttatgcgccgcctgttgagccgcattacgcttatcgccgcgcagaatgaagaagatggtaaccgcttcctctctctggggctgaagcgcaaccagctggcggtcaccggcagcctgaaattcgatatctccgtaacgccagagctggcggcccgggcggtgacgctgcgtcggcaatgggcaccgcaccgcaaggtctggattgccaccagcacccacgacggtgaagaacaaatcatcctccaggcgcataaaaaactgctggagagtttcccgaacctgctgctgatccttgttccccgccatccggagcgcttccctgacgcccgtgagatggtacaaaaggctgggatgagctttactctgcgcagcaccggcgagatcccctcctccagtacccaggtagtcattggcgataccatgggcgagctgatgctgctctacggcattgccgacctcgccttcgtcggcggcagcctggtggagcgcggcggccataacccgctagagccggcggcgcacgccattccggtgctgatgggcccgcataccttcaacttcaaagatatctgcgccaagctgcagcaggacgatggcctgatcaccgttaccgatgccgattcgctggtcagggaggtgtccacgctcctgaccgatgaagattaccgtctgtggtatggccgtcacgcggtggaagtgctgcaccagaaccagggcgcgctgtcgcgtctgctacagttactgcaaccttatctgccgcagcggagtcattaa

SEQ ID NO: 137288 - DNA, 153 bp, Enterobacter cloacae
atgaaagatgagtccaaaaagcatgttattattaacgaattcttcgaccgcggtatctggcggttaatctggaaaaacgcctgtactttccgtttacgctggcgcctgggacgccgttatctgcgtattaagcgttatcgccacgcgggatag

SEQ ID NO: 137289 - DNA, 855 bp, Enterobacter cloacae
  misc_feature (812)..(821): n is a, c, g, or t
atgagtcaaacgcctttattgagcatcgtggctgccgtctacaacggtgagaaatttctagcgcaattctttgagtgcattgaacagcagcagctggacagctatgaactgatcctggtgaacgatggttcgacagacaacagcctggcggtgatcgccgaatggcaggagcggctgcagaacgtccaggtgctggagcaggaaaaccagggcgtctcggtcgcgcgcaataccggcctcgccgccgccagcggcaaatatctcgcgtttccggatatcgacgacaaactctatccgggcatgtatcgcacgctgctggagatggccgagaaagaacatctcgatatcgccacctgcaacggcacctatgtgtacgaaaagcgccgcgagagccacccgatcttcccactggatcgcctgccctcgacggatgtgctgccgggccatgtctggcttaagcaggccctggactcgcggaagtttctgcacgtcacctggcttaatatttatcgtcacgactttatccgccagcatcacttccatttcgagcctggcctgcgccatcaggatatcccatggaccacagaagccctgctggccgcggagcgcgtgcagtacaccagtcagcagttctatgattactacattcactctgagtcggtgtcgcataagccggacaacgacgacacgctgatgcgttcggcgcgccactatatgaagattctggagatgctggaggcgattaaccagcgctacccggataaagtgcgccatatcgccgcctgtcgctggcagatcgccaaagaaggccnnnnnnnnnnggcctggggatcatccataccttcgatagcatga

SEQ ID NO: 137290 - DNA, 1095 bp, Enterobacter cloacae
atgcgcatcttatttgtgattgacggtttacccggcggcggcgcggaaaaagtggttctgaccctggcggcacagttcctgcgcgacggcgatcgggtgtcgctcatttcgctgcgcgatgtctgcgagtacccattgcccgaggggctcgactaccaggtagttgccgatcgctgccgtaaaccgtggcgcaagctgaccgagctgtcccgccgcgcccgccagctggacgccgcagtcgtgcgggccgaacagcaggggcaatttgaccttgtgctctccaacctgcacaaaaccgaccgcatcgtcgcccgcagccgggcgctgcgcgagcgtaacgtctggttctgtctgcacggcgtcttttcggcctcctatctcgggcaccgtaccggctttgaccgctggatgaagcagcagaaaattaagcgaatttatcagggtcgcaacgtggtgacggtttccgacgcggtggggcgagatctggtggaagagtttgccctgcgcccggcacagctgaaaaccatctacaatcccttcgatatcactgccctgcgcgccgaggcggaagccgatagcgagcgcccggacggtgactacctgattcacgtcggtcgcttccatccgggcaaacgccatgaccgcctgcttgaagcctatgcgcagagcggcatcgacgcaccgctggtgctgctaggccagggaaaaccggagcaagagcagcgcctgcgccagctggcaaaaacgctgcacattgacgatcgggtgtggttcaaaggctttcagaaaaaccccttaccgtggatcaaaggcgcacggatgctggttttgagctccgatagcgaaggattcggcaatgtggtggtggaggcgctgctgttacatactcctgtcgctagcacccgctgccccggcggcgtcaccgagatcctcaccggcgaacttgcccgcggtctggcggatctgaccagtccggcgctggctcagacgatgcaaagcatttaccataacccgccggccatcgacgatgccgcgctggaaaaattcagcgtcgtatccatttgtcagcagtaccgtcagctgcagcgcacctga

SEQ ID NO: 137291 - DNA, 1128 bp, Enterobacter cloacae
atgagtaaattcaggctgactctggtgcggcagaagtaccgcccggacggcggcgcagaacggtttgtctcccgcgcgctggaagccctcgacagcagtcatctgcaactgaacgtcatcacccgcgaatggcaggggccggtgaaaccggactggcagatccatatctgtaacccacgtaaatgggggcgcatcagccgcgagcgcggctttgccaacgccgcgcgcgcgctctggcagcgcgagtccttcgacctggtgcagagccatgaacgtattcccggctgcgatctctaccgcgctggcgatggcgttcatcgccgctggctgcagcagcgctcgcgcattttaccggcctggaaaagccgcctgctgttcgccgaccgttaccaccgctacgtcatgcaggcggaacgcgagatgtatgaagactcacacctgcgcggggtgatctgcaacgccgagatgatcaagcgcgagattatcgaagactttggcctgccggcggagaagatccacgttatttacaacgccattgacaaccagcgcttcctgccgccggacgaagagacctttgccgccttacgcgccaaatggcagctgccgctgcaggcgacctgcttgatctacgtcggctccggctttgaacgtaaagggctggcggcggcgatccgcgccatcgcccccaccgatcgctacctgctggtggtcggcaaagataaggatcagcctcgctatcaggcgctggcgaagagcctgaactgtgaagcgcgggtgcgcttcttcggcatgcagtcggagacattgcccttctatcaaatggccgatggtctgctgctgccgaccctctacgatccgttccccaacgtcatcctcgaggcaatggcctgcggtctgccggtgatcaccactaccggctgcggcggggcggagtttatcgtcgacggccacaatggttacgtctgcgacgctctggatatcccggcgctgcagcaggcggtgatggccctgcccgcgcgcgcgctgggctccgcggaaggcggtcacgcccgcgagcgcattatggcctgcaccagcgagcgactctcaacccagctgctttctctttatcaggatctggtgaaataa

SEQ ID NO: 137292 - DNA, 1077 bp, Enterobacter cloacae
atgacgcctgaaaccctctcccgcggcccgttgaacccggcgcggatcctggtcattaagctgcgccatcatggcgacatgctgctgatcaccccgcttattcacgcgctgaaacagcagtaccccgccgccagcgtggatgtcctgctgtatgaagagacccgggatatgctcgcagccaaccccgatatccaccatatttatggtctcgatcgccgctggaaaaagcagggaaaaaggtatcagctgaagatgcaatggcagctcattcagacgctgcgccagcagcggtacgatatggtgcttaacctggccgaccagtggccgagcgcggttatcagcaaactgaccggcgccgcgacgcggattggttttgattttccgaagcgccgccacccggtctggcgctattgccacaccgcgctggcctccaccaaacagcacaaccagctgcatacggtacagcagaatctctctattctcgctccgctcggtctccagttgaacgatgcgccggcgcggatgggctacagcgaagcagactgggccgccagccgcgccctgctgccggaggacttccgggaacactacatcgtcatccagccgacgtcgcgctggttctttaaatgctggcgcgaagatcggatgagcgccctgatcaacgcgctgtccgccgaaggatacgcggtggtgctcacctccggccccgatgcaagagagaagaagatggtggataccatcatcgccggctgcccgcaggcgcgactacactctttagccggccagttaacgctgcgccagctggcggcggtgatcgatcatgcccggttgtttatcggcgtcgactcggtgccgatgcatatggctgcagcccttggcactccgctggtcgccctgttcggcccctcgaagctgaccttctggcgtccgtggcaggcgaaaggcgaggtgatctgggccggcgacttcggtccgctgcccgatccggacgctatcaacaccaacaccgacgaacgttatcttgatttaattcctaccgacgccgtgatcgcggcggcgaaaaaggtactggcatga

SEQ ID NO: 137293 - DNA, 735 bp, Enterobacter cloacae
atgcatctgcatgcgtggaacagcccgccgaccgagccgctgaccgcagatgactggcgccataagccttatcttattgaatacagcgacgctatgatgcgtgagaaggtcgactatatgacgcgtctgctggaggataccttccagaccaaaatggttagccatcgcgccgggcgctgggcctttgacgagcgctatgcgcgtctgctggtggagtacgggtatcaggtggattgctcggtgaccccgcgggtgaactggaagaccgccaagggggcgccgcagggcgatggcgggaccgattatcgccgctttccgcagcatgcctatttcctcgatgaaaatgacatcagccgcgagggtcactcgccgctgctggaagtgccgatgagcatccagtacaagcactcagcgtggatgaacagcgtgaagcagggctacgaccgcctgcgcggcaaagtgcgatccccctccgtacactggctgcgaccgatgggcggcaatgtggagacgatgaaaaaagtcgtcgaacaaacgttgacgcagggcaatgactacgtggaatatatgctccactcttcagagtatatgcccggcggcagccccacgttccagaatgaacgggatattgagcgtttatacgctgacctcgaagccttttttagctggctggcgccgcaggtgaagggcatgacgttggcagaatattaccagcggaaaattacacagcgctaa

SEQ ID NO: 137294 - DNA, 1080 bp, Enterobacter cloacae
atgcgtatccttaaacaattaacgcggaaaaagaatgcctttttccgcggcattaaatttaatttaattaactatcgatacagaaataagccggcgcgtaaagccttcgacccagcggctgtgcgccgcgtgctgctattgcgtctggatgataaagtcggtgatatggtggtcacgaccggctgcgccagaatactggccgaacggggatatcaggtttcggtgttaaccggaccaatatgcagcgaaatattagcaggctcagaattcattcagcaagtatatttatatcggccccgcatgtccttaaatacgttgcgggcggcgggttttgatgcggttatcgattttgatgacgtgaccagctatgaacgctttaaattactcgccgatttacgggcgaccagcgtgattggttttaataaagagccctataaactttacgatcactcaatcgctttttttgacggcaacagccatatttccctgcgctataagcaggtggtgaagctgtttggcatcgttgacgaccgcccgtatcactatcatctccccggctgccgccatgagcgggagaaagtggcccgcttgctttctcaggccggagaggtcgaactgcgtatcgccattaacccttttaccgcctccgaggataaagacttctgtcgtcaccaggtggcgaccctggtcgagcggctacatgctctgccttaccgggtctgtatcgtgatggtggggcgcagtgaaaaaatccgccagctggggctggatatggcgctgtacatcgccgacagcaccatcaactccgccgtagaagtgatccgcagctgtgatttagtcattacgccggacacctcgatcgtgcatattgcccgggctttcgataagccgatggtggcggtctataacaaacgcaaactcaagaataccgggctgcccggctatcacatctgggcgccgggctatgacaaggcgaagcagatagtctgtgaagaagcgaatgtcgccgatgtggcgattgagtcggtgtggcccgtgattaaagagcaggccgaccggctggtcgccgcccgcagttga

SEQ ID NO: 137295 - DNA, 1170 bp, Enterobacter cloacae
atgagtactttaaaagtgagtaacttcgccagacagggttactcgattgtctttcctttgtttttatttttcagcgcgattttttgcatgtccacccggaccaataatctgctgcatttatcgatcctgctgctattgctgtcgctggtacgccaggaaaaccgccaggcgctggccggggtgttacgcgagcagtggcagacctggacgctgctggcggctttctttatctattacgccctcagtaatgtgtggggccatacgccgcagcatattgactcgccgatcacccacggcgtgtatctgaccgggtatctgttgctgatgacgatgctgctcagggacggacgaacccgccgactggcgatgctggcggtggtcggcgggatcaccgtgctctccctgtggacgctgattatcgaccatacgctggttctcaccgaacgagcggtctcccccgagaaccccggaccaacgaacgttatcgaccttgccggttactgcggcatcggcattttaatctgcggcatgctactgaaagaaaaagccagccactggctctatctgccggtggtcatcatgctggtgatgctgctgctcacccaaagccgcgggccgatcatcgccctggtgctggcggtcggctgtacgctgcacctgcacgtcttcacccgccgcaacctgctgatcgccgcggcgctggccgtgctggtagcgctgcttttggtcatgacgccggtgggcgacatgctgctcgcccgtttcgaggagctgggcacccaaagcgggctgcgcctgagcatctggcaccatacgctgtcggagatggccagccagccgtggctggggcgcggtttcagctatgaactggatttcatcaactacagcggcgagcacatcaccaccacccacagtgtgtatatgggcgccttgctgaaaggcggcatcgtggggttactgctgctgttggcgatcattgcctgcgggctatggcaggcgtggcgcaagcgccataccgacagccgctacagtctggcgatcctgttttacgcgctggtgtttatggcctcgcaggggatgtttatcatcagcaatccccgggaaacctgggtgctgttctggctgccgctgggcattgcgctcagcaaagggttggcggaaaaacgctaa

SEQ ID NO: 137296 - DNA, 909 bp, Enterobacter cloacae
atgggatccctgtttaagcagatctaccgctatacgcgccctcgcgcgtatcgccacaatgaaaatctgtggccttttacccgtattacgcgcgcgccaagcggcgaaatcagcgcgttacgctataaagggaaaacggtgccgctggtcagcctgagcgcgctgaaaaacagtatgcagggcgaagtcctgctgaccgccaccggcccctcaacccgcaatatcgatttttctctgttgtcgaaaacgatcccggtgatgggcgtcaatggcgcctggcatcttgccgaccggctgcacttttcactctataccatcgtcgacatggaatttttcgataagaagccggacattatccgcgccattgtcagccagccggatattttgctgttcaccaccatgcacgggatcgccaaaatcgtcgatcgctatggggacgcgctgcgctgccgtttggcgttgattgaggacggttgctataagatttaccagccgaaagtcgccagcgaagcgataaagcgcacttaccagcagaatgcggcgatgtgctttcatcctcagcgcccggatatctgttttagcaccgatattcgccagggcatctttgatgccggcacggtggtctactgggcgctgcaaattctcgcctggctgggcttcaatactatcctggtgagcggcctggatatgaccaactttaaccagccgcgattctacgaaacacaacaagaaaaattgccttcttacctggcaacaaaagtggataccctcgtcatgccctcctttgcgcatgccgcgcaggtactgcagcaacgccagattcgggtgattaatttttccccagaaagcgctgtgccggatactatcttcgaaaaggttgcgtttaatgagtactttaaaagtgagtaa

SEQ ID NO: 137297 - DNA, 972 bp, Enterobacter cloacae
atgcgggtattgatcgttaaaacctcctccatgggcgacgtgctgcacacgctgcccgcgctaaccgacgccgcgcaggctatccccggcatccgcttcgactgggtggttgaagagggtttcgcgcagatcccctcctggcataaaagcgtcgaacgggtgatcccggtggcgatccgccgctggcgcaaagcctggttctccgcgccgatcaaagccgagcgtcaaacctttcgcgaggccgttcaggcggtaaagtatgacgccatcatcgacgcccaggggctggtgaaaagcgccgcgctggttactcgcctggcgcacggcgtcaagcacggtatggactggcaatcggcccgcgagccgctggcgagcctgttttacaaccgccgccaccatatcgcgaaacagcagcacgcggtggagcgtacccgtgagctgttcgccaaaagccttggctacgcgaaaccccagacccagggggattacgccattgcgcgccatttcctgcagcacgaggctagcgctgccgcgccctatctggtgtttctgcacgccaccacccgcgacgataagcactggccggaaacccactggcaggagcttctcgatctgctggccgacagcggcgtccacattaagctgccgtggggcgccccgcacgaagaggcgcgggcgaagcggctggcggaaggccgggtgtatgtcgaagtgctgccgcgcatgagccttgagcaggtggcgcaggttctggccggcgcccgggccgtcgtctcggtcgataccgggctgagccatctgaccgccgcgctggataaaccgaactttacgctctacggcccgaccgacccggggctgattggcggatacggtaaaaaccagcatatcgtgcggccggaaaacagcgccagcaccggcgatattgcggccagccggattcatcttctcctgcaaaatcaggggctgctctga

SEQ ID NO: 137298 - DNA, 1059 bp, Enterobacter cloacae
atgaaaatattggtggtaggcccgtcttgggtgggcgacatgatgatgtcgcaaagtctttatcgtacgctcagggcgcgctatccccaggcgattatcgacgtgatggcgccagcctggtgccgtccgttgctttcgcgcatgccggaagtgaacgaagcgatcccgatgccgctgggtcacggcgcgctggctatcggcgaacgccgtaagctcggccacagcctgcgcgaacgtcgctacgatcgcgcttacgtgctgccgaactcgtttaaatcggcattagtccctttctttgccaatatcccgctgcgcaccggctggcgcggcgagatgcgctacggactgctcaacgacgcccgggtgctggacaaagacgcctggccgctgatggtggaacgctacgtggcgctggcctacgacaacggcgtgatgcgctgcgccaaagatctgccgcagccgctgctgtggccgcagctgcaggtcaacgaaggggaaaagtcgcaggcctgcagcgcctttaacctgtccaacgatcggcctatcatcggcttctgccccggcgcggagttcggcccggccaaacgctggccgcactatcactatgctgcgctggcgaaaaagcttatcgacgatggctatcagattgcgcttttcggctcggcgaaagataacgaggccggcaaagagatcatcgccgccctcagcagcgagcagcaggcctggtgccgtaatctggcgggtgaaacccagctggagcaggcggtcattctgatcgccgcctgtaaagctgtagtgactaacgattcggggctgatgcacgtcgccgcagcgctggaccgcccgctggtggcgctgtatggcccgagcagtccggactttaccccgccgctgtcgcataaagcgcgggttatccgtctgattaccggctaccacaaggtgcgcaaaggcgatgccgccgaaggctatcatcagagcctgatcgacatcaccccagaacgcgtcctgcaagagctgaacgaactattagcggaaaaaaccgagcacgaggaagcgtaa

SEQ ID NO: 137299 - DNA, 933 bp, Enterobacter cloacae
atgatcatcgttaccggcggcgcaggctttatcggcagcaacatcgttaaagcgctgaatgacaaaggcatcaccgacattctggttgtcgacaatctgaaagacggcaccaagtttgtaaacctggttgacctgaacatcgctgactacatggataaagaagactttctgatccagattatggcgggtgaagagttcggtgaaatcgaagcaatcttccacgaaggcgcgtgctcttccactaccgagtgggatggtaagtacatgatggacaacaactatcagtactccaaagagctgctgcactactgcctggagcgcgaaatcccgttcctgtacgcctcctccgcggccacctatggcggacgcaccagcgacttcatcgagtcccgcgagtacgaacagccgctgaacgtttacggctactccaaattcctgttcgacgaatacgtccgccagatcctgccggaagccaattcgcagatcgtcggcttccgctacttcaacgtctacgggccgcgcgaaggccacaaaggcagcatggcgagcgtcgctttccacctcaatacccagctgaataatggcgaaagcccgaaactgttcgaaggcagcgacggcttcaagcgcgacttcgtctacgtgggcgacgtggctgacgtcaacctgtggttctgggaaaacggcgtttccggcatctttaacctcggcaccggccgtgcggaatccttccaggccgtcgccgatgcgaccctggcataccacaaaaaaggcagcatcgagtacatcccgttcccggacaaactgaaaggccgctaccaggcgttcactcaggcggatctgactaacctgcgcaaagcgggctatgacaaaccgttcaaaaccgttgccgaaggcgtaacggaatatatggcctggctaaaccgcgacgcgtaa

SEQ ID NO: 137300 - DNA, 651 bp, Enterobacter cloacae
gtgggagccgcggccgttttcgccgacgaagccgacggcgtgggagtcatcgaccatcaccagcgcatcgtatttatccgccaggtcgcaaacgccttgcaggttggcgatcacgccatccatcgagaacacgccgtcggtggcgatcagcacgtgacgcgcgccggcctcgcgagcttctttcagacgcgcctccagctcttgcatatcgttgttggcatagcggaagcgcttcgctttacacagacgcacgccgtcgatgatcgaggcatggttcagggcgtcggagataatggcgtcttccgggccgagcagcgtttcaaacaggccgccgttggcgtcgaagcaggaagagtagaggatcgcgtcttccataccgaggaaatcggccagcttcttctccagctgcttatgcgtatcctgggtgccgcagatgaagcgtaccgaggccatcccgaaaccgtggctgtccatgccggatttcgccgcggcaatcagttccgggtggttcgccagacccagatagttattggcgcagaagttaatcacgtggctgtcgccgacggtaatgtccgcctgctgcgccgaggtgatgatgcgctcttctttgaacaacccttcggcccgagcggtctccagattgctagttaa

SEQ ID NO: 137301 - DNA, 834 bp, Enterobacter cloacae
gtgtacctcaactgcgcggcgctgccggaaagcgtagcggagagcgagctgttcggccatgtgaaaggggcatttaccggggctatcagcaaccgcagcggtaaatttgagatggcggataacggcaccctgtttcttgacgaaatcggcgaactgtcgctggcgctgcaggccaaactgctgcgcgtgctgcagtatggcgatattcagcgcgtcggcgatgaccgcagcctgcgggtcgatgtgcgggtgctggcggcgacgaaccgcgatctgcgccaggaggtggtggaagggcgctttcgcgccgatctgtaccatcggctgagcgtcttcccgctgtcggttccgccgctacgcgagcgggaaagtgacgtggtgctgctggcgggctatttctgcgagcagtgccgcctgcggatggggctggcgcgggtcattttggctgaggcggcgcgaaaccggctgcagcagtggtcctggccgggcaacgtgcgcgaactggagcatgctatccatcgggcggtggtgctggcgcgggccacccaggccggtgatgaagtggtcctggagccgcagcatttccagtttgcggtggcggcgccgatgttgccgactgagacggcggcagcggcgcccgcgacgggaaacatcaatctgcgcgaggcgaccgactcttttcagcgagaagccattagccgcgcgctggaggcgaaccagggcaactgggcggcgaccgcccgagcgctggaactggacgtcgccaacctgcatcggctggcgaaacgtctggggcttaaaggatccccgcctggtaaaagttctgcaggttaa

SEQ ID NO: 137302 - DNA, 966 bp, Enterobacter cloacae
atgagtaactttttgttagaggccggacgccagaccctgatgcttgagctgcaggaggcgagccgcctgccggagcgcctgggcgacgacttcatccgcgcggcggaaaccatcatccactgcgagggcaaactgattgtctccggtatcggtaaatccggccacatcggtaaaaagctggcggcaaccttcgccagcaccggcaccccggcctttttcgtccatccggcggaagccctgcacggcgatctcggcatgctcgatagccgcgacgtgatgctgtttatctcctactccggtagcgcgaaagagctggatctcatcgtgccgcggctggaagaaaaaggcattccgctgctggcgatgaccggcaaatccacctcgccgctggcgctggcggcgaaagcggtgctggatatcgccgtggagcgcgaggcctgcccgatgcatctggcgccaacctccagcaccgtcaacacgctgatgctgggcgacgcgttggcgatggcggtgatgcaggcgcgcggtttcaatgaagaggatttcgcccgttcccacccggcgggcgccctcggcgcgcggctgctgaacaaagtgcatcacctgatgcgtcgtgatgaagaagtgccgcgggtcaataccgaggctaacgtcatggacgccatgctcgaactaagccgaaccggactcggcctggtggcggtctgcgatgaagccaaccgcgtgcagggcgttttcaccgacggcgacctgcgccgctggctggttgctggcggtacgctcaacgatggcgtcactcgggcgatgacccgcaacggcgtaacgctgcaggcggatagccgcgcggtggaagccaaagagcggctgatgaaacacaaaatcagcgccgctccggtagtggatgagaacggccaactggtcggcgccattaacctgcagaacttttaccaggcggggatcctttaa

SEQ ID NO: 137303 - DNA, 774 bp, Enterobacter cloacae
atgaaaccacgtcagcgccaggcagccattctcgagttcctgcagtcgcagggaaaatgctcggtcgaagagctggcgcaacacttcgataccactggcaccaccatccgcaaggatctggtcacgctggaaaacgccggcaccgtcattcgcacctacggtggcgtggtactcaacaaggatgaagccgatccgccgattgaccataaaacgctgatcaacacccataaaaaagcccagattgccgaggccgccgtgcgatacatccacgatggcgattcaattatcctcgacgccggcagcaccgtgctgcagatggtgccattgctgagtcactttaataacatcacggtgatgaccaacagcctgcatatcgtcaacgcgctatcagagttcgataacgagcagaccatcctgatgccgggcggcaccttccgtaaaaaatcggcctcttttcacggccagctggcggaaaacgccttcgaacagttcagcttcgacaagctgtttatgggcaccgacggtatcgatctgaacgccggagtcactacctttaatgaggtctataccgtcagtaaggcgatgtgcaacgccgcccgcgaagtgatcctgatggccgactcatccaagtttggtcgtaaaagccccaatattgtctgcggccttgaacgcgtggataaattgattaccgatgccgatattgacccggaattccagcgggcgctggaagccaaaggcatagcagtcattattactggagaacatcatgagtaa

SEQ ID NO: 137304 - DNA, 360 bp, Enterobacter cloacae
atggttactgcattaatcatcgtcgccgccatcgcctggcttacccagctggcctttggcggctggcagatccgccgcttcaatcgcgcctttgatagcctgtgccagcaggggcgggggggcgtcggccgctccgccgggcgctttcaaccgcgcgccatcgtcgccatcgccgtcgatgataacgaccgcattagcgacacgctgctgatgaaaggcttcaccattttcgccagtccgcaaaagatcccggctctggcaggcaaacatattgcggaattgcagcctgatgtgatctttccccatgatccgcgctgtcagaatgcactatcattagcgcttaatccgaaacatggataa

SEQ ID NO: 137305 - DNA, 780 bp, Enterobacter cloacae
atgaatcaggttgctgttgtcattggcggtggacaaaccttaggagagtttctgtgccgcgggctggccgccgagggctaccgcgtggcggtggtcgatattcaaagtgaaaaagccagccgcgtcgcccaggagattaacgctgaatatggcgaaggtatggcgtacggcttcggcgccgacgccaccagcgaggccagcgtcaccgccctggcccacggggtggatgagattttttcgcgcgtcgacctgctggtgtacagcgccgggatcgccaaggcggcgtttattagcgacttcgcgctgggggatttcgaccgctcgctgcaggtcaatctggtgggctattttctctgcgcccgcgagttctcgcggttgatgatccgcgacggcattaaggggcggatcattcagatcaactcgaaatccggcaaagtcggcagtaagcacaactccggctacagcgcggcgaagttcggcggcgtcgggctgacccagtcgctggcgctggatctggcggaatatggcattaccgtgcattcgctgatgctcggcaatctgctgaagtcgccgatgttccagtcgctgctgccgcagtatgccaccaagctcggtatcgatgagagcgaagtcgagcagtactacatcgacaaggtgccgctgaagcgcggctgcgaatatcaggatgtgctgaacgtattgatgttttacgctagcccacaggcgtcgtactgcaccgggcagtcgatcaacgtcaccggcggccaggtgatgttttaa

SEQ ID NO: 137306 - DNA, 363 bp, Enterobacter cloacae
atgactgtgatttaccagaccaccattacgcacatcggcgcctgcgcgacgatggcgctggaagagcaaatgctgatcaccttccgcgagggcgccccggcggatatcgaagagtactgctttattcacaaccacggcgagcttgctggcacgctgcagccgggggcagagctgcagcttggcgaacagcgctacccggtgaccgccgtcggcgaggtcgctgaacaaaacctgcgcgagctgggccacatcaccctgcgctttgacggccatcgtgaagcggagttcccaggtaccgtccatgtggcgggcccggtgccggacgccatcgcgcccggctgcgtactgaagtttgttgcttaa

SEQ ID NO: 137307 - DNA, 981 bp, Enterobacter cloacae
atgacccgtattcgtatagagaaaggcaccggcggctggggcggcccgcttgagctcgacgccgtcgaaggcaaaaagatcgtctatatcaccgccggcacccgcccggcgatcgttgaccgcatcgccagtctgaccggctggcagccggtggacgggtttaaagagggagaaccagcggaaagcgagatcggcgtggcgattatcgactgcgggggcaccctgcgctgcgggctctatcctaaacgccgcatcccgacggtgaatatccatgccaccggcaaatcagggccgctggcccagtacatcacggaagatatttatgtctccggcgtcaaagaggacaacatccagtgcatcgctcccgacagcgcaggggtttccgagccgccggcggaaaacaagagcgcgggtcgcgattacgacaccagcaagaagattactgaacagagcgatggcctgctggcgaaggtcgggatgggcatgggttcggtggtggcggtgctgttccaggccgggcgcgacaccattgatacggtgctgaaaaccattctgccatttatggctttcgtctcggcgctgatcggcatcatcatggcctccggcatcggcgactggatcgcccacggcctggcgccgctcgccagccatccgctggggctggtaaccctggcgctgatttgctctttcccgctgctgtcgccgtttctcggccccggcgcggttattgcccaggtgatcggcgtgctgatcggcgttcaaatcggcctcggcaacattccgccgcacctcgccctgcccgccctattcgccattaacgcccaggccgcctgcgattttattccggtaggcctgtcgctagccgaagcccgccaggataccgtgcgcgtcggcgtgccgtcggtgctggtcagccgctttctgaccggcgcaccaacggtgctgatcgcgtggttcgtttccggatttatttaccagtaa

SEQ ID NO: 137308 - DNA, 564 bp, Enterobacter cloacae
atgattgacgtcgtgacccacggcgcggagtggtttatcggcctgtttcagaaaggcggcgaggtatttaccggcatggtgaccgggatcctccccttgctgatcagcctgctggtgatcatgaacgcgctgatcaactttatcggccagcagcggatcgagaagctggcgcagcgctgcgcaggaaacccaatctcccgctacctgctgctaccctgcatcggcaccttcgtgttttgtaacccaatgacgttaagcctcggccggtttatgccagagaagtacaagcccagctattacgcggcggcgtcgtatagctgccactcaatgaacgggctgtttccacatatcaaccccggcgagctgttcgtctatctcggcatcgccaacggcctcactaccctcggcctaccgctcggtccgctggcggtgagctacctgctggtcgggctggtgactaacttcttccgcggctgggtcaccgacctgaccacctcgattttcgagagaaaaatggcgattcagctttcccagaaagtgcatctgtcaggagcgacatcatga

SEQ ID NO: 137309 - DNA, 1026 bp, Enterobacter cloacae
atgttgaagcgtcgctatctggctttacttcccctttgtgtgctcctcgctgcctgcagcagcaaacccaagacccccgcggaaacggagatggcgagtggaaccggcggctttttgctggaaccgcagcataacgtgatgcagatgggcggcgacttcgccaacaggcagcagctgcaggagatcctgtcgcaggcaaagcgcctggattacgtcctgcggctgatggatcgtcaggcgccgaccggcctgccgccaaccgggccgaccggcgcctggctgcgctacaagaaacagttcattaccccggataatgtgcagaacggcgtggtgttctggaatcagtatcaggacgcgctcaaccgcgcttatcaggtttacggcgtgccgccggaaatcatcgtcggcattattggcgtggagactcgctggggccgggtgatgggcaaaacccggatcctcgacgcgctggcgacgctgtcgtttagctacccgcgccgcgccgaatacttctcgtcggagctggaaactttcctgctaatggcgcgcagcgaaagcgacgacccgctggatctgaaaggctctttcgccggggcgatgggctacggccagtttatgccgtcctcctataagcagtatgcggtcgattttaacggtgacggacatatcaacctgtgggacccggtggatgctatcggcagcgtggccaactacttcaaacagcatggctgggtgagcggcgatctggtggcggtgcaggcgctggggcaggccccggggctggagaatggtttcaagactaaatacagcgtttcgcagctggcggccgcagggctgaccccgacccagccgctgggtaaccatcagcaggccagcctgctgcggctggacgtcggcaccggctatgagtactggtacgggctgccgaacttctacaccatcacccgctacaaccacagcacccactacgcgatggccgtctggcagctgggtctggcggttgcgcaggcccgcggcggttattaa

SEQ ID NO: 137310 - DNA, 312 bp, Enterobacter cloacae
atggagacgggaaaaaacggggggataagcgcggcctccccggcgtcatcccccggtcgcgctgcgcttaccggggctagcaaccggataccagaccgtagcccggataaggcgctggcgaactccgccgccaacgtgcggatgacggcgcgtaacgtagccgcagtgttgccgatgggcgacaagctgtcattgaactctccccaggtcgcgctgcgcttaccgtggctagcaaccggataccggaccgtagcccggataaggcgctacgcgccgctatccggggaggctgggaaattgtcagccggatga

SEQ ID NO: 137311 - DNA, 711 bp, Enterobacter cloacae
atggttagcaacctggtgggcggtgacgctgccatgattgaactggagcagctggtcgccggctatgacggggtagcgatcacccctccgctgagcgggatgatatgccccggcagcctgacggcaattgttggcctcaatggctgcggaaaatcaacgctgctgaaaaccctcgccgggtttcttcctccggtcagtggccgcctgtgctggcagggaaaacggccggtgatcggctggctggcgcagcgccatgccctcgagtcgcagtttcctctcaacgtgcaggatgtggtaagccagggcgcatggcctggcgtgtcgctgctgcgcggtctggggggcggcacccggcgacgcatcggcgcggtgctggagcgggtcgggctggcgggcctggcgaaaacgccgatcgaagcgctctccggcggccagtttcagcgcatgctatttgcccgggtgatggtgctgcaggcgccgctggtgatgctcgacgagcccttcaccggtatcgacgaagcgaccagtcgcgaactaatggatttgatcctcgagatgcaccggcagggacagaccatcctggcggtgctgcatgataaccagcgggtggccgactttttccccgagacgctgctgctgactccccagcgcgcctgctggggcgctacccgggcggtgctcccggccttcagtcatgtgaggtcggcatga

SEQ ID NO: 137312 - DNA, 864 bp, Enterobacter cloacae
atgatctggcacaccttctttcagcctttcattgaattcggctttatgcgtcgggccctcgtggtgtgtctggcgctgtcgctgagcaccaccatgctgggcgtcttcctgctgctgcggcgcatgagcctgatgggcgatgcgctgtcgcacgccattctccccggcgtggcggtggggtatctgctgagcggcatgtcgctgctggccatgaccctcggcggcttcatcgccggcatcgtggttgccctggtggccgggtgggtgagccggcggacaccgttaaaagaggacgccagttttgccggattttatctgggctcgctggccctgggcgtcaccctggtgtcgctgcgcggctccagcgtcgatctgctgcacctgctgttcggttcgattctggcggtggatagcgacgcggcgttctttgtcaccggcgtggcgagcctgacgctgctgtgcattgcgctgttttatcgcgggctggtcagcgaggcgttcgatagcgcctggctacaggtcaacgcgcggcggctaccggcgctgctgcacggcctgtttctcgcgctattggtactgaacctggtggcggggttccaggtgctcggcacgttaatggcggtagggctgatgatgttgcccgcggtagcggcgcgctgctgggcacgaacgctgccgggcattttgttgctggcggctgcgatcggcgcgttttgcgcctggatgggattgagcctttcgtgggcagtgaatttacccgccgggcccgccatcgtgctgaccgccagcgtgctgttttttatttcagtgttttttggcacgcgtagccggctggtcgttggctggcgtaaattgatggggtaa

SEQ ID NO: 137313 - DNA, 879 bp, Enterobacter cloacae
atgaaacgaagtgcagtggtgatggcgttagccgtggggctgatggcgcagggggtgatagcaaaaacgctgaacgtggtaagcagcttttcggtgctgggcgatatggtgcagcaggtcggcggcgagcatgttcatgtcgatacgctggtagggccggatggcgatccgcacacctttgaaccttcaccgaaggatagcgcgctgctcagcaaggccgacgtggtggtggttaacggcctggggctggaagggtggctggatcgcctgattaaggcctctggttttaagggcgagctggtggtggcatcgaaaggcgtcaagacccatgcccttgatgaagagggtaaaacggtgaccgatccccacgcctggaacagcgcagcgaacggcgcattgtatgcgcagaatatcctcgaaggtctggtgaaagccgacccggaagataaagcggcgttgaccagcagcggcaagcgctatatcgaccagctgacgtttctcgacggctgggcgaaagcgcagttcagcgccattccgctggccaagcgcaaggtcctgaccagccatgacgctttcggctattttggccgggcttatcacgtgaccttcctcgcgccacaggggctctcttcagagagcgaggctagcgcggcgcaggtagcggcgctgattaagcaaatcaaagcggatggcgtccatacctggtttatggagaaccagcttgacccgcggctggtgaagcagattgccagcgccaccggcgcgcagccggggggcgaactctatccggaagcgctatctaagccgggcggcgtcgccgatagttacgtcaaaatgatgcgtcacaacgttgagcttatcgctaacagcatgaagtaa

SEQ ID NO: 137314 - DNA, 498 bp, Enterobacter cloacae
atgaccgattcagaattaatgcagctaagcgagaagattggccgggcgctgaaggcgcgtggggcgacggtgaccacggcggaatcctgtaccggcggctggattgcgaaagcgatcaccgatattgccggcagctcggcgtggtttgaacgcggctttgtcacctacagcaacgaagctaaatcgcaaatgatcggcgtcagcgaagcgacgctgcgcgacaacggcgcggtaagcgaaccggtggtggtggagatggcgattggcgcgctgcgcgcggcgcgtgcggattatgccatctccgttagcggcgtcgccgggccggatggcggcagcgtcgaaaagccggtcggcacggtatggttcggcgtcgccagcgtgagcgggcaaggggtgacgcggcgggaatgctttgccggagaccgcgaagcggtgcgtcgtcaggcgacggcctatgcgctaaatctgctctggcaacaatttctacaaaacacttga

SEQ ID NO: 137315 - DNA, 1059 bp, Enterobacter cloacae
atggcgatcgacgaaaacaaacagaaagcgttggcggctgcactgggccagatcgaaaagcaattcggtaaaggctccatcatgcgcctgggtgaagaccgcaccatggatgtggaaaccatctccaccggctcgctttctctggatatcgcgctgggcgccggcggtctgccaatgggccgtatcgtcgagatctacggtccggaatcctccggtaaaaccaccctgacgctgcaggttatcgccgcagcgcagcgcgaaggtaaaacctgtgcgttcatcgatgctgaacatgcgctggatccggtctatgcacgcaaactgggcgtcgatatcgacaacctgctgtgttctcagccggacaccggcgagcaggcgctggagatctgtgacgcgctggcgcgctctggtgcggttgatgttatcgtcgtcgactccgtcgcggcgttgacgccgaaagcggaaatcgaaggcgaaatcggcgactctcacatgggccttgcggcgcgtatgatgagccaggcgatgcgtaagctggcgggtaacctgaagcagtccaacacgctgctgatctttatcaaccagatccgtatgaaaattggcgtgatgttcggtaacccggaaaccactaccggtggtaacgcgctgaagttctacgcctctgtgcgtctggacattcgccgcatcggcgcggtgaaagagggcgacaatgtcgtcggaagcgaaacccgcgtcaaagtggtgaaaaacaagatcgccgcgccgtttaaacaggccgaattccagatcctctacggcgaaggcatcaacttctacggcgagctggtagacctcggcgtgaaagagaagctgattgagaaagcgggtgcctggtatagctacaacggcgacaaaatcggtcagggtaaagcgaacgcgatcacctggctgaaagagaacccggcggcggcgaaagagattgagaagaaagtgcgcgaactgctgctcaacaatcaggatgcgaagccagacttcgttgttgacggcaacgacgcagaagaaaccgaacaggatttctga

SEQ ID NO: 137316 - DNA, 501 bp, Enterobacter cloacae
gtgactgatgcttcatcacgccgctccggctacgcccgcctgctggaccgtgctatccgcattctggcgatgcgcgaccacagcgagcaggagctgcgacgcaagctggtcgctccggtgatgagcaaaaacggtcctgaggcgctggacgtcacccccgacgagctggagcaggttgtagcctggtgtatcgaaaaccgctaccttgacgacaagcgcttcgtcggccagttcatcgccagccggagccgcaaaggctatggtccggcgcgcattcgccaggagctcagccagaaaggcattgcgcgccaggtcgttgaccaggcgatgcgcgaatgcgatatcgactgggtgagccttgccagggagcaggcacagcgtaaatacggcgaaccgttaccttccgcctttactgaaaaagtgaaagttcagcgattcctgctttaccgcggctacctgatggaagatatccaggaaatctggcgaaattttgcagattga

SEQ ID NO: 137317 - DNA, 2628 bp, Enterobacter cloacae
atgagcaagagcaccgctgagatccgtcaggcgtttctcgactttttccatagcaagggacatcaggtagttgccagcagctccctggtgccgcacaacgatccgaccctgctgtttaccaatgcagggatgaaccagttcaaggatgtcttccttggtctcgacaaacgtaattattcgcgtgcgaccaccgcacagcgttgcgtgcgtgcgggtggtaaacacaacgatctggaaaacgtcggttacaccgcgcgtcaccacaccttttttgaaatgctgggcaacttcagctttggcgattacttcaagcaggatgccatcaaatacgcgtgggaactgctgaccggtgagaactggttcgcgctgccgaaagaaaaactgtgggttaccgtttacgagaccgatgacgaagctttcgacatctgggccaatgaagtaggcgttccgcgcgagcgtattatccgcatcggcgacaacaaaggcgcgccgtttgcttctgacaacttctggcagatgggcgacaccggtccgtgcggcccgtgcaccgaaatcttctttgaccacggcgatcacatctggggcggccctccgggaagcccggaagaagatggcgaccgttacattgagatttggaacatcgtcttcatgcagttcaaccgtcaggctgacggtaccatggagccgctgccgaagccgtccgtcgacaccggtatgggtctggagcgtattgctgcggtgctgcagcacgttaactccaactatgacatcgacctgttccgcgatctgatcgccagcgtggcgaaagtcaccggcgcgaccgatctgacgaacaagtcactgcgcgttatcgccgaccacattcgctcctgcgccttcctggttgccgacggcgtgatcccgtcgaatgaaaaccgcggctacgtgctgcgtcgtatcattcgccgcgcgatccgtcacggcaacatgctgggcgcgaaggacaccttcttctggaaactggttgccccgctgatcgatgtgatgggctccgccggcgacgagctgaagcagcagcaggctcaggttgagcaggtgctgaaaaccgaagaagagcagtttgcccgcaccctcgagcgcggcctggcgctgctggatgaggagctgtcgaagctgaaaggcgacaccctggacggcgaaaccgccttccgtctgtacgacacctacggcttcccggtcgacctgaccgccgatgtgtgccgcgagcgcaacatcaaggttgacgaagctggttttgaagccgcgatggaagagcagcgccgccgcgcgcgcgagtccagcggtttcggcgccgactataatgcgatgatccgcgttgacggcgcctctgaatttaaaggctacgatcatctggagctgaacggcaaggttaccgccctgtttatcgacggcaaagcggtggatagcgttagcgctggccaggaagcggtggtgatccttgaccagaccccgttctatgcggagtccggcggccaggtgggcgataaaggcgaattaaaaggcgcgggcttctccttcgcagtcagcgacacgcagaagtacggccaggctattggtcatatcggtaaagtcgccagcggctcactgaaagtgggtgacgcggtgcaggccgacgtagatgaggctcgccgtcagcgtatccgtctcaaccactccgcgacgcacctgatgcacgcggcgctgcgccaggtgctcggcacccatgtggcgcagaaaggttcgctggtcaatgataaagcgctgcgctttgacttctcgcattttgaagcgatgaagccggaagaaattcgtgcggtggaagacctggtcaacgcgcagatccgtcgtaacctggctatcgaaaccaacattatggatatcgatgccgcgcgcgcatccggcgccatggcgctgtttggcgagaaatacgacgatcgcgtgcgcgttctgcggatgggcgatttctccacggaactgtgcggcgggactcacgcggcgcgtaccggcgatatcggcctgttccgcatcacgtcagagtctggcaccgctgctggcgtgcgccgtatcgaagcggtgactggcgaaggcgcgatggccatcctgcatgcgcagagcgatcagctcaatgatatcgctcagctgctgaagggtgacagccacaatctcggcgagaaggttcgcgccgcgctggagcgtacccgccagctggaaaaagagctgcagcagctgaaagagcaggctgcggcgcaggagagcgcaaacctctccagcaaagcggaagagattaacggcgttaagctgctggtcagcgaactgaccggcgttgagccgaaaatgctgcgtaccatggttgacgatctgaagaaccaactcggttcgacgatcgttgtattagctacggtagcggatggtaaggtttctctgattgcaggtgtgtctaaggatgtgacagaccgcgtgaaagcaggggagctggttggtatggtcgcccagcaggtgggcggtaaagggggcggtcgtccggatatggcgcaggccggtggtaccgatgcgtctgctctccctgcagcgttagccagtgtgaaaggctgggtcagcgcaaaactgtaa

SEQ ID NO: 137318 - DNA, 186 bp, Enterobacter cloacae
atgctgattctgactcgtcgagttggtgagaccctcatgattggagatgaggtcactgtgacagttttaggggtgaagggtaaccaggttcgtattggcgtaaacgcccctaaagaagtgtctgttcaccgtgaagagatctaccagcgtattcaggctgaaaaatcccagcagtccagttactaa

SEQ ID NO: 137319 - DNA, 639 bp, Enterobacter cloacae
atgaagattgcactgatgatggagaacagccaggcgaacaaaaacgccatcatcctcaaggagcttaacgcggttgccgacgaaaaaggattcccggtctataacgtcggcatgagcgatgagaacgatcatcatctgacctacatccatcttgggatcatggccagtattctgctgaattcgaaagcagttgacttcgtggtcaccggctgcggtaccggtcagggggcgctgatgtcgctgaacatccatccgggcgtggtctgcggctactgtatcgatccggcggatgcgttcctgtttgcccagatcaacaacggtaatgcgctgtcgctgccgtttgccaaaggcttcggctggggcgccgaactgaatgtgcggtttatctttgaaaaagcctttaccggccgcaacggcgaaggctatccgccggagcgcaaagaaccgcaggtgcgcaatgccgggatcctcaaccaggtcaaagcagcagtagtaaaagagaactacctcgataccctgcgcgccatcgatccgcagctggtgaaaaccgcagtctccggcccacgcttccagcagtgcttcttcgaaaactgccaggataaagcaatcgaagactttgttcgccagatcgtcgcttaa

SEQ ID NO: 137320 - DNA, 1422 bp, Enterobacter cloacae
atgaataccgcgatctcttcccgcgatgaacgtgctttttcagcgccggcgctgctggtggccggtgccttttttatggagtttctcgacgggacggtgatcgccaccgccctgcccgatatggcgagggattttggcgtcaccgcggtcgaactgaatatcggcatcagcgcctatctgattacccttgcggtcctgatcccggccagcggctggatcgccgatcgcttcggcgcccgggctatttttactctcgccctggcgatctttacccttgcctcggtcttctgcggcctctccaccgaggtgcatatctttgtcgccatgcgtatccttcagggagtcggcggcgcgctgatggtccccgttggtcgccttgcggtgctacgcaccacgccgaaacaccagctgatcaaggccatcgccaccctgacctggccggcgctggtggcccccattatcggcccgcctttgggcggctttataacccgctacgccagctggcactggatcttctttatcaatgtcccgctgggccttgccgccatcatcctttcgctgcgcattatccctgatattcgcgaaacggaacggcgctccttcgatctcagcggatttatcactacctcggtcgcgatggtcagtctggtgaccgcgatggagcggctcggcgatcgccagccgcagatctggccgacgctggctctcgccgcgcttggcttcggctgtctgttatattccattcgtcatttccgccgggcggcggcgcctatggttcgtctcgacgccctgcaggtgccgacgttccgggtgacaatgtacggcggctcgttgttccgggcctccatcagcgcggtgccttttctgctccccctgctgttccaggtgggattcggtatggatccttttcattccggcctgctggtgctggcggtgtttgtcggtaatttaaccattaaacccgccaccacaccgctcattcgctggctgggctttcgtcggctactgctgatcaatggcgcgttgaacgtctgttcgctgctggcttgcgcgctgcttacgccgcagacgccggtctgggccatcatgctgatcctttatctcggcggggtgtttcgctcaatccagtttaccggtgtaagcacgctggcctttgccgatgtccccgccgcgcagatgagtgatgccaatacgctgttcagtaccgcgtcgcagctggcggtagggctggggatcacgctcggggctattggcattcgcctgggcgagcaggtcggcgactggctgcatcttactgaactaccggggatcagcttccgcctgtcgtttgtgtttatcgccttgatctgtctggtagggatgatcgacagcctgcatctggccaaaacggccggcagcagcgtgtcggagaagaagaaatag

SEQ ID NO: 137321 - DNA, 252 bp, Enterobacter cloacae
atgtctcaacatcttaccgaacacgacgagctggtttccgatgtggttgcctgccagctggttatcaaacagatcctcgatgtcattgacgtcattgcgccggtggaagtgcgtgaaaaaatgaccactcagctgaaagctatcgacttcgccagccatccggcctctgccgatccggtgacccttcgcgcggtgcaaaaagcgatcgcgttgattgagctgaagtttactccacaggaagaaacgcattaa

SEQ ID NO: 137322 - DNA, 1563 bp, Enterobacter cloacae
atggctagatacacggcttcagcctctgaagggctgcagggaagaccgatcttgttacgccatcagttagcctacggcggcggaaatctgttagggagcggcgcactggcgataagcggcgcatggctactctatttttatacgaccttttgcggcctgacgctgatcgaggcctcatttatcttctccgtcgccagcatcattgacgctatcagcaacccgctgatgggctatctgacggataattttggcaaaacgcgcttgggcaagcgcttcggccgccggcgtttctttctgctaatcggtattccgctgatgatgttctacccgctgctgtgggtggaaggcctgagtttctggtactaccttagcacctatgtggtgtttgagatcatttacacctctatcatggtgccttatgaaacgctggcgacagagatgaccgatgatttctcactgcgttcaaaactgaccggctataaagctatctttggtaagctggccaacttcctcgcggcgtttattcccggccagttcattctgctgtatggcaaagattctgccacccctttcttcctcaccggtctgacctatggcgcgatcctgatcgtcgctatttcctgcctgtggttgtgcagctgggagcgtgagcgcggggaagaggtggaaaccagcgcgaaaaaaggactgctgagcaccctgctgtcgctggcgaaagatatgcgttcgactttttatctacgcgtattccgcaaacatcttggtatgtacctgtgcggctttggcgcggaatggctgtttgcctccatcttcacctatttcgtgatcttcgttctacaacacgatccagcgatggtggccgggctgaacagcctgaactcgattctgcagctgatctctacggcgctgtttatcggcctgtgcgtgaaaaagggcttcagcaaaccctatatcctggcgctggggatcgtcattttcgcggttctgctgtatacctcgctgtggtttttccatctaccgtccggcctggcgacagtgctgatgttcggcattaccgtgctgttcggcctgggtaccggcggggtgtactatataccctggaccgtttacaccttcctggccgatgtcgatgagatctacaccggacgccggcgggaagggatctatgccggcgccatgaccttctcaggaaaaattctgcgctcgattgtggtgttctcgatgggggcgatcctgagcttctacggtttccagtcaaaagcgcacagccaaccggaaagcgcggtgaccgctatcgcagtggtattctgcgtcggggtgatcgcattagccctggccgccatcgtcttcagcaagcagatgaagctggaccggaaggcccatctggtggtgctgcaggaagtcgcgcggataaaagcgggcggcaaaattagcgatattgcgccggacgtgcgggttatcgtggaggatctggtcggccatcgctacgaagagtgctggggcaacagcaaattgttcaaagatgctgcccctgcgcctgcgcagaccgtcgtttcccattaa

SEQ ID NO: 137323 - DNA, 510 bp, Enterobacter cloacae
atggcagttccaggaatggcacaaaagctaaacacccaaatgaatcttgagtttcacgcctctaacgtttacctgaacttaagcgagtggtgcgcccggcatcgcttcgacggcgccgcgacgtttctgcgcacccgcgcgcaaagcagcatcaccctcaccatgcgcgtatttgactacctgaaaaaagccggcagctggccgatcgtcaatcccgaccacgcctgtaaccctgagtgcacctcgctggaagatctgtttacccaaaccctgagcgattaccaacagcgcagtcgtctgctgagcggtctcgctcaggaagccaaagcgcaaagcgatgacagcacctggcggtttctcacgctgttggcggaagagcagcagcaggatggcctgctattgcaaagcgtgcttgaggaaattcgtaatgccgataaagccggtctcgggatggagcagaccgatcggcgtctgatggctatcgttggcgaagcgcagaaagcgcattaa

SEQ ID NO: 137324 - DNA, 681 bp, Enterobacter cloacae
  misc_feature (600)..(609): n is a, c, g, or t
atgcacaaatttactaaagcgctggcggccattggtctcgctgcggttatgtcacaatcagctatggcggaaaatcttaaactgggttttctggtgaaacagccggaagagccatggtttcagactgagtggaaatttgctgataaagcaggaaaagatttaggctttgacgttattaaaattgcggttccggatggggagaaaactctgaatgccattgacagcctggcggccagcggcgcgaagggctttgtcatttgtacccccgatcccaagctcgggtcggcgattgtcgccaaagcgcgtggctatgacatgaaggtgattaccgtcgatgaccagttcgtcaatgcgaagggcaaaccgatggagagcgtaccgctggtgatgatggcggcgagcgaaattggcgcccgtcaggggcaggaactctataaagagatgcaaaagcgcggctgggatgtcaaagacaccgccgtaatggcgatcaccgccgatgagctggataccgcgcgccgtcgcaccaccggctccatcgatgccctgaaggcggccggcttcccggacgcgcaaatctaccgcgtgccgacaaaatccaannnnnnnnnnacgatatcccgggagcgttcgacgccggtaactcgatgctggtccaacatccgcaggttaaacactggctga

SEQ ID NO: 137325 - DNA, 348 bp, Enterobacter cloacae
atgctggtccaacatccgcaggttaaacactggctgatcgtcgggatgaacgacaacaccgtcctcggcggcgtgcgcgcgaccgaaggtcagggctttaaagctcccgatgtgattggcatcggcatcaacggcgtggatgccgttaacgaactgtcgaaggcgcagccgaccggcttctatggttctctgctgccaagcccggatatccacggctacaaaaccagcgaaatgctctacaactgggtcaccaagggcgtcgagccgccgaagttcacggcggtgaccgatgtggtgttgattacccgcgataacttcaaagaagagctggcgaaaaaagggctgtaa

SEQ ID NO: 137326 - DNA, 1515 bp, Enterobacter cloacae
atgcaacagtctaccccttatctctcatttcgcggcatcaccatgacgttccctggcgtaaaggccttgtccgatatcagttttgactgctacccgggacagatccacgcgctgatgggcgaaaatggcgcaggcaaatcgacgctgttgaaaattctcagcggcaactatatcccgaccgcgggccatctgcagatcggcggccagcagatggcattcgccaataccatggaggcgctgaatgccggcgtggcaattatctaccaggagctgcatctgatcccggagatgaccgtcgccgaaaatatctatctcggtcagctgccgcacagaggcggcatcgtcaatcgctcgctgctcaactatgaggcccgcctgcagctggatcatctgggtctggatatcgacccggagacgccgctgaaatatctctccattggtcaatggcagatggtggagattgccaaagcgctggcgcgtaacgccaagattatcgcgttcgatgagccgaccagctcgctctccgccagagagatcgacaacctgtttcgcgtcatccgcgagttgcgggaggagggaagggtcatcatctatgtttcacaccggatggaagagatttttgccctcagcgatgccatcaccgtctttaaagatggccgctacgtttgcacctttgacgatatgccgagcgtcagccacgacgccctggtccaggcaatggtaggccgcaatctgggcgatatttatggctggaagcctcgcccctatggcaaggagcggctgcgcctggaggaggtcaaagcgccgggcgtgcgcacgccggttagtctctcggtgcgcagcggtgaaattgtcggtttgttcggactggtgggtgccgggcgcagcgaactaatgaaaggcctgtttggcggcacgcagataaccggcggtcaggtgtatatcgatggccagcccgtctccattcgcaaaccggcccaggccatccaggccgggatgatgctgtgcccggaggatcgtaaagcggaggggattattccggtgcattccgtgcgcgataacatcaatatcagcgcccggcgcaagcatattcacgctggctgcctgatcaacaacgcctgggaggcggacaacgccgatcaacatatccagtcgctgaatattaaaacgccgggcccggaacagctgattatgaacctgtcgggcggcaaccagcagaaagcgatccttggccgctggctgtcggaagagatgaaggtgatcctgcttgatgagccaacccgcggcatcgacgtcggcgccaaacatgaaatttacaatgtgatctatggcctcgccgcctccggtgtcgccgtggtgtttgcctccagcgacctgccggaagtgctgggcgtcgctgaccgcatcgtggtgatgcgcgaaggacaaatcgccggcgaactgctgcatgaagaagccaatgaacagcaggcgttaagccttgcgatgccaacagtgagccaggctgtcgcctga

SEQ ID NO: 137327 - DNA, 981 bp, Enterobacter cloacae
atgtcatcagtgactacgtccggggctacccgctcaacctttagctttgcccgcatctgggatcagtttggcatgctggtggtgtttgcggtgctgtttatcggctgtgtgatttttgtgcccaactttgcttcattcgtcaatatgaaagggctggggctggcgatctcgatgtccgggatggtggcctgcggcatgctgttttgcctggcctccggcgattttgacctgtcggtggcgtcggttatcgcctgcgccggggtcaccaccgcggtggtgattaatctcagcgaaagcctgtggctggggatcgccgcaggcctgttgctgggggcgcttagtggcctggttaacggctttgtcattgcgcgccttaagatcaacgcgctgatcaccacgctggccaccatgcagattgtccgcggcctggcctatattatctccgacggcaaagcggtggggatcgaagatgaacgtttcttcaccctcggctatgccaattggtttggtttgccggcgccgatctggctgaccgtcgcctgcctggtggttttcggattattactaaacaaaaccacctttggccgtaatacgctggctattggcggcaatgaagaggcggcgcgcctggccggcgtcccggtggtgcgcaccaagattattatctttgtgctctccggtctggtatcggccgcagcggggatcattctggcgtcgcgcatgaccagcggccagccgatgacctcgattggctatgagctgattgttatttcggcctgcgtgctgggcggggtgtcgctgaagggcgggatcggcaagatctcctacgtggtggccgggatcctgatcctcggaaccgtggaaaatgcgatgaacctgctgaatatctcgccattctcacaatacgtcgtgcgcggggtgatcctgctggcggcggtgatcttcgaccgctacaaacaaaaagccaaacgtgcggcctga

SEQ ID NO: 137328 - DNA, 789 bp, Enterobacter cloacae
gtggataaccagatatctgtaccgcctgcgctaaccggaaactacgcttttttctttgacctcgacggtactcttgccgatatccagccgcaccccgatcaggtggtgatacccgacagcacgctgcaggcgctcaatgcgctggcccagcagcaggggggcgcggtggcattgatttcagggcgctcaatggctgaacttgacgcgctaacccatccctggcggctaccgctggccggcgttcacggggccgagcgccgtgatatcaatggtaaaacctacatcgtctctctgccgacagcgctgcgcgatgagatcgcggctgagctgacgtcggcgctggaagcgctcccgggatgtgagctggagagtaaagagatggctttcgcgctccactatcgccaggccccgcagcagcagagcgccgtgctggagctggcgcagcggattgttcagcgctatccgctgctggcgttacagcttggcaagtgcgtggtggagattaaaccccgcggcgtcaacaaaggggaggcgattaccgcgttcatgcaggaggcaccattcgccggccgcgaaccggtttttgtcggcgatgatttgaccgacgaggcgggattcagcgtcgttaatcaactgcagggaatgtcggtaaaagttggcgccggggaaactcaggcgcactggcggttggcggatgccgccgctgtaaggacgtggttgcaacatctggcgtatgacgcgcaaaccgaaaggagggatgaccatgagtcgtttagtcgtagtctctaa

SEQ ID NO: 137329 - DNA, 1425 bp, Enterobacter cloacae
atgagtcgtttagtcgtagtctctaaccgtatcgccttaccggacgataaaaaatcgagcgctggcggtctggccgtcggcatcctgggggcactgagagcggcggggggtctgtggtttggctggagcggcgagattggcgatgaccagcagccgctcaagcaggtctcccgcgggaatatttcctgggcgtcgttcaaccttaatgaacgggaccatgatgaatactacaaccagttctctaacgccgtgctgtggccggctttccactatcgtcttgatctggtcagctttcagcgcgaagcctgggagggatatctgcgggttaacgccatgctggcggacaagcttctgccgctgattgagccagacgatacgctgtggatccatgattaccatcttctgcccttcgccagcgagctgcgtaagcgcggagtgaacaatcgcatcgggtttttcttacatattccgttcccgacgccggagatttttaacgctctgccgccgcacgctgagctgctggagcaactgtgcgattacgatctgctgggcttccagaccgaaagcgacagaaccgcttttctcgacagcattgctatgcagactcgcctatccgacctcggcgataaacgctatcaggcatggggtaaggcgttcagtaccgaggtttatccgatagggatcgatccggacgaaattacgcgcaacgctaaaggtccgctgccgccgaagctggcccagctgaagaacgagctgaaaaatgtgaagaatatcttctccgtggagcgtcttgactattcgaaagggttgccggagcgattcctcgcctacgagacgctgctcgagaagtaccctcagcaccacggcaaaatccgttatacccagatcgcgccgacctcccgcggcgatgtgcaggcctatcaggatatccgccaccagctggaaaccgcagccggacgcatcaacggacagtttggtcagcttggctggacaccgctctactatctgaaccagcattttgatcgtaagctgctgatgaaggtcttccgctactctgacgtcgggctggtgacgccgctacgcgatggtatgaacctggtggcgaaggagtacgtcgcggcgcaggatccggataaccctggcgtactggtcctgtcgcagtttgccggggcggcgcaggagctgaccagcgccctgatcgtcaatccttacgatcgcgacgaggttgccgccgcgctggatcgcgcgctcagcatgccgctggcggaacgtatcgcccgtcattcagcgatgctggacgtgatcagagaaaatgatattcataactggcaggcgcgctttgtcgaggatctgcagcatatttcaccgcgcagcgaggagagccgtctgcgggggaagatagccaccttccctaaactggcctag

SEQ ID NO: 137330 - DNA, 429 bp, Enterobacter cloacae
atgccttatacccatctgctggttgccgtcgcgccaacgccggagagtcaggtgttaattaaaaaagcggtgtcaatagcccgccccgttaacgcgaaagtgagcttaatcactctcgctacggatccggagctgtataaccagttcgccgcaccgatgatggaaaatctgcgcgaagtgatgcaggaagagacgcgggagtttctcaatgagctggctcgccacgcggactacccaatagaaagaatgaccatcgcctgcggcgagctaggccatcatattaaggacttctgccggtcgcaccgtattgatctggtgatctgcggcaatcacaaccattccctcttctcacgcgccacctgctcggcgaaaagtatcgtcggcagctgcggcgttgatgtcctgttggtttcccttgaaaagggctaa

SEQ ID NO: 137331 - DNA, 1584 bp, Enterobacter cloacae
atgaaaacacgaaaaattggactggctaactatctggcctacggcgcgggcgattttctcggcgccggcacgacggcgctaaccgccgcatggctgctctacttttacacgaccttttgcggactgaccccgattgaggccacgcttatttttgctgccgcccgcgtgctggacgcggtggtaagcccgctgatgggctttctcaccgataactttggcaccacctggcttggtaagcgcttcggccgcagaaaattctttattctgctcggcatcccctgcgtattcagctattcagcgatgtgggtcggcgagatgggcttctggtactacctggcgacctatctgctgtttgatatggtctataccatgattctggtgccctatgagacgctggtgccggagatgaccgatgactttaaacagaaaaccaaattctccggcgcgcgcatttcgatggcgcagatgtcggcgattttagcctccttcctgccggggatccttctctcctggctcggcaaagataatgccagctcgttcttctatgccagtctggtgttctcggtgctgtgcgcggtgatgctgactctggtctggtgtttcacctgggaacgaccgcgggaggcgtggtcggaagcggccctgcgggcggaagcggaaaaacaaaacttaacccttgctcagagcctcaatcgcctggtgattgagctgagttctacgctgcggataaaaattttccgccagcacctcggcatgtatctggggggctatatcgcccaggacgtcttcaatgccgtgtttacctattacgtggtctttgttctgatgcaggaagccgccgtcgcctcgaacctgctggggacgatggccatcttccagtttattgcggtaatcgccatgatcccgctgtgcattcgttttggccccgcgccgtcgtaccgcatggtggtggtcctgtttggcctgagctcactctcctacgcgctgctctattacgccggactgagcgacgtctattccttattgctgctcatctctgctgtcgccggactgggacgcggcgggataaattacgtaccgtggaatacctacacctatattgccgacgtcgacgaagcgatcaccggccagcgccgggaggggatttttgccggcatcatgaccctgacccgcaaagcctcgcaggcgggggcggtgatgctggtggggatcattatgcagttgtcggggtttgtttccgggcaaaaaatacagcctgaaggggtcagccataccattctgctgatcctcagcgtcggcactctggtggtgttagcctgcggcttcctcgtctcgctgcgcttcaagctcaacctgcacacccacagcgtcctgcgcagcgagaccctcagaatgcgcgagctcggctacgctcagtcggaacagaccagtgcggaacaccgcgcggtggtcgagctgctggcggggatgccttacgactgtctgtggggcaataacaatattggctatctgaatcgtcataaacctgctgccccggcgctcattaagggcggcggtttgaattcgacatatacccgaggttaa

SEQ ID NO: 137332 - DNA, 1140 bp, Enterobacter cloacae
atgaaagtttggccggtcaaacatagcccattactgcgtcagcctgagcgttttattgcccgcagcgaactgcaggcgctgatccgcaacgtgacgcaaaacctggtgaatattaaggatgagagcgggcaatttttactacgcctggatgacgggcgcgtgatcgataccaaaggctgggccggctgggagtggacccacggcgttgggctgtacggcatctatcagtattaccagcaaaccggcgatatcgaaatgcgtgatatcatcgatcgctggtttgccgaccgcttcgccgagggggcaacgaccaaaaacgtcaatactatggccccgtttctgaccctggcttaccgctttgaagagaccggccgtatggcgtatctgccgtggctggagagctgggcggagtgggcgatgcacgagatgccgcgcaccgagcagggcggtatgcagcacatgactctggcggaggagaaccatcagcaaatgtgggatgacacgctgatgatgaccgtgttgccgttagccaaaattggcaagctgcttaaccgcccgcagtatgtggaggaggcaacctaccagttcctgctccatgtgcagaacctgatggaccgggagaccgggctgtggtttcacggctggaactatgaggggcggcataactttgcccgggcgcgttgggcgcggggcaacagctggctcaccatggtgatcccggattttctggaactggtggatctccccgaggggaacgcggtacggcgctatctgattacagtcctcgacgcacagattgccgccttggcaaaatgccaggacgacagcggcctgtggcataccttgctggacgacccgcactcttatcttgaggcctcggcgaccgccggctttgcctacggcattctcaaagcggtgcgcaagcgttacgtcgggcagcactacgccggggtggctgaaaaagcgattcgcggaattgtgcagaatatttcgccgcagggggagctgctgcagacctcatttggcaccgggatggggtcagacctcgacttttatcgccagatcccgcttacctcgatgccctacggtcaggcgatggcgatcctttgtctgacggagtatctacgcaagtacttctga

SEQ ID NO: 137333 - DNA, 522 bp, Enterobacter cloacae
gtggccgagaagaacccggatatgtcggctgacgagctggaaaatctggcgaaagtggtgggtatcggcgcggttaaatatgccgacctgtcgaaaaaccgcaccaccgactacgtcttcgactgggataatatgctggcgttcgaaggcaacaccgcgccgtatatgcagtatgcctatacccgcgtgctctccgtgttccgcaaagccggcatcgacgaaaacgcgatgatcgacgcgccggtggtcatcgccgaagatcgcgaagctcagctggccgcgcgcctgctgcagtttgaagagaccctctccgtggtcgctcgcgaagggacgccgcacgtgatgtgcgcctacctctacgatctggcgggcctgttctccggcttctacgagcactgcccgatcctcagcgcggaaagcgaagagacccgcaacagccgtctgaagctggcgctgctcacggcgaaaaccctcaagctgggtctcgataccctcggtatcgaaaccgtcgagcgtatgtaa

SEQ ID NO: 137334 - DNA, 324 bp, Enterobacter cloacae
atggtggccgcgccgctggcgacggtcgacgtgaaggtcaatctgccagcctcctccagccagccgcaaccgcgaccggaaaaacccatctacctgtcggtgaaggcggataagagcatgttcctcggcaacgacccggttaccgaagcgaatatgattaacgccctggatagcctgaccgccggcaaaaaagataccaccgtcttcttccgcgcggataaaaccgttgattacgagacgatgatgaaagtgatggataccctgcatcaggcgggctatctcaagatcgggctggtgggcgaagagaccgtcaaagcgaagtaa

SEQ ID NO: 137335 - DNA, 1419 bp, Enterobacter cloacae
gtgaatcacgataataaactgtcatttgcggagaagctgggatatggcatgggggatgcagcctgcggtatcgtttactcttcggtaaccatgtttctgacatggttttatacggatatttacgggctttctgctgccgcagtcggagtgatgttcctggtgacgcgggttctggatgcgattaccgatccgctaaccggcattgttgcagaccgtgtaaagacccgctggggccattttcgcccgtggcttatctggtttgccgtaccttatgccgtgctggcggtaatgaccttcacgactccggaatttggcgcatcgggtaaactggtttatgcctacctgacctacaccttactcatgctgtgttacacctttatcaatattccctactgcgcattgggcggagtcattacgcgtgatgagaaggatcgcctttcagcccagtcatatcgttttacgatctcatctctggccggtctgatggtttctgtcgcaaccctgttcctggtggattttttcggtaaagaaaataagcagtttggttttcaggcgacaatgggaatcatgggcgcgatcgctattgtaatgctggctttttgcttcttctctaccaaagaacgcgtggctccagctgttgaacagcaggggagcatacgcgaagatctccgtcagctgctggcgaatgaccagtggcgtattgtggcgataattacttttttctccagtatggccggggttatgcgcagcgccgccacgctctattatgcaacctacctgatgttaggcggtgtggagtcagcggcgggaacggccatgaaatcagcatttgtttccaccagcgtcgttggcacgattatcggcagcatcgccgccggatggctggccaagcgctatcgcgcggtatcgctgtttaaaaatatcaacctcctgctggtcctggttggcgtcgtaatgttctttgtgccgccgacctggctgccggtggtgttccctttatacttcctggtcggcttcttccatcagatgtaccagccgtttaaatggaacatgatggccaacgctgccgattatggcgaatggaagtttggccgtcgcatcacgggattatcctattccggtaatctgtttgctttgaaaatgggcatggcggttgctggcgccgccgtaggtttttcgcttgggctatttggctatcaggcgggcgtaacggcgcagactccgctggcgacaatgggaattgtggggctgttaaccctcggtccatcactatcttacctgctcctgtggtggctggcgcgtttctataaactggatgacaaaatgatgcagacaattcagcgcgagctgtccatgcgtcagcagcaggggcattcagagacgcatttgccgctaaacgccgttccggaaaaggcctga

SEQ ID NO: 137336 - DNA, 1524 bp, Enterobacter cloacae
atgaccccttctgaataccagaatcctatcttatgcgccgattattccgacccggatatcgtgcgcgtaggcgatgatttctttatggtctcttccagttttaaccatgtgcccgctttaccgatcctgcattcaacggacctggttaattggactatcatcaaccacgttatggatgaactgccgctacctggttatgaccggtatcagccgggtaagggcgtatgggcgccgtcgattcgctggcacgatggcaagctgtgggtctgcttcagcacgccagatgaaggtatttttatctgccataccgaggatccgtggggggaatggagcgctccgcactgcctgcgcgaggccagaggttggatagatccctgcccgttctgggacgacaatggtcaggcctggttggtacatgccttcgcccatagccgcagcggcatcaagcataaactgcagttgtttgcgatggcgccggacgccagcgaattgctgggcgaagggcagattatctatgacggctgctgcgatttacctacccttgaggggccaaaggtttatcaacgcgccggttggtactacatctttgctcctgcgggcggggttgaaaatggctggcagacggtactgcgcgcgcgccagatgacggggccctgggaagccaaaaacgtgcttttccagggaaacacctcgataaatggaccacatcagggcggctgggtggagggtgaggagggcgaatgctggtttgttcatttccaggacttacacctctatggccgcgtggttcacctccagccgatgtcctggggtaacgatggctggccgcgtatcggtgagcagattggcaattgcggcgtcggacagccggttttacgttggcagcgtcctaaaaggttaacgccttcaccggcattggcgccgcaaaccagcgactattttgcgcaaggccaaccgggaatacagtggcagtggcaggctaaccccagccctgagtggctgctgccggcgaaaggcgaacttcgattacgctgcgtcccattatccgaagtcgatggacagagagcgttatactgggcgccgcagctgttgctgcagaaattcccggcgctaacttttagcgcgaaaacaagcgtaacgttatatgccgctcaggacggtgatgccggaggcctgatcgtatacggcgaacgctacgccgctttgctggtggagtttgggcaagggggttaccggctcgtgtggcgacacggttggatgagcgatgcgggcgtggtgcgcgaaactcgtcaggttcttgctgagcttaagtgcggcaagtgtcagctgcaggtggtcgtaggcgaaggcggcctgtgtcaattttcctggcgagccgaggaggagtggcggaaggttcctctttgttttgctgccgggaagggaaaatgggtcggcgcgaaatttggcctgctggctgcttcaatggttggcctacaaagcgagggctactccgctttgcaggactttgaggtcatactttaa

SEQ ID NO: 137337 - DNA, 495 bp, Enterobacter cloacae
atggaacgctttctggaaaatgctatgtacgcctcgcgctggctgctggcgccggtttattttggcctctcgctcggtctgattgcgctgaccatcaaattttttcaggagatcttccacatactgccgcatatttttagcgtcagcgagtcggatatgattctgaccctgctgtcgctggtggatatgaccctggtgggcggtttgctggtgatggtgatgttctccgggtatgaaaattttgtctcgcagctggatattaacgagggtaaagaaaaactcagctggctgggcaaaatggacgcgacttcgctgaaaaataaggttgccgcctccatcgtggcgatctcctctattcacctgctgcgggtgtttatggatgcgaaaaacgtcccggacaataagctgatgtggtacgtgattatccacctgaccttcgtgctttcggcctttgtgatgggctaccttgatcgtctgaccaaagtgaaacactga

SEQ ID NO: 137338 - DNA, 888 bp, Enterobacter cloacae
atgacgcgattaacggccaaagatttcccgcagcagttgctcgaatattatgactactatgcccacggcaaaatcagtaaacgcgagtttctccagctggcggggaaatatactgtcggcgggatgaccgcgctggcgctgtttaatctgctgaagcccgattatgccctggcagagcaggtaccgttcaccgacccggatatccgcccggagtatattcattatccctctcctgacggtcacggcgaagtgcgggcttacctggtgacgccgacaaaaatagccgacaaagcgcccgctgtggtggtggtgcatgagaaccgcggcctgaacccctatattgaagatgtagcccggcgggtagcgaaagcggggtacatcgcgctggcgccggatggcctgagcgccgtcggcggctatccggggaatgatgatgaaggccgcgccctacagcagaaagtcgatcccgtgaagctgatgaatgatttttttgcggcggtcgcgtttatggcgaactatccacaggcgacggggaaggtcggtatcaccggtttttgctacggcggcggcgtcagcaacgcggcggcggtggctatcccggagctggcctgcgcggtgccgttttacggtcgccagccgccgctgaaggaggttgataaaattaaagcaccgctgctgctgcactatgccggcctcgatagcggcattaatgaaggctggcctgcctatgaacaggcgttgaaggaacaccataaagtctacgaggcctatttctatcagggcgtgaatcacggctttcataatgattccacgccgcgctacgatcgggctgcggctgatctggcctggcaacgcacgctggcatggtttgagaagtatttacgctag

SEQ ID NO: 137339 - DNA, 288 bp, Enterobacter cloacae
atggaaaatcattttggcaaaggcttaatggcggggctacaggcatcctatgctgacaccgccgcgcatgcggcgaatttttgcgccgactataaacgcgggtttgtgctcggctactcgcaccgcatgtttgaaaaaaccggcgaccgccagctcagcgcctgggaagcggggatcctcacccgtcgctatggcctggacagggatatggtgatggatttcttcaaagaaggtggttccggtatggcgatgcgctattttctggcgggctatcggctggaaagctaa

SEQ ID NO: 137340 - DNA, 867 bp, Enterobacter cloacae
atgtcagagcaaaactaccagccaccaaaagtgtgggaatggaagcaaaacagcggcggcgcgttcgccaacatcaaccgtcccgtttccggcgcgactcatgaacgcgtcctgccggtgggaacccatccgctccagctatactcactcggcacgcccaacggccagaaggtgacgatcatgcttgaagagctgctggcgctgggcgtcagcggcgcggagtacgacgcctggctgatacgcattggcgaaggggatcagttttccagcggctttgtcgagatcaacccgaactcgaagatcccggccctcagcgaccattccaccacgccgccgacccgggtatttgagtccggcaacattcttctctatctggcggaaaaatttggtttcttcctgccgaaagatcctgccggtcgcaccgaaaccctcaactggctgttctggctgcagggcgcggcgccgttcctcggcggcggcttcggccacttctataactatgcgccagtgaagatcgagtacgcgatcgaccgctttacgatggaagccaaacgccagctcgacgtgctggacaaacagctcgcccgcggtcgctatgtggccggcgaggagtacaccatcgccgatatggctgtctggccgtggtatggcaacgtagtgctgggcaatgtctataacgcggcggagttcctcgacgccgggagctataaaaacgtgctgcgctgggcgcaggatgtcggcaaccgcccggccgtcaagcgcggacgcatcgtcaaccgcaccaacggcccgctcaatgagcagctgcatgaacgccatgacgcccgagactttgacacccaaacggaagataagcgccaggcgtaa

SEQ ID NO: 137341 - DNA, 561 bp, Enterobacter cloacae
atgagcacaccctcgcatctgaatgcccaaccgctggtctggggacacggcccgcggacgtttgaggtgttccttgagcccacctgcccctactctgtccgcgcgtttaataaactcgacgatctgctcgatgaggtcggcgccgataacgtgaccatcaagatacgcctgcagtcgcagccgtggcatctgttctccggggttatcgtccgctgcatcctcgccgcgtccaccctgccgcacggcagagagcaggcgcataaggtgatgcaggccgtggccgaccatcgggaagagtttgagtttaccgatcactgcagcgggccgaatatgaacgccacgccgcagcaaatcattgagcgcattgaacgctacagtcacgtgctgctgggggccgcctttgcccgcccggagctgcaggacgtgatcaagtggcacagtaaatacgcccgtcagaacggcatccatgtctcgccgacctttatggtcaacggcctggtgcagccggatctgggcagcggcgatgatgtcagcgtgtgggccgcgcggattatggcctga

SEQ ID NO: 137342 - DNA, 1866 bp, Enterobacter cloacae
atgagcaaaggatcgacaagcagtgacgccccgtttgggacattgttaggctatgcacccggtggcgtagcgatttattcatcgaattacagtagcttaaatccgcaggactacccggatgacgcgacgtttcgcagctacatcggtaatgagtatatggggcataaatggcagtgcgtggagtttgcgcgccgctttctgttcctgacctatggctttgtcttcaccgatgtggggatggcttatgaaatcttctccctgcgtttcctgcgcgaagtggtcaatgacaatattctgccgctgcaggccttcgccaacggctcccgccgtccgcctatcgctggttcgctgctgatctggcagaaggggggcgagtttaagcacaccggccatgtggcggtgatcacccagcttgtcggcaataaggtgcgtatcgccgagcagaacgtgattcactcgccgctgccgcagggccagcagtggacccgcgagctgaccctcgaggtcaacgacggccggtacaccatcaaagatacctttgccgataccgaaattttaggctggatgatccagaccgccgataccgaacacagcctgccgcagccggtgctgccgggcgaggcgatggccatcaaaggcgcgcggctgccaaacaacggccagtttcgcggtaaatggctgaacgagaaagacccgctgcagaaagcctacgtggcagccaacggtcatttcatcaaccaggatccctatcagtatttcaccatcagcgaaagtgccgaacaggagctgatcaaagccaccaacgagctgcacctgatgtatctgcacgccaccgataaggtgatgaaggatgacaacctgctggcgctgttcgatattccgaaaattctctggcctcgtctgcgcctctcgtggcagcgccgccgtcatcatatgatcaccgggcgcatggatttttgcatggacgagcgcgggctgaaggtgtacgagtacaatgccgattccgcttcctgccataccgaaggcgggctgatcctcgaacagtggctgaagcagggctactacggcaccggccacaatccggcggaaggtctgctcgatgagctggcgggggcgtggaaacacagccgggcgcggcccttcgtccacatcatgcaggacaaggatctggaagagaactaccacgcgcagtttattcagcgttcgctgacccaggccggttttgagagcaaaattctctttggccttgatgagctgcgctgggacgctgccggtcagctgatcgacgccgacgggcggctggtcaactgcgtctggaaaacctgggcatgggaaaccgccattgagcaggtgcgcgaagtcagcgccgaggagtacgcggcggtaccgattcgtaccggacatccgcagaatgaggtgcggctgattgacgtcctgctgcgtcctgaagtattggtattcgaacccctgtggacggtgatccccggcaacaaagccattctgccggtgctgtggtcgctgttcccgcatcatcgctatctgctggataccgattttgaggttaacgacgagctggcgaaaaccggctatgcggtgaagcctatttccgggcgctgcggtaacaatatcgacctgatcggccctcaggatgaacttctggataagaccagcggccagtttgtcgatcgcaagaatatctaccagcagctgtggtgcctgccgaaagtggacggtaagtacattcaggtgtgcacatttaccgtcggcggtaactacggcggtacctgcctgcgcggcgattcgtcgctggtggtgaaaaaagagagcgatatcgagccgttaatcgttttgaaagacaaagcatga

SEQ ID NO: 137343 - DNA, 1182 bp, Enterobacter cloacae
atgcacgatcggcgtctcgccgcccgcgcgggtgaactcaagccctccgccgtccgcgaacttctcaagcacagtaaactgcccggcgtgatttcgcttggcggcggcattccggccccggaactgtttgataccgaaggcctggagctggcggtgcagaaggtgatgagcgagcgttttaatgacgcattccagtacggtctgacggaaggctacccgccgctgcgccaggcggtgagtgaaatttgccactcccgtggcgtcgcctgttcagccgcccaggtctatatcacctccggctcccagcaatcgctggatatcgttgcccgtacgctgcttgatccgggcgatactatcgtcgttgagcgtcccacctatctggcggcgctgcaggtatttcagctggcgcaggccaatattctcagcgttgacaccgacgatgacgggatgctggtggagcagctggccgacctgctggagaccacccgcgtcaaagctgtttacctggtgccgacgttcggcaatcccggcggcaaaacgctgagcgaggcgcgtcgtcgccggttggttgagctggcgaaaaaatatgatttcgtcattctggaagacgatccctacggcgaaattagctttacagacgccgttagacgcccgctctatcagcatgctgtcgagctgggctgtgaagatcaggtggtttacacctcgactttttcgaaaatcctcgcgccagggatgcgtatcggctggatcgtcatgccggactggctggcgcagcagacggtgattgtgaagcaggcggcggatctgcataccaatatgctgtcgcaggtgatcactgcggaatacctcagtctgaaccggctggataaccagattgcgttgattcgcgaagactaccgcaagaagtgcgtggcgctggccgatgcgctggaaagccgccttggcgagcacctggaattcagccgcccgcagggggggatgttcctgtgggcgcgtttccgctatccgttcgataccatggaatggatgaagaaaacgctggaaaacggcgtggtgtacgtcccgggtgaagcgttctatcacgataagccggatacccgtaccctgcgtctttcttactccacggtgtcagaagccggattgctgacggccgttgagcggctggcggcctccctgtaa

SEQ ID NO: 137344 - DNA, 189 bp, Enterobacter cloacae
atgcctgtcattattgccagtagtgttaaagaagccaaagcgttaattaacggtggaaaatacagggaaattattcttaacttcgatattgatgccgatgactttttctctctcgccagccattccgccggaactaaaatctccatcgccgaccgcaacgatcgctctccggtagaatcagcaaaataa

SEQ ID NO: 137345 - DNA, 345 bp, Enterobacter cloacae
atgttgaaaaaattatccttaattatcccgctgctgtcgcttatcgcgctgctggtctggtggttcaccccgcattacaccgaggaagatgaagcttactaccgggcggtattttgcataatcgatcatgacgacagccgccagttcctccacgatatgcagaatatcgtcgaggggggaaattctgactacgcgctgcataaaacccattaccttccggcgctggggcagcggatgctggatacctggcgccagctcagcccgcaggaacagcaggtgctgcgtcaggacaagcagcgctgcggcgagatattgcgcgaaaaacaactggggaaatcatcctga

SEQ ID NO: 137346 - DNA, 603 bp, Enterobacter cloacae
atgaaaattatcgttatcggtgccagcggcaccatcggtcgcgcggtcagcgaagaactgagtcagagacatgaggttatccgcgtcggccgcacccggggagattatcaggtggatatcacctcgcaggagagcgtcgaggcgctatttgcccaaacgggtgaagtagatgccatcgtctccaccaccggcaatctgcactttgggccgttaagcaccatgaccgacagccagttcaacctcggactgcaggacaagctgctgggacaaattcgcctggcgctggtcggccagcattttctgcgcgacgggggggcgattaccctggtcagcggtattgtcgcgcaggaacccattgctcagggggtcaatgccacgacggtcaacgccggtctggaaggctttgtccgcgccgccgcctgcgaactgccgcgcgggatccgcatcaatctcatcagccccaccgtgctcagcgagtcgctggcggcctacggcgactttttcccgggcttccccagcgttcccgccgccgccgtggcgcaggcctatcgccgcagcattgaaggcgttcagaccggccgcatctacccggtcggctactag

SEQ ID NO: 137347 - DNA, 912 bp, Enterobacter cloacae
atggacaaattacgagggatggagacgtttattgccgtggtggagtgcggcagctttaccggggcggcgtcgcgcctggggctgtcggcggtgatggttgggaaatatatcgcccagttggaaagccagctggcgacgcgtctgctggagcgtaacacccgacgccagagcctcaccgatgccgggcgagtctattttgacgaagcgaaacgggtgatggagcaggtctccatcgccgaaagcgcggtcgagcggctgcggctggcgccggccggcaccctgcgggtgagcgctcccacctcgttcggcgccagcgtgatcgcgcccctgaccgccaccttcctgcaggcctggcctgcggtccgggtggaactggatctgactaaccggatggtcgatctggtggatgaggggttcgatctggcgatccgtatcggcgagatccatcaggaggatctggtggctcgctacctggcgccgtatcggatggtgatctgcgccgcgccggcttatctggcgcgttacgggacccccgggacgccagaggatctcgccgatcatctctgcctgtcccatacggtctggaccgcccgcaacgagtggcggctgccgggcgtagagggagaagtgcgctggaaacgcgatgcggttttgcgctgcaacgatggctacgcgctgcgccaggcggcgatcgccggggccgggctgctgatgcagccggaggtactgctggccgatgcgctggccagcggcagcctggttcgggtgctggaggcgtggactccgcagccgcggcctgtgcatctgctctggcgccaggatcgtcggcccctgccgaagctgacgcagtttatcgcccaccttcagcagggaatggccgacgcgctgacaacgacccgcgcgtcggaataa

SEQ ID NO: 137348 - DNA, 1149 bp, Enterobacter cloacae
atgtcatctatccacaccctgagtgtacatagcggaaccttcaccgacagccacggcgcagtgatgccgccgatttatgccacctccacttttgctcagccagcgccggggcagcataccggttatgaatattcccgcagcgggaatcccacccgccacgcgctggagacggcgatcgccgacctggaaaacggcacgcgcggctacgcgttcgcctccgggctggccgccatctccaccgtgctggagctgctggataaggacagtcacctggtggcggtcgatgatgtgtatggcggcacttaccgcctgctggaaaacgttcgccgccgtagcgcgggtctgcaggtgagctgggtgaaacccgacgacctggcgggaattgaagcggcgatccgccccgacacccgcatgatctgggtggaaacgcccaccaacccgctgctgaagctcgcggatctcagcgccatcgccgccatcgcgcgccgccataacctgatcagcgtcgccgataacacctttgcttcgccggcgatccatcgcccgctggagcatgggtttgatattgtggtgcactccgcgaccaagtacctcaacggccattccgatgtcgtcgccggcctggcggtggttggcgataactccgggctcgcggaaaagcttggctatctgcagaatgcggtaggcggcgtgcttgacccgttcagcagcttcctgacgctgcgcggcatccgtaccctggcgctgcggatggagcgccacagcgcgaacgcgctgcagctcgccgaatggctggaacagcagccggaagtggagcgagtctggtttccctggctggcttcgcacccgcatcatcagctggcgcgccagcaaatggccctgcccggcggcatgatttcggtggtggtgaagggcgatgaaggttacgccgagcgcatcatcagcaagctgcgctggtttacgcttgcggagagcctgggcggcgtggagagtctggtgagccagcccttcagcatgacccatgcctcgatcccgctggagaaacgcctggcgaacggtatcacaccgcagctgatccgcctgtcggtggggatcgaagatcccaacgatctgattgccgactggcagcaggcgctgcgggcggagtga

SEQ ID NO: 137349 - DNA, 1377 bp, Enterobacter cloacae
atggttatgtcactgtttcattccgtgagcgacctgatcggtcatactcccctgctccagttgcacaaactggataccgggccctgcagtctgtttttaaaactggaaaatcagaaccccggcgggtcaattaaagatcgggttgcgctgtcgatgattaatgaagccgagcgccagggaaaactggcgcccgggggaacgattatcgaagccaccgccggcaataccggcctcggtctggcgctgattgcggcgcagaaaaattaccgcctgatcctggtggtgccggacaaaatgagccgcgagaaaatctttcaccttcgggcgctgggcgcgacggtgctgctcacccgctccgacgtcaataaaggccacccggcctactaccaggattatgcccgccgccttgccgatgaaacgccgggcgccttttatatcgaccagtttaataacgacgccaatccgctggcccatgccacctccactgcgccggagctttatcagcagctggagggcgacatcgacgccatcgtcgtcggcgtcggctccggcggcacgctgggtgggcttcaggcctggtttgctgagcactcgccgaaaacggaatttattctcgccgatccggcgggttcgatccttgccgatcaggtcgataccggacgctacggcgaaacgggatcctggctggtcgaagggatcggcgaagattttatcccgccgctggccaggctggagggggtacataccgcgtatcgcgtcagcgactgcgaagcattccacaccgcgcgccagctgctgcaggtcgaaggagtgctggccggctcttccaccggcaccctgctcagcgccgcgctgcgctactgccggacgcaaagccgtccgaagcgggtggtgaccttcgcctgcgacagcggcaataaatacctgtccaaaatgttcaacgacgactggatgcgccagcaaggactgatcgcccgccccgaacagggcgatctcagtgattttatcgccctgcgccatgacgaaggcgctaccgtcacggccgcgccggacgacaccctggccgcggtctttacccgcatgcggctgtatgacatctcccagctgccggttctggaggatggccgcgtggtcggcatcgtcgatgagtgggatttgatccgccacgtacagggcgatcgccaacgcttctccctaccggttagcgaagcgatgagtcgccatgttgaaaccctcgataagcatgcgcccgagagcgaactgcaggccattctcgatcgcggtctggtggcggtgatcgctgacaacgcgcgttttcttggcctggtcacccgcagcgatgtattgaccgcctggcgtaaccgagtcgcacaataa

SEQ ID NO: 137350 - DNA, 669 bp, Enterobacter cloacae
atgaaactgcacgccctcgagatcccattcgcggtgacggatccccataatctcaccgctggcgctgcgggcagtgacgttaaactcggacgggagcgtcggcgggtcaatcaccagcgagtgatagcgggtcaccgtcaggggattattcagcccctgaaacaccccttcgccgttatgctcgataagcgaggttttgccatgcatcacctgggccgcccgcacgatagtcgcgccaaacgcctgggcgatcgcctgatgcccgagacagacgcccagcagcggcgtttttccggcatagtggcggataaccgcgagggaaatccccgcctcatccggcgtgcaggggcctggcgagatcacgattttctccggcgccagcgccgctatctcctccagcgtcaacgcatcgttgcgcctgaccagtacttccgcctccagttcgcagaagtactgatacagattccaggtgaaagagtcatagttatcgataagcaggatcatagcggctccggaacaatcaaaaccgggctattctactcagattcccgcgcttcgcttaccactttgcgaaagatcgccaccagcggggccagatcgcccatcgcgctctgctggcaggccgcactccagccggcggggtcaacgtcacgccagttaagaaggtag

SEQ ID NO: 137351 - DNA, 603 bp, Enterobacter cloacae
atgagcgataaattcggcgatgaacgcgatccttacctttatccggcgctgaacgtactgcgcaaccgtctcggcatccgccaggctaaaaatctgcagcaggccgcctttgagatgacagcgctgcgggcggccactctgccgctgggcccgcgggtgcgcggcttaccctatctgtgcgctattcatcatcagttgtatcaggatctgtttgactgggcgggccgcttgcgtgaagtgaacctctacctgggcgatacgccgttctgccactttgcccggatcgaggaggaggggaatgccctgatgcaggcccttgagcaggaggattatctcaatggcctgccgcgcgataccttcatcgaacgcctgagctggttctatggtgaaattaatgtgctgcacccttttcgtcttggcaatggcctgacccagcgcattttctttgaacagctggcgatacatgccggctaccttcttaactggcgtgacgttgaccccgccggctggagtgcggcctgccagcagagcgcgatgggcgatctggccccgctggtggcgatctttcgcaaagtggtaagcgaagcgcgggaatctgagtag

SEQ ID NO: 137352 - DNA, 168 bp, Enterobacter cloacae
atgcgtccactcaccgataagcaaaaatcccgactctgggaacagacacgcaataccaattttcaggccagccgtcgccttgaaggcgtgacggtgccgctggttacgctgactgccgaagaggcgctggcgcgtctggcgacgttgcggagggagtatgagcgataa

SEQ ID NO: 137353 - DNA, 570 bp, Enterobacter cloacae
atgctcaaatcaacactggcggcgatggctgccgttttcgctatttcagcgttctccccggccatggcggcaaagggcgatccgcatgtgctgctgaccacttcggcaggtaacattgagcttgagttaaacagccagaaagccccgatttccgtggataacttcctgaagtacgtcaacagcggcttctacaacaacaccacctttcaccgcgtgatcccgggattcatggtgcagggcggcggctttaacgaacagatgcagcagaagcagcctaacccgccgatcaagaatgaagcagacaacggcctgcgcaacacccgcggcaccatcgcgatggcgcgtaccgccgatcaggatagcgccaccagtcagttcttcatcaacgtggcggataacgccttcctcgaccatggccagcgcgactttggctatgcggtattcggcaaagtggtgaaggggatggatgttgcggataagatctctcaggtccagacccataacgttggcccgtatcagaatgtgccgaccaaaccggtcgttatcctctctgcgaaagtgctgccctaa

SEQ ID NO: 137354 - DNA, 1188 bp, Enterobacter cloacae
atgactaacagcaaccgtattaagctcacatggatcagcttcttctcctacgccctgaccggcgcgttggtgatcgtcaccgggatggtgatgggtaacattgcggattatttccatctgcccgtttccagtatgagcaacacctttacctttctgaacgccggtattcttatctccatcttcctcaatgcctggctgatggaaatcgtgccgctgaaaactcagctgcgctttggctttattttgatggtgctggcggtggccggcctgatgctcagccacagcctggcgctgttctccgcgtcaatgttcgttcttggcctggtgagcgggatcaccatgtcgatcgggaccttcctgatcacccatatgtatgaaggccgtcagcgcggggcgcgtctgctgtttaccgactccttctttagcatggcgggcatgattttcccgatggtcgccgccgtcctgctggcgcgcagcatcgagtggtactgggtctacgcctgtattggtctggtgtatgtcgctattttcgtcctgactttcggctgtgatttcccggtgctgggcaaaaaagcccagagcgaaaacagccagccggtggtgaaagagaagtggggcatcggcgtgctgttcctctccgttgcggcgctgtgctacatcctcggtcagctgggctttatctcctgggtaccggaatatgcgaagagcctgggcatgagcctcggcgacgccggtaaactggtgagcgatttctggatgtcctacatgatcggcatgtggtcattcagcttcatcctgcgcttcttcgacctgcagcgtatcttaaccgtcctcgccgggctcgcgacggtgctgatgtacctgtttatcaatggttcgccggagcatatgccgtggtttattctgaccctgggcttcttctccagcgccatttacacctcgatcattacgctcggttcacagcagacgcgggtcgcttcgccgaagctggtgaactttatcctcacctgcggcaccatcggcaccatgctcactttcgtggtcaccggcccgattgtggcggccagcggtcccctggccgcgctgcacaccgctaacggcctctatgccgtggtattcgtaatgtgctttatcctcggcttcgtctcccgtcatcgccagaacaacgctcaggcggcgtctcactaa

SEQ ID NO: 137355 - DNA, 429 bp, Enterobacter cloacae
gtgaaggagctgttggcggcggggatcaacgtttgctttggtcatgatgacgtctttgacccgtggtacccgctggggaccggcaatatgctgcaggtcctgcatatggggctccatgtttgccagctgatgggctaccagcagatcaacgacggcctgcagcttatcaccgacaacagcgcccgtacgtttggcctcgaggattacggcattgtcagcggcaacccggctaacctgatcattctcccggcggagaatggctttgaggccgtccgctgccaggtgccggtgcgctggtcaattcgccagggaagggtgatcgcgaccacccagccggcgcaaagctggatccaaactgaccgcggtggcgaggagctttcttttatgaggaacagcccccttgcggatgcaaaggggccgaaggcttag

SEQ ID NO: 137356 - DNA, 2544 bp, Enterobacter cloacae
atgagcaaagtcagaatcgctattatcggtaacggcatggttggccatcgctttatcgaagagcttctcgataaggcgcctgccggacagttcgacattaccgtgttctgtgaagaaccgcgtatcgcctacgaccgcgtccacctgtcgtcttatttctcccatcacactgcggaagaactgtcgctggtacgcgaaggtttctatgagaaacacggcgtcaaggtgctggtcggcgaacgggcgatcaccatcaaccgccaggagaaagtgatccactccagcgccgggcgtaccgtgttctacgacaagctgattatggcgaccggctcatacccgtggatcccgccgattaaaggcgcggaaacccaggattgcttcgtctatcgcactattgaagatcttaacgccatcgaatcctgcgcccgccgcagcaaacgcggcgcggtagtcggcggcggcctgctcggcctggaagcggccggcgcgttgaaaaacctcggtgtggaaacccatgttatcgaattcgcgccgatgctgatggccgaacagctcgaccagatgggcggcgagcagttgcggcgcaaaatcgaaagcatgggcgtgaaagttcacaccagcaaaaacaccaaagagattgttcagcagggcaccgaggcgcgcaaaaccatgcacttcgccgacggtagcgagctgcaggtcgatttcatcgtcttctcaaccgggatccgcccgcgcgataagctggccacccagtgcgggctgacggtcgcccagcgcggcggcatcatggtcaacgatagctgccagacctccgatccggatttctatgccatcggggaatgcgccagctggaacaaccgcgtctacggtctggtcgcccccggctataaaatggcccaggtggccgtcgaccatctcctcggcagtgaaaatagcttcaccggcgccgacctcagcgccaagctgaagctgttgggtgtggacgtgggcgggatcggcgatgcccacggccgcacgccgggcgcccgtagctacgtctatctcgacgaaagcaaagaagtttataagcgcctgatcgtcagcgccgacaacaaaacgctgctcggcgcggtactggtcggcgataccagcgactacggcaatctgctgcagctggtgctcaacgccatcgagctgccggaaaacccggattcgctgatcctcccggcccacgccggcagcggcaagccatcgatcggcgtggataaactgccggacagcgcgcagatctgctcctgctttgacgtcagcaaaggcgacctgatcgccgctatcaacaaaggctgccacaccgtggcggcgctgaaagcggaaaccaaagccgggaccggctgcgggggctgtattccgctggtcactcaggtgctcaacgccgagctggcgaaacagggcatcgaggtcaacaacaatctgtgcgaacacttcgcctactctcgccaggaactgttccacctgatccgcgtggaaggcatcaaaaccttcgacgagctgctggaaaaacacggtcagggctacggctgtgaagtctgtaagccgaccgtcggttccctgctggcctcctgctggaatgagtacatcctcaagccgcagcacacgccgctgcaggacagcaacgacaacttcctcgccaacattcagaaagatggtacctattcggtgatcccgcgctcagctggcggcgaaatcacgccggaagggctggtcgccgtgggccgcatcgcgcgtgaattcaatctgtacaccaaaatcaccggctctcagcgcatcggcctgtttggcgcgcagaaagacgacctgccggagatctggcggcagctaattgaagcgggattcgaaaccggccacgcctacgccaaagcgttgcgaatggcgaaaacctgcgtcggcagcacctggtgccgctacggcgttggcgacagcgtcggcttcggcgtggaactggaaaaccgctacaaaggcatccgcaccccgcacaaaatgaagttcggcgtctccggctgcacccgcgaatgtgccgaggctcagggcaaagacgtcgggatcatcgccaccgagaaaggctggaacctgtacgtgtgcggtaacggcgggatgaaaccacgccacgccgatctactggccgcggacctcgatcgcgatacgctcatcaaatatctcgaccgctttatgatgttctacatccgcaccgccgataagctgacccgcactgccccgtggctggacaatatggaaggcggtatcgactatctgcgcagcgtcatcatcgatgacaagctcggtctgaacgaccatctggaagaagagctggctcgcctgcgcgccgccttcgcctgcgagtggaccgagaccgtcaacaacccggcggcgcagacccgcttcaaacactttatcaacagcgaccagcgcgacccgaacgttcaggtggtgcccgaacgtgaccagcaccgcccggccacgccgtatgagcgtatcccggttactctggtggaggaaaaagcatga

SEQ ID NO: 137357 - DNA, 327 bp, Enterobacter cloacae
atgagccagtgggtaaatatctgcagcatcgacgacatcctgccggccaccggcgtctgcgccctgctcggtcagcagcaggtggcgatcttccgtccctaccatgacgacaggatattcgccatcagcaacattgatccgttcttcaacgccagcgtactgtctcgcgggattatcgccgagcatgacggcgcgctatgggtcgccagcccgctgaaaaaacagcgcttccgcctgagcgacggcctgtgcatggaagatgccagccactctatcgcccgcttcgacgcccgcgtgaaagacggacacgttcagcttaaagcgtaa

SEQ ID NO: 137358 - DNA, 1374 bp, Enterobacter cloacae
gtggatcacttacccatattctgccagttgcgccagcgcgattgtttactggttggcggcggggatgtcgccgaacgcaaagcccgtctgctgctggatgctggcgctaacgtcacggtcaatgcgctcgacttcacgccccagtttcaggtgtgggctgattcacagatgctaactctggtgcagggggagtttatcccctcgctgctggataactgctggctggccatcgccgctactgatgatgagacggtcaaccagcaggttagcgaggcggccgaagcgcggcgtatcttctgtaacgtggtggatgccccgcgccaggccagctttatcatgccgtcgatcatcgatcgctcgccgctgatggtcgccgtctcctcgggcgggacatcaccggttctggcgcgcctgctgcgcgagaaactggagtcaattctgcccctgcatctcggccagctggcccgctatgccggccatctgcgcgcgcgggttaagcagcagtttgccaccgtaggcgagcgtcgccgcttctgggagaagctgtttgttaacgaccgtctggcgcagtcgctggctaatgacgatcggcaagcagtcgcggataccactgagcagttgctgacggagccgttggagcatcgcggcgaggtggtgctggttggcgccggccccggtgacgccgggctgctcacgctcaaaggcctgcagcagatccagcaggctgacgtggtggtctatgatcggctggtctccgatgacatcatgaatctggtgcgccgcgatgccgatcgggtattcgtcggcaagcgctcaggctaccactgcgtcccgcaggaggagatcaaccagatcctgctgcgcgaagcgcaaaaaggaagacgcgtggtccggctgaaaggcggcgatccctttatctttggccgcgggggggaagagctggagacgctttgcgaggcgggcatccccttctccgttgtgcctggcattaccgccgcctccggctgctccgcttattcggggatccccttgacccaccgcgatttcgcgcagggcgtccgcctggtcactggccacctgaaaaccggcggcgagctggactgggcgaacctggcggtggagaagcaaaccctggtgttctacatgggtctgaaccaggcgccggcgatccgcgagaagcttatcgctcacggcatggctgaagatatgcccgccgccatcgtcgagaacggcaccgctgtgacgcaaaaagtggtcagcggcaccttaggacaactggatattctggcgcagcagatggccagcccggcgctgatcatcgtcggccgcgtggtcggtctgcgggataaactgaactggttttcgaaccattaa

SEQ ID NO: 137359 - DNA, 1005 bp, Enterobacter cloacae
atgactaagcccatcgtttttagtggcgcacagccctcaggtgaactgaccattggcaactatatgggtgcgctgcgtcagtgggtaaacatgcaggacgattaccactgcatctattgcatcgtggaccagcacgccatcaccgtgcgccaggatccgcagcagctgcgcaaggcgacgctggacaccctggcgctgtatctggcctgcggcatcgacccgcagaaaagcactatcttcgtgcagtcgcacgtgccggaacatgcccagctaggctgggcgctgaactgctacacctatttcggcgaactgagccgcatgactcagtttaaagacaagtcagcgcgctacgcggagaacatcaacgccggtctgtttgattatccggtactgatggccgctgacattctgctgtaccagaccaaccaggttccggtgggcgaagatcagaaacagcaccttgagctaagccgcgatatcgcccagcgttttaacgccatctacggcgatatttttaaagtgcctgagccgtttatccctaaatccggcgcgcgcgtgatgtcgctgctggagccgacgaaaaagatgtccaagtccgacgacaaccgcaacaacgtcatcggcctgctggaagatccgaaatcggtggtcaagaagattaaacgtgcggtcaccgactccgacgagccgccggtagtgcgttacgatctgaaagagaaagcgggcgtctccaacctgctggatatcctctccgcggttaccgggaaaactattcctgagctggaacagcattttgaaggcaaaatgtatggccacctgaaaggcgaagtcgccgaagcggtatcgggcatgctgattgacctgcaggagcgctatcaccgtttccgtaacgacgaagcatttctcaatcaggtgatgaaagacggtgcggaaaaggccagcgcgcgggcttctcaaaccctgaaagcggtatacgaagcgattggctttgtcgccaagccgtaa

SEQ ID NO: 137360 - DNA, 762 bp, Enterobacter cloacae
atggataaattacaggcgatccgcggcatcgcatttgatctcgacggcacgctggtggacagcgcgccgggtctaacctcggcggttgataacgccctgtacgccctggagctgccggtggcgggagaagaacgcgttatcacctggatcggtaacggcgccgatgtcctgatggagcgggcgctgacctgggctcgtcaggagcgagcaacgttacgtgcggcgatgggcaagccttccgtcgacgatcatgatattccgcaagacgagcagctgcgcattttgcgtaaactgtttgaccgctattacgccgaagcggcggaagagggcagtttcctgttcccggcggtggccgatacgctcggcgcgctgcatgccaaaggcctgccgctggcgctggttaccaataagccgacgccgtttgtcgccccgctgttggacgcgctcgatattgcgaaatattttaccgtggtgattggcggcgatgacgtgcagaataaaaagccgcatccggaaccgctgctgctggtggcggaaaagctctctctggctccagccgagctgctgtttgtcggcgattcgcgcaatgatattcaggcggccaaagcggcaggctgctgctctgttggtctgacctacggttataactatggtgaaccgcttgcgctgagcgagccggactatctcttcgaccagtttaacgaactcttacccgctctcgggttaccgcacagtgaaactcaggaattgaaacatgactaa

SEQ ID NO: 137361 - DNA, 678 bp, Enterobacter cloacae
atgaagcagtatttgattgccccttcgattctgtcggctgattttgcccgtctgggtgaggataccgcgaaggcgctggcggcgggtgcggatgtcgtgcacttcgacgttatggacaaccactacgtgccaaacctgacgattggcccgatggtgctgaagtcactgcgtaattacggtattaccgcgccaatcgacgttcacctgatggtgaagccggtcgaccgcatcattcctgattttgccgaagccggcgccagcattatcaccttccatccggaagcctccgaacacgtcgatcgcagcctgcagcttatcaaagagcacggctgtaaagcgggcctggtgtttaacccggcgacgccgctgagctacctcgattacgtgatggataagctggacgtgatcctgctgatgtcggttaacccgggctttggcggccagtcctttattccccagacgctggataaactgcgtgaagtgcgccagcgcatcgatgcgtccggctacgacatccgcctcgaagtggatggcggcgtgaaagccagcaatatcggcgaaatcgccgcggcgggtgcggatatgtttgttgccggttcggcgatcttcggtcagccggactacaagcaagtcattgatcaaatgcgtagtgaattagcgaaggtgagtcatggataa

SEQ ID NO: 137362 - DNA, 828 bp, Enterobacter cloacae
atgaaaaagaatcgcgcttttctgaagtgggcagggggaaagttccccctgcttgacgatattaaaaagcatttgccggaaggcgagtgcttgatcgagccctttgtgggcgccgggtcggtatttcttaataccgacttttctcgttatatcctcgcggatatcaacagtgacttaatcggcctgtacaacatcgtcaaactgcgcaccgacgaatacgtcgccgccgcccgtgagatgtttaccccggaaaataacgtcgctgagcgctactacctgtatcgtgatgaatttaaccaaagccaggatccgctgcgtcgcgcggtgctgttcctgtatttgaaccgtcacggctacaatggcctgtgccgctacaatctgcgcggcgagttcaatgtgccgtttggccgttataaaaagccctatttccccgaagctgagctctatcatttcgccgagaaggcgcaaaacgccgagttttactgcgaatcttacgaagagtgcatgcaacgtgcggatagccgcacagtggtgtattgcgatccgccctatgcgccgctaacggcgacggcgaactttaccgcctaccacaccaacagtttcaacctggaacaacaggtactgctggcgcaaaaggcggaatcgctgatgaaaaagcgcatcccggtgctgatttccaaccaccgcacgccgctgacgcaggaatggtataaaaacgcggcagaaacgcatattgtgaaggttcggcgcagcatcagcagcaacggtggtacgcgtaaaaaggtggacgagctattagcgctctaccgtccgcctaagaccaaataa

SEQ ID NO: 137363 - DNA, 1287 bp, Enterobacter cloacae
atggatgatttcaaaccagaagacgatatgaaagccgatcgcaacgatcgtcgtgctggtcgttcccgtcagtcttccgagcgtgatgccgatccgcagatcaattttgacgatgttgatcttgatgccgatgaaggccgtccgacgcgcgctggtaaggcccgtcgcgagcgtgaagaggaagagttcgaagaagaactggatgcgcaagacgaggagatgctcgaagagcagcctgtagagcgtcgtccgcgcaagcgtaaaaaagcgccggccaaaccggcctcccgccagtacatcatgatgggtgtggggattctggtgctgctgctgttgatcgtgggtatcggttccgcactgaaatcgccatcatcttccagccagcagaccgcttccggcgagaagagcattaatctgtctgacgaccagtccgccagcatgcctgctgccggccaggaccagactgccgccgctaacagcacctcacagcaggacgtaacggtaccgcctattgccgcgaacccgacgcagggccaggcagcggttgcgccgcagggccagcagcgtatcgaagttcagggcgatctgaacaatgcgttgacccagcagcagggccaactggacggcgccgtggctaactcgacgctgccgactgaaccggctaccgtcgcgccaatccggaatggcgccaatggcaccgcggcgccgcgccaggcgaccgagcgtcagacagcagcgaccccgcgtccggctgaacgtaagcataccgttatcgaagcgaagccgcagtcgaagccacaggccgtggcgaaaacgccggtagaatcgaagccggtccagccgaagcatgttgaaagcacggcgaccaccgctccggcgaaaacgtccgtcagcgaaagcaaaccggtggccaccgctcagagcaaaccgaccacgacgaccgcagcgccagcggcaacggcagctgcggcagcgccggcagcgaagaccgggaagacggcaggtgacgtcagctcaatgaaaactgcgccgtcgggtcactatactctgcagctcagcagctcctctaactacgacaacctcaacaactgggcgaagaaagagaagctggataaatatgttgtctatgaaacgtcgcgtaacggccaaccatggtacgtgctggtgagcggtatctatgcatcgaaagatgaagcgaaacgtgctgtcacctcgctgccggcggacgtgcaggcgaaaaatccatgggcaaaaccgctgcatcaggttcaggctgacctgaaataa

SEQ ID NO: 137364 - DNA, 1095 bp, Enterobacter cloacae
atggagaggcttactgttaccctcggggaacgtagttacccgattaccatcgcggctggtttgtttaacgatccagcttccttcctgccactcaagtcgggcgaccaggctatgctggtcaccaacgaaacgctggcgccgctttatctggataccgtccgctctgcgctggagcagtcaggggtcaacgttgacagcgtcattctgccagacggcgagcaatacaaaagcctggcggtgatggataccgtgtttactgcgctgttgcaaaaaccacatggccgcgacaccactctggtggcgcttggcgggggggtgatcggtgatttaaccggtttcgccgcggcaagctatcagcgcggcgtgcgtttcatccaggtccctaccaccctgttgtcgcaggtcgactcgtcggtcggcggcaaaaccgcagtgaaccaccctctcggcaaaaacatgattggcgccttctggcagccggtttccgtggtagttgatcttaactgtctgaaaactctgccgaagcgcgagctcgcttccggactggctgaggtcatcaagtacggggtgatcctggatggtgaattcttcagctggctggaaaacaacattgatgcgctgctggcgctggacgataccgccatggcgtactgcattcgccgctgctgtgaactgaaagcggaggttgtggcagccgacgagcgtgaaaccgggttacgtgctttactcaatcttggacataccttcggccatgctatcgaagcggaaatgggctacggtaactggctgcatggcgaagcggtggcggcaggtatggtgatggcggcacgcacgtccgaacggctggggcagttccgcgcgcaggatactcagcgcattatcgagctgctcaagcgtgcaggcttaccggtacgcggcccgcaggaaatgagtgcgcaggcgtatttgccccatatgatgcgcgataaaaaggtactggctggcgaaatgcggctggtgctcccgctcgcaataggaagcagcgagctgcgcggcggagtgccgcacgatgtggttcttggcgcgattgctgatactcagcaggcgcaacaataa

SEQ ID NO: 137365 - DNA, 486 bp, Enterobacter cloacae
atgggtgccggcaaaagcactattgggcgccagttagcccaacagctcaacatggaattttacgattctgatcaagagattgagaaacgcactggcgctgatgtgggctgggtcttcgatgttgaaggcgaagaaggcttccgtgaccgtgaagagaaaattatcaatgagttgacggaaaaacaggggattgtgctggcgactggcggcggctctgtaaaatcccgtgaaacgcgtaaccgtctctccgcccgcggcgtggtggtctacctggaaactacgatcgagaagcagttggcccgtacgcagcgcgataaaaagcgtcctttgctacaagtcgatgcgccgcctcgtgaagtgctggaagcgctggctgacgagcgtaacccgctgtatgaagagatcgccgatgtgactatccgcacagacgatcagagtgcgaaagtcgtcgcgaaccagattattcatatgctggaaagcaactga

SEQ ID NO: 137366 - DNA, 1452 bp, Enterobacter cloacae
gtgcttgagctgactatcaacaccaacggtggcgatattgagcaggcgctgcttctggcgtatccaaaaacgctgaaatcgaccgaaccgttccagttactggaaaccacgccgcagtttgtctaccaggcgcagagcggcttaaccggccgtgacggtccggataacccggcaaacggcccgcgtccgctgtacaacgtcgataaagaggcgtttgtgctggccgatggccaggatgagctcgttatcccgctgacctacactgacaaagccggcaacgtcttcaccaaaaccttcaccctgaagcgcggtggctatgcggtgaacgtgggttacagcgtgcagaatgccagcgagaagcctctggaagtctcaaccttcggtcagctgaagcagaccgctgcgctgccgaccagtcgcgatacgcagaccggtggcctgtccacgatgcatactttccgtggcgccgcgttctccactgcggattcgaaatacgagaaatataaattcgataccattctggataacgaaaacctgaacgtcagcaccaaaaacggttgggttgccatgctgcagcagtacttcaccaccgcatgggtgccgcggaataacgggacgaataacttctacaccgccaacctcggcaacggcgttgtcgctattggctacaaatcgcagccggtactggtgcagccaggccagaccgacaaactgcagagcacgctgtgggtcggcccggctattcaggacaaaatggctgccgttgcgccgcacctggatctgaccgtcgactacggctggctgtggttcatctcccaaccgctgttcaagctgctgaaattcatccacagcttcctcggcaactggggcttctcgatcatcgttatcacctttatcgttcgtggcatcatgtacccgctgaccaaagcgcagtacacctccatggcgaagatgcgcatgctgcagccgaagattcaggccatgcgtgagcgtctgggcgacgataaacaacgtcaaagccaggagatgatggcgctgtataaagcggaaaaagtaaacccgctgggcggctgcttcccgctgattattcagatgccgatcttccttgcgctgtattacatgctgagcgcctcggttgaactgcgtcatgcgccgtttatcctgtggatccacgacctgtctgctcaggacccgtactacatcctgccgatcatcatgggcgcgaccatgttcttcatccagaagatgtcgccgaccaccgtgaccgacccgatgcagcagaagatcatgacctttatgccggtcatcttcacggtgttcttcctgtggttcccgtctggcctggtggtgtactacatcgtcagcaacctggtcaccattattcagcagcagctgatttaccgtggtctggagaaacgtggcctgcatagccgcgagaagaagaaatcctga

SEQ ID NO: 137367 - DNA, 1365 bp, Enterobacter cloacae
atgagccataacgacactatcgtcgcccaggcaacccctccgggacgcgggggtgtgggcatcctgcgtatctccggccttaaggcgcgcgacgtcgcgcaggcggtgctgggcaagctgccgaagccgcgctatgccgactacctgccgttcaacgacgttgacggtaccccgctggatcaggggattgcgctgtggttccccgggccgaactcctttaccggggaagatgtgcttgagctgcagggccacggcggcccggtcattctcgacctgctgcttaaacgtattctgaccctgccgggcctgcgcatcgccaggccgggtgagttttccgagcgcgcgttcctcaacgacaagctcgatctggcgcaggcagaggccatcgccgaccttatcgacgccagttcagagcaggcggcgcgctcggcgctgaattcgttgcagggggcgttctccgcgcgggtgaatcatcttgtggaagcgctcactcacctgcgcatctacgtggaagcggccattgacttcccggatgaagaaattgatttcctctccgacggcaaaattgaagcccagctgaacgaggtgatggccgatctcgacgccgtccgcgcggaagctcgtcagggcagcctgctgcgcgaagggatgaaagtggtgatcgccgggcggccaaatgccggtaaatcaagcctgctgaacgccctggcgggccgcgaagcggcgatcgtcaccgatatcgccggtaccacccgcgacgtgctacgcgagcatatccatatcgacggcatgccgctgcatatcatcgataccgcaggcctgcgcgatgctaatgacgaagtggaacgtatcggcatcgagcgcgcctggcaggagattgcccaggccgatcgggtgctgtttatggtcgatggcaccaccaccagcgccgttgacccttcggagatctggccagactttatcgagcgcctgcccgctaaattgccgattaccgtggtgcgcaataaagccgatgtcaccggcgaagcgctcggtatcagcgaagtaaatggccactcacttattcgcctgtcggcacgtaccggcgaaggcgtggaggtgctacgtaaccacctcaagcagagcatgggcttcgataccaatatggaaggcggcttcctcgcccgccgccgtcacctgcaggccctggaagaggcggcgaaccatctgcagcaaggcaaagcccagctgctgggcgcctgggccggcgagctgctggcggaagagctgcgcctcgcgcagcaggcgctgagcgagatcaccggggagttcacttccgacgatctgctgggccgcatcttctccagcttctgtatcggcaagtaa

SEQ ID NO: 137368 - DNA, 420 bp, Enterobacter cloacae
atgaccgttgaatataccgtgatcgagaaggtgccctccgccgaagcgttttgccacctgcgggtagccgccggcatgtcgccgcgccccctggaaggcgccagagccggactgccgcatagctgttatggcgtacatatcctctggcaggagacgccgatcgcgatgggacgcatcgtcggcgacggcgcgattaatttcgatattgtcgacgtcgccgtcgatccggctcaccagggaaaaggccttggccggctggtgatggagaagctggtcgcctggctggacgctaacgcctttgatggcgcctacgttacgctggtggcggatgtgccggaactgtacgcgaagttcggcttcgaaagcgttcgcccggagagcgaggggatggcccgcgtctggcgaacccgcagtcgttag

SEQ ID NO: 137369 - DNA, 1179 bp, Enterobacter cloacae
atgacacgctttcttctctgcagctttgccctggttctgctctacccctccggcatcgatatgtatctggtcggcctgccgcgtattgctcaggacctgggggccagcgaggcgcaattacatatcgccttctcggtctatctggccggtatggcctccgcgatgctgtttgctggccgcatcgccgaccgctcggggcgtaagcctgtcgctattgtaggtgcagcgatctttgttatcgcctccctgctctgcgcccaggcgcataccagcagccacttcctcatcggacgctttatccaggggatcggcgccggcagctgctacgtggtggctttcgctatcctgcgcgatacgctggacgaccgtcgccgcgccaaggtgctgtcgttgctcaacggcatcacctgcattatccccgtcctggcgccggtgcttggccacctgattatgctgaaatatccgtggcagagcctgttctacacgatgaccggcatgggcgtcatggtcgctgtgctgtcggtctttatcctgcgtgaaacgcggccgacggcgcctccgcaggcagcgtcaccgcagcatgacgctggcgaatcgctgttgaaccgctttttcctcagccgcttactcattaccaccctcagcgtgacggtgatcctgacctacgttaacgtctcgccggtactaatgatggaagagatggggttcgaccggggaacttactcaatggcgatggctctgatggcgatgatcagcatggcggtctccttctcaacgccgttcgccctgtcgctgtttaatccccgcaccttaatgctgacctcacaggtgctgtttctggcggcaggcgtgacgctgagcctcgccactcgccaggccgtcaccctgatcgggctgggcatgatttgcgccggcttctccgttgggttcggcgtcgcgatgagccaggcgctggggccgttcacgatgcgcgcgggcgtcgccagctcggtcctcggcatcgcgcaggtgtgcggttcatcgctgtggatttggctcgccgccatcatcggactcagcgcaatgaatatgctgatcgggatactcattgcctgtagcatagtgagccttgttttgttactggtcgtcaccccgccgcgggttgcgcaatacgatgaagaagccgctgtcgagtcttga

SEQ ID NO: 137370 - DNA, 960 bp, Enterobacter cloacae
atgaagaagccgctgtcgagtcttgatcttaatttactcctctgcctgcagctcctgacccaggagctcagcgttacccgtacggcgaagcggatgaacgtttcgccgtcagcggtgagcaagtcgctggccaaactgcgcgcctggtttgacgatccgctgtttgtgaaaaccccgctgggcctggcgcccacgccgctggtcagcagcatggagcaggatctggcggactggatgcagatgggcaaccaaatcctcgataaaccgcaccataccatgcccagcggcctcaaattcgaactggcggcggaaacgccgctgctgatgatcctgtttaacaccctctctcagcgcatctatcagcgctatccgcaggcattgattcgtttgcgcaactgggactacgactccctggacgccatcatccgcggtgaggtggatatcggcttctgcggacgcgaaagccatccgcagtcgcgtgagctgctgagcctgctgccgtggtatatcgattttgaggtgctgttcaccgacctgccgcaggtctggctgcgcgccgatcatccggcgctcggggaagagtgggatctggcggcattcttacgctatccgcatatcactatctgctgggaacaacgcgatacctgggccctggacgacgtgctgcaggagctggggtataagcgtaacgtggcgctgaccgtgccggggtttgagcaatcactttttatggccgctcagccgcagcacaccatgctggccaccgcgccgcgctactgtcagcactataatcagcagcaccagctgccgctcgtctcccggccgctccccctggaggcgcagcatctggaaaagctgcgcgttcccttcaccctgctatggcataagcgcaacagctacaacccgaagcttgtctggcttagagatacgctgaaagcgctctattccggtacgctttaa

SEQ ID NO: 137371 - DNA, 729 bp, Enterobacter cloacae
atggcaacgcattttgcaagagggatactcagtaccggggagccgctatcgacacgtttgtcagcggcctgtcatcaatccgcacgtcttctcccgacatatcgccaggctcgcttttgcgcgtcgcgctcgctgcttgccgagctgctgtttatgctttacggcatcagcgagctgcctgaaatcatcaacgaagcgaatggccgaccggtttttagcgatcgccaactcccccgcttttcgatcgcttatactggcaatatcgttggtgttgccctcaccaccgagggggattgtggcctcgacatggaactgcagcgcactgtccgcagccacgacgccgaccggcacaatttcagcaacaatgagaatctgtggattaacatacagcatgatccggacgaagcgcgcagccagctggtagcgctgcgccgcagcgtgctaaagctgaccggcgaagcatcaacgcagctgcagctgctgcccggctctggccgcctgcgcaccgccggcagtcagccaatcgaagcggtatgtgacgccgaatcgctgctggtatggtccattgccgcaaccccgaacatcggctcgctgaaggtctgggaatatgatgctaagggaggtgactggcgcagcctggcggatgcgcagcagcgcgcacgcgaaccgtcagcccgcctgatgcgctttaccagcttacccatggaaaaaaccttatccctcaattga

SEQ ID NO: 137372 - DNA, 567 bp, Enterobacter cloacae
atgtcagataccttgaaagtggttacgttactcggcagcctgcgtaaagggtcgtttaatggaatggtcgcgcgcaccctgcccggcatcgcgccagcgggcatggatatctccgcgctgccgtcgatcggtgatatcccgctgtacgatgctgatatgcaggaggaagaaggttttccgcagcgcgtgcaggagattgcgcaacagatccgcgaggcggatggggtagtgatagtcactccagaatataactattccgtgcctggcggcctgaaaaacgccatcgactggctgtcacgcctgcccgagcagccgctgtccggcaaaccggtactgattcagaccagctcaatgggcgccatcggcggtgcgcgctgccagtatcatctgcggcagattctggtcttccttgatgcgatggtaatgaataaaccggaatttatgggcggcgtcatccagaacaaagtggatccgcaggcgggtgaagtggtcgatcaaagcaccctcgaccatctgcgcggccaactgaccgctttcggcgactatattcggcgggttaaagcataa

SEQ ID NO: 137373 - DNA, 1338 bp, Enterobacter cloacae
atgagtcaacaacaaaccagccagtcttctggcgagggtctgctggagcgcgtatttaagctgcgcgagcacggcaccacggtgcgcaccgaagccatcgccggtttcaccacgttcctgacgatggtgtatatcgtttttgttaacccacaaattcttggcgtagcgggcatggataccagcgccgtgtttgtgaccacctgtctgattgccgctttcggcagtatcctgatgggtctgttcgcgaacctgccggtcgccctggcgccggcgatgggcctgaacgcctttttcgcctttgtggtggtgcaggcgatggggctgccgtggcaggtgggcatgggtgccatcttctggggcgccgtgggcctgctgctgctgaccatcttccgcgtacgttactggatgatcgccaatattccgcttagcctgcgtgtaggtatcaccagcggtatcggcctgtttatcggcatgatgggcctgaaaaacgccggggtgattgtcgccaatccggaaacgctggtcagcattggtcatttgacttcccacagcgtactgctgggcgtgctgggcttctttatcatcgcgattctggcgtcgcgcaacattcacgccgcggtactggtctctatcgttgtgaccaccctgctgggctggatgctgggcgacgtgcattacaccgggatcgtctcggcgccgccgagcgtggcttcggtgattggtcaggtcgatctggcgggctccctgaacctgggcctggccggcgtgatcttctcctttatgctggtcaacctgtttgactcctccgggacgctgattggcgtgacggataaagcgggtctcgcggatgccaacggtaaattcccgcgcatgaagcaagcgctgtttgtcgatagcgtctcgtcggtggcgggctccttcatcggtacctcgtcggtgacggcctatatcgaatcttcttccggcgtttccgtgggcgggcgtaccggcctgaccgccgttgtcgttggtatcctgttcctgctggttattttcctctctccgctggcggggatggttcctggctatgccgccgcgggcgcgctgatatacgttggcgtgctgatgacctccagcctcgcgcgcgtgaagtggagcgacctgaccgaggcggtgcctgcgttcatcaccgcagtgatgatgccgtttagcttctcgatcaccgaaggtatcgccctaggctttatctcttactgcgtgatgaagatcggtaccggccggctgcgcgagctcagcccgtgcgtgattatcgtttcgctgctgttcgtgctgaaaattgtctttatcgatgcacattaa

SEQ ID NO: 137374 - DNA, 666 bp, Enterobacter cloacae
atgactcaaccagaagcagtattttttgactgtgacggcacgctggtcgacagcgaggtgatttgctcccgcgcctacgttcacatgtttcaggaattcggcattacgctggacctcgccgagatttttaagcgcttcaaaggtgtgaagctgtacgaaattatcgacaccatcaacgctgagtatggcgttaacctgcaaaaggccaccctggagccgatttaccggacggaggtcgctcgcctgttcgatagcgagctggaggtgattcccggagcccaggcgctgctggatgcggtaagcgtcccgatgtgcgtggtttccaatggcccggtcagtaagatgcagcactcgctcggacgcaccggcctgctgcgccatttcactgaccgcttgtacagcggctacgatattcagcgctggaagcccgacccggcgctgatgtttcatgcggcagaggccatgcaggtaaaagccgaaaactgtattctggtggatgactccagcgccggcgctcagtcggggattgccgccggcatggaagtgttttatttctgcgccgatccgcacaaccagccgatcgatcatcccaaagtgacgacctttaccgatctggcagagctgccggcattgtggcaggcgcgcggctgggatatcacgcgttaa

SEQ ID NO: 137375 - DNA, 720 bp, Enterobacter cloacae
atgaaaatgattgtgaccgaagattatgaagagatgagcctggtcgccagccatcatgttctgggctatatcacggcgccgcggcgggtgaatctggcggtgacggcggggagcacgccaaagcggatgtatgagcatttgaccgccgccgtgaaaggcaaagcattctatgatcgggtgcactattacaacttcgatgagatcccttttcgcggccagtcgcgagaaggcgtcacgatatctaatttgcgccagctgttttttaccccggcgcagatcaaagaagagaacattcacaagctgacgctggacaacgccgctcagcacgatcgccatctggaaaaggctggcggtctggatctgatggtgctggggctgggggccgacggccatttttgcggcaacctgccgaataccacccgctttcatgatcagacggtcgaagtgccgattcatggggaaatgattgctcttatcgctaacagcgagatgggcggggatatctcggcagtaccagacagctatgtcaccatggggccgggaagcgtgatggcggcgaaaaatttattgctaattgtcagcggtgcggcaaaagcgcacgcgttaaagcaagtggtggaaggtccggtcagcgtgcaggtgccggcttcagtgctcaaattgcacccttcactggtgattattgccgataaagcggcggcggcggaattgcagcaataa

SEQ ID NO: 137376 - DNA, 1167 bp, Enterobacter cloacae
atgaaacgacatgcaatttatttcgccctggcgctggcgggcgcggcgtttaccctccaggcggcgccattacccgcgatgccggacccaagcctgccggtgagccactttatcacccaggttaacgcggataagagtatcacttaccgcttgtttgcccctgatgcccggcgggtctcgatagtgactggcgccacgccggactcctttgtctcgcacgacatgaccaaggcagcggacggagtctggacatggaaaagcgagccgatgaagcccaatctctatgaatactatttcgatgtggatggcttccgctcggtagataccggcagccgctatcagaagccgcagcgccaggtgaacaccagtctgattctggtgccgggcagtattcttgacgatcgggaggttgcgcatggcgatctgcgcaccctcacctatcactcgaaggctctgaacgccgaacgtcgtctctatgtctggacgccgccgggctatagcggaaccggcgatccgctgccggtgctctatttctatcatggctttggcgacagcggcctgtcggccatcgatcaggggcggatcccgcaaatcatggataacctgctggcggagggcaagattaagccgatgctggtggtggtcccggataccgaaaccgatatcccggaagcggtagcggaagacttcccgccgcaggagcggcgcaaaaccttctatccacttaatgcgcaggcggcggataaagagctcatgcaggatattattccgctgatcgatgcccgatttaacgtgcgtaaagatgccgacggtcgggcgctggcgggcctctcgcagggcggttatcaggcgctggtttccggaatgaatcatctggagagctttggctggctcgccacctttagcggcgttacgactaccacggtgccgcatgccggcgtggaagcgcagctgaagcagcctgacgcgatcaataagcagctgcgtaactttaccgtggtcgtcggggaaaaagattctgtgaccggtaaagacattgctggtctgaaaagcgagctggaaaaacagcagattaaatttgattaccaccagtatcccggcctgaaccatgaaatggacgtctggcgcccggcctacgccgagtttgtgcaaaaactgtttaaataa

SEQ ID NO: 137377 - DNA, 1635 bp, Enterobacter cloacae
atgatgagaaaaaacaggatcgcttcggcgatagtcttgctggcgccactttgttattcaactaatctgctagcgagccagttgacggtggaacaacggcttgagctgctggaaaaagcgctcaaagacacgcaaaaagagctcaaaaaatatcaggaccaggaaagaaaaagagaccagatttgggcctcatggtctcctcctgcggaaggtcagaagcgcaagaccgggggggcgaccgccgggccgaaaacggcggttaaaccggatgcggtgctggttaaaaatcaacaacctgtcaccgatggcgcgccagcctacagcgcgatgacgctgaaagactttagcaagttcgtgaaagatgaaattggctttagctataacggctacttccgttccggctgggggaccgcctcgcacggctcgccaaaatcatgggcgatcggttcgcttggccgcctgggcaatgaatattccggctggttcgatctgcagctgaagcagcgggtgtttcaggaaggcgataaacgcgtcgacgccatcgtgatgctcgacgggaacgtcggccagcagtattccactggctggtttggtgacaatgccggcggcgaaaactacattcaattctcggatatgtatgttaacaccaaagggttcctgccgtttgcgccggaagccgatttctgggtcggcaaacacggggcgccaaaaattgaaatccagatgctggactggaaaacgcagagaaccgatgcggcggccggcgtagggctggaaaactggcaggtgggcgccgggaaattcgatatcgcgttgattcgcgaagatgtcgatgattatgaccgttctttaagcaataagcagcaaattaacactaacaccctggacgttcgctacaaagagattccgctgtgggataaagccagcctgatggttagcggacgctatgtcgccgccaaccaaagttcctctgagaaatataaagagggcaatgaaggttattatccgtggaaagatacctggatggctggtacctcgttaacgcagaaatttgctaacggcggctttaacgaattctctttcttactggccaataactctattgccagcagcttctcacgctatgccggatccagcccttataccacctttaatggccgctattatggcgatcataccaatggcaccgccgtgcgcttaacctcgcagggggaaacctatttacgcgatgacgttattatggcgaatgccatcgtctactcttttggtaacgacgtctatagctacgaaaccggggcccactccgattttgaatctatccgtacggttctgcgaccggcttatatctgggataaatataaccagaccggcgtcgagctggggtacttcaaacagcaaaacaaagatgttaccggcaagaaatataacgagtccggctacaagaccacgctgttccataccttcaaagtcaataccagtatgctgacctcgcgcccggaaattcgtttctatgccacctatattaaagcgaaggatattgacctggataaggccgcgaataataccaccagcatttttgaagacgggaagaacgatcagtttgccgtgggggcgcaggcggaaatctggtggtga

SEQ ID NO: 137378 - DNA, 726 bp, Enterobacter cloacae
atggacaacctaaatcttaacaaacatatttccggccagttcaacgctgaactggagtatatccgcacccaggtgatgaccatgggtgggctggtggagcagcagctttctgatgcgatcaccgcgatgcacaatcaggacagcgatctggcgaaacgcgtcatcgacggcgacaagcaggtcaatatgatggaagtggcgatcgacgaggcctgcgtgcgcatcatcgccaagcgccagcctaccgccagcgacctgcgcctggtgatggcgatcatcaagactatcgctgagctggaacgcattggcgacgtggcggataaaatctgccgcaccgcgctggagaagttttcccagcagcaccagccgctgctggtgagcctcgaatcgctgggccgccacacggtgcagatgctgcatgacgtactggatgcgtttgcgcgtatggatctcgacgaagcggtacgtatctatcgcgaagataagaaagtcgaccaggagtatgaaggcatcgtgcgtcagctgatgacctacatgatggaagactcgcgcactatccccagcgtcctgaccgcgctgttctgcgcgcgctccatcgagcgtatcggcgaccgctgccagaatatctgcgaatatattttctacttcgtcaaaggtcaggatttccgtcacgttggcggcgatgagctggataaactgctcgctggcaaagatccgaaagagtaa

SEQ ID NO: 137379 - DNA, 774 bp, Enterobacter cloacae
atgagtatggtgaatacagctccgggtaagatttcagttcgtaacctgaacttctactacggcaaattccatgccctgaagaacatcaacctggatatcaccaaaaaccaggtgacggcgtttatcggtccgtcaggctgtggtaaatccaccctgctgcgcacgttcaacaagatgtttgaactgtatccggagcagcgcgcggaaggtgagatcctgctggatggcgacaacattctgactaacacccaggatatcgccctgctgcgcgctaaggttggcatggtgttccagaaaccaacgccgttcccgatgtccatatacgacaatatcgccttcggcgtgcgcctgtttgaaaagctgtcccgtgccgatatggacgagcgcgtgcagtgggcgctgaccaaagccgcattatggaacgaaaccaaagataaactgcaccagagcgggtattctctctccggtggtcagcagcagcgtctgtgcattgcccgcggtatcgcgatccgcccggaagtgctgctgcttgatgagccgtgctccgcgctggacccgatctccaccgggcgtatcgaagagctgatcaccgagctgaaacaggactacaccgtcgttatcgtgactcacaacatgcagcaggctgcgcgttgctccgaccatacggcatttatgtatcttggcgagctgattgagttcagcaacacggatgacctgttcactaagcccgcgaagaaacaaactgaagattatattactggccgctacggttga

SEQ ID NO: 137380 - DNA, 450 bp, Enterobacter cloacae
atgcaacacttctcgggctgggcgggcgttatcgcgctggcgctgctgcaggtgcctatcgttattcgtaccaccgaaaacatgctgaagctggtgccggatagcctgcgtgaagcggcctatgcgctggggacgccgaagtggaagatgatctcggcgatcaccctgaaagcctccgtctcagggattatgaccgggatcctgctggctatcgcccgtatcgccggggaaacggcgccgctgctgttcaccgcgctgtccaaccagttctggagcaccgacatgatgcagccgattgccaacctgccggtgaccattttcaaatttgccatgagtccgtttgcggagtggcagcaactggcatgggccggggtgttgattatcaccctgtgcgtcttgctgctgaacatcctggcgcgcgttatcttcgccaagaagaaacacggttaa

SEQ ID NO: 137381 - DNA, 837 bp, Enterobacter cloacae
atgttattagtaacagtgtcactactttccggtttaatgatttatattatcattatgaacagagcagaactcaatagttcactatctgcaaggtttgtaaaggctttgaaaaatgaagccctgtcgctggtctatcaacctatttacagaattgaagacggacagatctgcggatttgaggccttgctcagatggaaagatgaaagactcgggaatattagccctgaagtatttataccgctttctgaaagggaagggttgcaggaggatgtgactttattcgtcattaaccatgctatccgagaatttatccatactgctattcagaatgaaatatttttgagcgtaaacattaatccaagcgatcttgattcagaaaaattcagggataaactactaggattaatttctgaatataacatcccatataaaacaatccttcttgaaattacggagcgtcaaggaggggattttgaaggtatgaaaattcacattgataaatataaaaatcatggtgtcaggtttgccatcgatgactttgggacaggatattctaatcttaatctggtaactgcgcttgatgtagatgaaataaaaatagacaaatcgctaactagtgctattggtactgaatctttacgatatgatcttcttcccggactgcatgagatgttccgctccattgcagataagattgtgtttgagggtgtagagactcaggagcaggtgaactatctgaagacgttctggccacagagttatgctcagggctggtattactccagagcgcttccgctggaagaagcgagaaaacttaccatccgggaattgaactga

SEQ ID NO: 137382 - DNA, 1998 bp, Enterobacter cloacae
atgagtgataatgatacaatcccgaagaagtctacaagccagattaacaaagcggtattctttacatctgctttgctaattttccttcttgtcgcctttgccgccgtattcccggatgtcgccgacaaaaattttaaactactacagcaacaaatcttcacgaatgccagctggttctacatccttgctgtggccctgattttactaagtgtcacgttccttggactctcacgctacggtgatatcaagctgggcccggaccatgcgcagcctgatttcagctaccattcctggtttgcgatgcttttttcggcagggatggggatcggcctgatgttctttggcgttgccgaacctgtaatgcattatctttcgcctcccgttggcacgccagaaaccgttgcggcagccaaggaagcaatgcgtctgaccttcttccactggggactgcacgcatgggcaatttatgccattgtggcgctgattctggcgttcttcagttaccgtcacggtctgcctttaactctgcgctccgcactctatcccattattggcgatcgcatatacgggcctgtaggccatgcggttgatattttcgctgttataggcacggtctttggcgtcgcgacatcgctgggttacggcgttttgcaggtgaatgccggtttgaaccatcttttcggggtgcccatcaatgaaacggtgcaggttattctgatcgtggtcatcacggggttagcgacgatttcagtggtgtccggcctggataagggaatacgtatcctgtctgagctcaatctgggtctggcgttgttgctcctggcgctggtcctgtgtctgggaccaaccgtgcttctgctgaagtcatttgtggaaaatacgggcggttatctttcggaactggtgagtaaaacgttcaacctttacgcgtatgagcctaagtcgagcaaatggctggggggctggacattactgtactggggatggtggctttcatggtcgccgtttgtggggatgttcatcgcacgggtctcccgcgggcgaaccattcgcgagtttgtcaccggcgtgctgtttgttcccgcgggttttacgctaatgtggatgacagtgtttggtaacagcgcgatctatctcattatgaaccagggggccacagacctcgccaatactgttcagcaggatgtggcgctggccctgtttaatttcctggagcatttcccgttctcttccgtgctgtcattcatcgcaatggcgatggtcatcgtcttctttgtcacgtctgctgactcgggggcaatggtagttgatactctggcaacaggtggagtggcaaacacacccgtctggcagcgaatattttgggcctcgctcatgggcattgtcgcaattgcgcttctccttgccggagggctaagtgcgctgcaaacagtgacaatagcgagtgcattgcctttctcagtgatcttactgatatccatatacggacttttaaaagctttgcgccgggatttgaccaagcgtgaaagcctgagcatggcgacaattgctcctacggctgcacgtaacccaattccctggcagagaaggttacgcaatatcgcgtatctgccgaagcgatctcttgtgaaacgttttatggacgacgtcatccagcccgccatgacgctggttcaggaagagctgaacaagcaggggacgataagccacatcagtgacgcagtcgaggatcgtattcgtcttgaagtcgatttgggtaacgagctgaattttatatatgaagtgaggcttcgcgggtatagctcaccgaccttcgcgctcgccgcgatggataataatgagcagcagactgaacaacatagatattatcgcgctgaggtatatctcaaagaaggcggtcaaaattatgatgtgatgggctggaaccaggagcagctgattaatgacatactggaccagtacgaaaaacatctgcacttcctgcacctcgttcgttaa

SEQ ID NO: 137383 - DNA, 882 bp, Enterobacter cloacae
atggatagcgcacgcgcccttgttgccaaaggacggggaatagccctggtcagccgcaccatgggcgtgtcgcgtgcgcagctgtcactgcggattaaccgttctgccgactggcaggacaagcgctgtaaccggcgtaatgacgaagcagacgaagaaatactgtcggctatcctcgacatcatcagcgatatgccgagttatggttatcgacgcgtgtggggcatcctgcgcaagcaacgtcgcacagagggacagccacctgtgaacgccaaacggctctacaggataatgagcgagcataacctgttgttgttgcatgacaaaccagagcgaccgaagcgtgaacataagggcaagatagcggtggcagaaagcgatatgcgctggtgttcagatggcttcgagttcggctgcgacaacggcgaaaaactgcgggtaacgttcgcgctggactgctgcgaccgtgaggccatagactgggcagcaagcacgggaggctatgacagttcaaccgtgcaggatgtgatgctgaggtcggtggaaaagcgcttcggcgacaggttgcccgatacagcggtgcagtggctgacggacaacggttcagcgtataccgcgtatgaaacgtggaggttcgcgagagagctgaatctggagccctgcacaacagcggtgagcagcccgcagagtaatggcatggccgaacggttcgtgaaaacgatgaaagaagactatatcgcgttcatgccaaaaccggatgtgagaacagcactgcgaaaccttgcagtagcgttcacgcattacaatgaaaaccacccgcacagcgcgctgggatatcactccccgagggaataccggcggcagcggacatcgttaacttaa

SEQ ID NO: 137384 - DNA, 459 bp, Enterobacter cloacae
gtggtcagtaacagttttcagcaaacgacacctaaacggcgagccgcctggctggcgctgttggcgatcctgctgatcgtggtggcccccctgatctccgtctccctgcaaaaagaccccatgagcgccatgcccggcatgcaccacgccatgatgatggatagctcgtccgcgagcatggcgcagatgcccgggcacaagatggcgatgatgcacagcacagacggcgccacgcataccggacacgaaatgccgctggaccatgccgaagcgtgtggctattgcgtgctgttagcccatgtcccggggctccttttcgcgctggcgctgttcgtcgccatgctcctgcggcgcattcgcctgccggtttctcgcccggtattaaagcactggcactactttccctggctctaccccgaaacccgcgccccgccgcggttgtctgctttttccctttaa

SEQ ID NO: 137385 - DNA, 1371 bp, Enterobacter cloacae
atgacaacctgcacctcgcgcgcggcatggctgaacctgctgcgtcgcctccatttctatattggtctgtttatcggaccgtttatctttgtcgctgccctgaccggtacgttgtacgtggcgacgccgcagctggaaaactggctctatcacgacgcgctgcatggccttgccgacgggactccgcagccgctcagcgcccagattgcggtggccgaagaagcgacccagggcaatctgcggctgctggcggtgcgtccggcgcctgcgttgggcgagaccacgcgcattatgtttgccgatccgggtctcggagagtcggaatcccgggctatttttgtcgatccgatcgcgctgcgggtgaagggcgatatgacggtctacggcaccagcggcatcctgccgctgcgccagtggattgattatgcgcatcgctctctgctgctgggcgacagcgggaggttatacagcgaactggccgcctcctggatgtgggtggccgcgctcggaggcattgccctgtgggcgatgacgcgtccaaaacggcggctgaataacgccctgcagaaccatcgtcggctgcacgtgacgctgggctggggcttactggtgggtatgctgctcttctccgccaccggcctgacctggtcgcaatgggccggcgacaatgtggacaaaatgcgggcagcgttcggctggctgacgccgcaggtcaatacccagctgcatggcgagatgccgatgacgcacgatccccatgccggacatcatatggatgcgatggccatggcccagcatcagccggcgctgcagctggtccagtttgaccaggcgctggcggcggcccgtcaggcggggctgaacgccagccggctggagatccgtccgccagcgtcagacgaccgcgcctggacggtgaatgagatcgaccgtcgctggccgacgcaggtggacgcggtggcgatcgatggcgccacgatgcaggtggtggatcgcacgcgttttgcagactttccgctgatggcgaagctcacccgctggggcgtcgatttccatatggggatcctctttggtctggcgaatcagctgctgctggtgggatttggctgcgcgctgtgcgttaccatcggggtggggtaccggttatggtggatccgccgtccgcctcaggcggcctgggatccagcgcattcgctgctgcaggcgtggctgtcgctcgcctggcctgcccgaatcctggtgcttgggctggcgtttgcccttggattggccatgccgttaatgggagccagcctgctgctgttcattgccgttgactacctgcgctggcgcgcggcaacggcaatgaggatgatgaagtccagcgactaa

SEQ ID NO: 137386 - DNA, 483 bp, Enterobacter cloacae
atgatcagaaaatatttcgtccccgccctgatggcggcggcgcttttgacaggttgccaggctcctcagggaaaatttaccccggagcaggtggcggcgatgaaatcttacggcttcactgaaagcaatggcgattggtccctgggcttatccgatagcatcctgtttgacaagaatgactaccgactacgtcccgacagccgccagcagatcaccacgatggcctcgcggctggcggctaccgggatcacccatagccgccttgaaggccataccgataattatggtgaagatagctacaatgaagccctgtcgcttaagcgggccaacagcgtggccgatgcctgggcggaaggcgctcatgtcccacgcagtaatttagtcacccgcggccttggcaaaaaatacccgatcgccagcaacgacacggcggccgggcgcgccgaaaaccgccgggtaacggtggtcatcagcacgccgtaa

SEQ ID NO: 137387 - DNA, 1224 bp, Enterobacter cloacae
atgaataaggacttttcacagactccgcgcccgactttcaaacgcgcgctccgtcgcattagcgtgataagcgtggtgatctccatgacgctagtctggctgctgctgagtacagcctcaatcttcacgctcaagcagtacgcgcagaaaaatcttgagctcactgccgcgaccatggggcgcagcctcgaagccgccctggtgtttggcgacagcgcggcggcagaggagaccctcgcgtcgttgggcaagcaagggcagatctcccaggcaatcgtgctaaacggccagatgcagcacttcgccgcgtggcgccatgaaccgctggccaataaagagcaagtgagcgggcttatcagtaaatggctgtttccggagcccacggtgcagcccatctggcaccagggcaaacaaatcggcgagctgagattgaccgcgcttgatgaactgattagccactttctcggtatctcgattctggtgctgaccggcagcattctgctcgcctcgttcatcgccctgctgctgacccactccctacaccgggggatcgtcgccgccctgcagagcatcactgaggtcgtgcatgatatacgtgaaaaccgccacttctcccggcgggtgccggaggagcgtatcgaggagttccatcttttcgcccaggactttaacagcctgctgggggaaatggaggactggcagcgccagctgcaggccaaaaacgcgcagctgttgcgcagttcgttacacgatccgttgaccggcctggctaaccgtgccgcctttcgtaacgcgctcgccgagctgatgcagaatgaagtcgatcatcaaacctcggcattgctgtttcttgatggcgataatttcaaactgattaacgacaactgggggcatgcggcgggcgataaagtgctgatggaggtcgccagccgcctgatgacttttgccggtaaacgccatctggcgtggcgtcttggcggcgatgagtttgccgttctgctgcgcgaggtgcgctcggaagcagaagtgcaggccctgtgccaggcgctaacggaacaatttcttccgccattcaacctgcacaacggtcatagcgccacgctctcgctgagcgtcggttatgccctggcgtgggagcacgccaccgcggaatcactgcaagaacttgccgatcagaatatgtatcggatgaaaaaccaacgtatccagcagacgctgaaataa

SEQ ID NO: 137388 - DNA, 510 bp, Enterobacter cloacae
atgacagtattacaccgtcttttattgactgtattttttctcatcgcggtatctcctgtttttgctgccggaccttcagaacatgttcgcgctattgtttccgggatcgtgacctacacccgttggccgtcattaacaggagcgccaaagctgtgcatttttgcctcatcacgcttcacccatagcctggctcatgaagatccggatgcattaccctatcaaccggtgatagtacgtaatcgtgaagaagcgttaaaaacgacctgcgatggtttttattttggcagcgaatcgccgactgaacagtcagaactcactcgccgctatggcccgaggccgctgttactcatcgcagaacaaaatacggattgttcaattggtagcgcgttttgcctgatcatcaatgacgaccgggtccgcttctccgttaatctggacgttctgacgcacagcggggttcgggttaacccggacgtcctgatgcttgcccggaagaaaccacatgaataa

SEQ ID NO: 137389 - DNA, 1071 bp, Enterobacter cloacae
atgcaaaaagacgcgctgaacaacgtacatattaccgacgaacatgtattaatgaccccggagcaactgaaggcggaattcccgctgagcgtcgagcaggaagcgcagatcgcgcacgcccgtcagaccatttcggatatcatcgccggtcgcgatccgcgcctgctggtggtatgtggtccttgctccattcacgatccggaagctgcgattgaatatgctcgtcggtttaaagcccttgccgcagaggtcagcgatagcctctacctggtgatgcgcgtctattttgaaaaaccccgtaccaccgtcggctggaaggggctgattaacgatccgcacatggatggttcgtttgatgttgaaggcggcctgaagattgcgcgtcgtctgctggtcgagctcgtcaatatgggactgccgctggcgacggaagcgctggatcccaacagcccgcagtacctcggggatctgttcagctggtccgctatcggcgcgcgtaccacggaatcacaaacgcaccgcgaaatggcctctggcctgtcgatgccggtcggctttaaaaacggtaccgacggtagcctggccacggccatcaacgccatgcgcgccgcggcgatgccgcaccgtttcgtaggcatcaaccaggccgggcaggtctgcctgctgcaaacgcagggtaatccgaacggccatgtgatcctccgtggcggcaaggccccgaactacggtccggaagatgtggcgaaatgcgaaaaagagatggcgcaggcgggactgaagccgtcgctgatggtagattgcagtcatgggaactccaataaagatttccgccgccagccggccgtggctgaatccgtggtcgcgcagatcaaagatggcaaccgctccattatcggcctgatgatcgaaagtaatatccacgaaggcaatcagtcctctgaacagccgcgtgaggcgatgaaatacggcgtctcggtgacggatgcctgcatcagctgggagactaccgaggcgctgctgcgtgaactggataaggatctccgcggccacctggcggcccgtttggtttaa

SEQ ID NO: 137390 - DNA, 1122 bp, Enterobacter cloacae
atggttgctgaactgaccgcgttacgcgatcaaattgatgaagtggataaagcgttgcttagcctgctggctaagcgtctggagctggtggccgaagtcggcgaggtgaagagccagtatggcctgccgatttacgtcccggagcgcgagtcggcgatgctcgcctcccgacgtgaagaggcggctgcgctcggcgtaccaccggatctgatcgaggacgttctgcgtcgcgtgatgcgggaatcctattccagcgaaaacgacaaaggcttcaaaaccctgcagccgaatctgcggccagtggtcatcgtcggcggcggtgggcagatggggcgtctgtttgagaagatgttaacgctgtccggctaccaggtgcgtattctggaaaaaaacgattgggcccgggcggcggatatcgtcgccgatgccggcatggttatcgtcagcgtaccgattcacaccaccgtggagacgatcgccaggctgccgccccttccggcggattgcattctggttgaccttgcctcggtgaaagcggagccgctgcaggcgatgctggcggcgcatcagggcccggttcttggcctgcacccgatgttcggtccggacagcggcagcctggcgaagcaggtggtggtctattgtgatggccgccagccggaggcctatcagtggttcctcgaacaaatccaggtttggggcgcgcggctgcaccgcatcagcgccgttgagcacgatcagaacatggcctttattcaggcgctgcgccactttgccaccttcgcctatggcctgcacctggcggaagagaatgtacgtcttgagcaactgctggcgctctcgtcacccatttaccgactggagctggcgatggtaggccgtctgtttgcccaggatccgcagctgtacgccgatattattatgtcatcggaaaacaacctggcgctgattaagcgctactaccagcgttttggcgaagcgatcggcctgctggagcagggcgataagcaggcgtttatcgacagcttccgtaaagtcgaacactggtttggcgattacgctcagcgtttccagagcgagagccgcacgctgctgcgtcaggcgaacgataatcggcagtaa

SEQ ID NO: 137391 - DNA, 873 bp, Enterobacter cloacae
atggctgaaccacaaccgctgtttgactacaccggatacctgccggaatgcccgacctggagcgaggcagaacaggccctctactgggctgatatcatggaatgtgaaattcaccgctacgatatccgcagcggagaacaccaggtgctgcagtttccagaggaggtcggctgttttgccctgcgcgagaagggcgggtttatcgtggcattgcgcagcggcatctggctgaccgacgcccacggcctgctgcggcggaaagtctgcgataacccgagcaacccggagctggcgcggtttaacgacggcgggaccgatcgcgatgggcgcttttatgccggtaccttctgggggcctggggattacaacggcgcgctgctgatgcgagtggataacgacctgcagccgaaagtgatccagtgtgacatccatggcgccaatggcctggcctttagcgccgaccggcgctggatgtatacctctgatacgccgaacgccgtgatctaccgtacgccgctggatgagcagggtgagcctggccgacgcgaagtctttcgccgttttcagcctggcgaagggatccctgacggggcggcgatcgacgtggagggatgttactggagcgcaatgtttgacggctggcggatcgcccgtttctcgccgcagggcgaggagctggaatcctacccgatgccggtacgttgcccgacgatggtctgcttcggcggggcggatatgaaaacgctctatatcaccaccacccgggaaaacatggaggacgatgagctggcgcagtatccgctgtcaggcgccatcttcaccctgccggtagcggtggcagggatgaagaaattaccgttccgcgaatgttaa

SEQ ID NO: 137392 - DNA, 1161 bp, Enterobacter cloacae
atgaccgaggaaaacccattactggcgctgcgcgataagataagcgccctggacgagaagctgcttgctctgctggcggagcgccgcggactggctgttgaggttggaaaagccaaactggcctcccatcgtccggtgcgtgatattgaccgcgaacgcgatctgctggagcgcctgatgactatcggcaagcgccataatctggatgcgcactatatcacccgcctgttccagctgattatcgaagactctgttcttacccagcaaaccctgctgcagcagcatctgaataaaattaacccgcattcggcccgcgtggcgttcctcggtcccaagggctcttactcgcatctggcggcgcgtcagtacgccgctcgccactttgagcagtttattgagagcggctgcgcgaagttcgccgatatttttaatcaggtagaaaccggccaggccgattacgcggtggtgccgattgaaaacaccagctccggcgggatcaacgacgtctacgatctgctgcagcacaccagcctgtcgatcgttggcgagctgacgatccctatcgatcattgcgtactggtgagcacctcgacggatgccgataaaattcagaccgtttacagccatccgcagccattccagcagtgcagccagtacctgagccgctacccgcactggaagattgagtataccgagagcacctcggcggcaatggaaaaagtggcgcaggcgaactccccggtcgtcgcggccctgggtagcgaagcgggcggcgctctgtatggtctgcaggtgctggagcactgccaggccaaccagacgcagaacatcacgcgcttcctcgtcctggcgcgcaaagcggtgaacgtctctgatcaggtgccggccaagaccacgctgttaatggcgaccggtcagcaggcgggcgccctggtggaagccctgctggtgctgcgcaaccacaatctgatcatgaccaaactggaatcccgcccgatccacggcaatccctgggaagagatgttttatctcgatattcaggccaacctggattcgctgcccatgcgcaaggcgctgaaggagctggcggatatcacccgctccatgaaggtcctcggctgctaccctagcgaaaacgtggtcccggtggatccggtttaa

SEQ ID NO: 137393 - DNA, 336 bp, Enterobacter cloacae
atgacaatgaacattaccagtaaacaaatggaaattactccggcaatccgccagcatgtcgcagaccgtctcgccaaactggataagtggcaaactcatttaatcaacccgcacatcattctgtctaaggagccgcagggttttatcgctgatgcaaccatcaacacgccaaacggccatctggttgccagtgcgcgtcatgaagatatgtacgccgccattaacgaattgatcaacaagctggaacggcagctcaataaagtgcaacacaaaggggaagcccgccgcgccgcgacgtcggtgaaagaggcaggctttgtggaagaagaagagtaa

SEQ ID NO: 137394 - DNA, 738 bp, Enterobacter cloacae
atgacgcgcatgaaatacctggtggcagccgccacactgagcctggctttggtgggttgctccggctctaaggaagaggtgcctgataatccgccgaatgaaatctacgcgaccgcccagcaaaaactgcaggacggtaactggaaacaggcgataacgcaactggaagcgttggataatcgttatccattcggcccttattcccaacaggtacagctggatctgatttatgcgtattataaaaacgccgatcttcctctggctcaggcggctatcgatcgcttcatgcgtttgaaccccacccatccgaacatcgactatgtcatctatatgcgcggcctgaccaacatggccctggatgacagcgccctgcagggcttcttcggcgttgatcgctccgaccgcgatccgcagcacgcgcgcgatgccttcaatgacttctccaaactggtgcgtggttatccgaacagccagtacgccactgacgcctataaacgcatggtgttcctgaaagatcgtctggccaaatatgagctgtcggtcgtggattactacaccgatcgtggcgcatgggttgccgtggttaaccgtgtggaagggatgatgcgtaattatccggatacccaggccacccgcgatgccctgccgaagatggaaaacgcctatcgtcagatgcaaatgaacgcccaggcggacaaagtcgcgaagattatcgccgcgaacagcaagaacacctga

SEQ ID NO: 137395 - DNA, 981 bp, Enterobacter cloacae
atggcacaacgagtacaactcaccgcaacggtgaccgaaaatcaactcggtcaacgcttagatcaggctttggccgaattgttccctgattattcgcgatcgcggataaaagaatggatcctcgaccaacgcgtattagtcaatggcaccattggcgataaaccgaaagaaaaagtgctggggggagaacgcatcgctatcgatgtggaaatcgaagaagaggcgcgcttccagccgcaggatattccgctcaatatcgtttacgaagatgatgacatcatcgtgatcaataaaccgcgcgatctggttgtacatcctggcgcgggcaaccctgacggtactgtgctgaatgcgctgctgcactactatccgcctattgccgatgtgccgcgcgcgggtattgttcatcgtctggataaagacaccaccggtctgatggtggtggcgaaaaccattccggcgcaaacccggctggtggagtcgctgcagctgcgcgagatcacccgtgaatacgaagcggtggcgatcggtcatatgaccgccggtggcacagtggaagagccgatcagccgtcacccgaccaagcgtacccatatggcggtgcatccgatgggcaaaccggcggtgacccactaccgcattatggaacatttccgcatccatacccgcctgcgtctgcgtctggaaaccggtcgtacacatcagatccgcgtgcatatgtcgcatatcacccatccgctggtgggtgaccaggtctatggcggccggccgcgtccgccgaagggcgcgtcggaggagttcatcaccgcgctgcgtaaattcgaccgccaggcgctgcacgccaccatgctgcgcctgtatcacccgatctccggcattgaaatggagtggcacgcgcccatcccacaggatatggtcgagctcatcgaggcgatgcgcgccgattttgaagcccataaggacgatattgactggttatga

SEQ ID NO: 137396 - DNA, 732 bp, Enterobacter cloacae
atgacgaaactgattgtaccgcagtggccaatgcccggcagcgtggcggcctgtagttctacccgcatcggcggcgtgagtctgccgccctatgactcgctcaacctgggcgcccattgcggcgacaatctgcaggatgtcgaagaaaaccggcggcggatgtttgccgccggcggcttgccgtcttacccggtttggctggagcaggtccatggcaccgaggttctgacgctggacggcggaccctatccgtcgaaacgcgcggatgcctcttatagtcgtacgccagggaccgtctgcgcggtgatgaccgctgactgcctgccggtgctgttctgtaaccgcgacggcaccgaagtcgccgcggcgcacgcgggatggcgcggcttatgcgaaggggttctggaagcgacggttgctcgtttcgccgataaagccgaaaatattatggcgtggctggggcccgccatcggtccgcaggcgtttgaggtgggaccggaagtccgggatgcctttatggcgaaggacgagaatgcgcaccgggcttttcgtccggcaggcgaaaaatattttgctgatatctaccaactggcgcggcagcgtctggcaaacgtcggcgttgagcagattttcggcggcgatcgctgcacgctaagcgaaaaggatgattttttctcttaccggcgcgacaagaccaccggtcgtatggcaagtttcatttggctgatataa

SEQ ID NO: 137397 - DNA, 2574 bp, Enterobacter cloacae
atgcgtctggatcgtcttaccaataaattccagcttgctcttgccgatgcccagtcgctcgcactcgggcacgacaaccaattcatcgaacctcttcatttaatgagcgccttgctgaatcaggaagggggatcgatacgtcctttattaacctcggcgggcgtgaatgccgggaaactacgcactgacatcgaacaggccttgagccgtttaccgcaggtggaaggcaccggcggcgatgtacaaccttctcaggatttagtgcggatcctcaacctttgcgacaagctggcgcaaaagaaaaaggacaactttatttcgtcggaactgttcgttctggcggcgcttgaatcgcgcggtacgctgaccgaccttttaaaatccgccggagcaacaaccgccaacgtgactcaggcgattgaacaaatgcgcggaggggaaagcgtgaacgatcagggtgccgaagaccaacgtcaggcattgaagaaatttaccgtcgatctcaccgagcgtgccgagcagggcaagctggatccggtgatcggccgtgatgaagagattcgccgtaccattcaggtactgcagcgtcgtaccaaaaacaacccggtgctgatcggtgaacccggggtgggtaaaacggcaatcgtcgaaggcctggcgcagcgtatcgtcaacggcgaagtaccagaagggctgaaaggccgtcgggtattggcgctggatatgggggcgctggtggccggggcgaaataccgcggtgagtttgaagagcgtctgaaaggcgtgctgaccgacctgtcaaaacaggaaggtaacgtcattctgtttatcgacgaactgcataccatggttggcgctggtaaagccgacggcgcgatggatgcgggtaacatgctgaagccggcgctggcgcgtggtgaactgcactgcgtcggggcgacgacgcttgatgaataccgtcagtacatcgaaaaagacgccgcgctggaacgtcgcttccagaaagtgttcgtcgccgagccttcggtagaagataccatcgcgattctgcgcggtctgaaagaacgttatgagctgcaccaccacgtgcagatcactgacccggctatcgtggcggcggcgaccttatcgcatcgctatattgccgaccgtcagctgccggataaagccatcgacctcatcgatgaggcggcatccagcatccgtatgcagattgactccaaaccggaagagctggaccgcctcgatcggcgtattatccagctgaaactggaacagcaggcgctgaagaaagagtctgatgaggcgagcctgaagcgtctcgatatgctcaacgaggagctggcggataaagaacggcagtattcggtgctggaagaagagtggaaagcggaaaaagcgtcgctctccggtacccagaccatcaaagctgagctggagcaggcgaaaatcgccatcgaacaggcgcgtcgcgtcggcgatctggcgcggatgtccgagctgcagtacggcaaaattccggaactggagaaacagctggcggctgccactcagtccgaagggaaaaccatgcgtctgctgcgtaataaagtgacggatgctgaaatcgccgaagtgctggctcgctggaccggtatcccggtctcccgcatgatggaaagcgagcgtgacaaactgctgcgtatggaacaggagctgcatcatcgggtgattggccaggatgaggcggttgaagcggtatccaacgccattcgccgcagccgtgccgggctgtccgatccgaaccggccgattggttcgttcctgttcctcggtccaaccggggtcggtaaaaccgagctgtgtaaaacgctggctaactttatgttcgacagcgacgacgcaatggtgcgtatcgatatgtccgagtttatggagaaacactccgtctcgcgtctggtcggtgcgcctccgggatacgtcggctatgaagagggcggttacctgaccgaggcggtgcgccgtcgtccttattccgtcatcctgctggatgaagttgaaaaagcgcacccggatgtgttcaacattctgctgcaggtactcgacgacgggcgtctcaccgacgggcaggggagaacggtcgacttccgtaatacggtagtcatcatgacctcgaacctcggttccgatctgattcaggaacggttcggcgagctggactacggacatatgaaggacctggtgctgggggtagtcagccagaacttccgtccggagttcatcaaccgtatcgacgaagtggtggtcttccatccgctgggcgagaaacatattgcctctattgcccagatccagctgcagcgtctgtataaacgtctggaagagcgcggatatgaagtgcagatgtccgatgaggcgctgaagctgctgagcgccaacggttacgatccggtatacggcgcgcggccattgaaacgtgctattcagcagcagattgagaacccgttagcccagcagatcctttccggtgagctggttccgggtaaaaccatcgagctggtagtaaaagacgaccgcattgtggcagtgcagtaa

SEQ ID NO: 137398 - DNA, 708 bp, Enterobacter cloacae
atgtctatttcacgtcctcgcccgcagcgcggcgactttccgccgggaacccggcagtatggcagctcggaactgggcgcgccgctgctgtggtttcctgcgccgcaggccgacagccgtagcgggctgattattgccggtacccacggtgatgagaattcgtcgattgtgaccctctcctgcgccctgcgcaccctgaaacccgagctacgccgccaccacgtggtgctgacggtcaatcctgacggctgtcagctcgggctgcgcgccaatgcccgcggcgttgacctcaaccgtaactttccagcagccaactggaagcaaggggaaacggtttaccgctggaatagcgcggcggcggagcgcgacgtggtgctgttgaccggcgagcagccgggttcggaacgggagaccgaggccctgtgtcagttgatccatcagattcatccggcgtgggtggtctcctttcacgatccgctggcctgcatcgaagatccgggccacagcccgctgggtcgctggctggccgacgccttctccctgccgctggtgggcagcgtgggctacgacacgccgggctcctttggcagctggtgcgccgatatcggactcccctgcatcaccgccgagtttccgccggtctccgccgacgaggcaacggagcgttacctgccggcgatgaccgatctgctgcgctggcaggcttaa

SEQ ID NO: 137399 - DNA, 966 bp, Enterobacter cloacae
atgcgtaacgtgcgagtgtatgaggaagcctggccgctccataccccttttgtgatcgcccgcggtagccgcagcgaggcaaaagtggtggtagtggaactggaagaggacggcgtgaaaggggtaggcgaatgcacaccctatccccgctatggcgagagcatcgcctcggtcatggcccaggtgatggcgatcggcgagcaactggaggcggggcttacccgcgaacagctgcagcggctgctgccggcaggcgccgcccgcaatgccattgactgcgcgctatgggatctgcaggcccggcgcgaaggcaaaaccttggcccagctgttgggcgtggtgttgcctgaccgggtgattaccgcccagacggtggtcattggcacgccggatcagatggcggccagcgccgcggcgctgtggcaggcaggggcccagctgttgaaagtgaagctcgacgatcgactgatcagcgagcggctaatcgctatccgccaggcggcgccggaggctacgctgattgttgacgccaatgagtcctggcacagcgaggggctggcggcgcgctgtcagctgctggcggacctcggtgtggcgatgcttgagcagccgctccccgctgacgacgactcggcgctggaaaacttcgttcatccgctgccgatttgcgccgacgagagctgccacacccgggagagcctgccgcggctgcgcgggcgctatgagatggtcaatatcaaactggataaaacgggcggcctgaccgaagcgctggctctggccggggaggcggaacggcagggatttgaacggatgctgggctgtatgctttgcacctcgcgcgggatcgccgccgcgctccctctggcgccgctggcgcgcttcgctgacctcgacggcccgacatggctggcggtggacgttgagccggcgctgcggttcagcaccggcgtgcttcatctttaa

SEQ ID NO: 137400 - DNA, 507 bp, Enterobacter cloacae
atgtcacaaaccgtgcatttccagggcaaccccgtttctgttcagggcaccattccgcaggcaggcgctaaagcgcagccgtttacgctggtcgccaaagatctctctgacgtcgcgctgagccagtacgccggcaaacgtaaagtactgaatattttcccgagcattgataccggcgtgtgtgccgcatcagtgcgtaaattcaaccagctggccgctgaactggacaacaccgtagtgctgtgcatttccgctgacctgccgttcgcccagtcccgcttctgcggcgcggaaggcctgagcaatgtggtcaccctgtccacgctgcgcggcgcgtccttcctcgctgactacggcgtcgccatcgccaccggtccgctggctggcctggctgcccgtgcggtggtcgttatcgatgaaaacgatcaggtcgtctacagccagctggtgaacgaaatcaccgaagagccggactacgacgccgcgctggccgccctgaaagcctga

SEQ ID NO: 137401 - DNA, 1053 bp, Enterobacter cloacae
ttggcgtcgcgtcgcgcgatcgggcactggctgatattgctgctgctctctgttctcttttcctcgctgctgttacgaatacacctgccggcagcgctgctgctggggccgctgatcgccggtctcattttgagcctgcgcggggtgaagctgagcatccctcgcccctgttatctggcggcgcaggccattgtcggctgcatgatcgcccgggcgattaatccctctgtttttggcgtgctgttcaacaactgggcgctggtgctggcgatcctgttgaccaccctggcgataagcggccttaccggctggctgctggtccgctacagcgcgctgccgggcgccactggcgcctggggaagctctcccggcggcgcgtcggcaatggtggtgatggcccaggagtacggggccgatgtgcggctggtggcgctgatgcagtatctgcgggtgctgtttgtcgtcggcgcggcggcgctggtggtgcgctatgccctgggcaatgaagcacaggagatgactcaggatattgtctggtttccatcgttgaccctgaatttccctttcacgctgctgctgacggcggtggcctgttggctgggcatgcggctgcgcatcccctccggggccatgctgctgccgatgctgcttggcgccctggcccagggcggcggctggctgatgctggagctgccggagtggctgctggcgatggcctatgcggtgctgggctggacggtggggctccagtttaataaagccatttttctgctggccctcaagacgctgccgcagattatcgcctccatcctcggactgatcctgatgtgtgccctgatggcccttgccctgacccacattctgcagatggactttatgaccgcctatctggccaccagccccggcgggctggacacggtggcgattatcgccgccggcacccgggcggatatgtcgtttattatggcgctacagacgctgcggctgtttaccattttgctgaccggcccggcgatggcgcgggctatctcccgctatgcgccgcggcaataa

SEQ ID NO: 137402 - DNA, 1542 bp, Enterobacter cloacae
atgcgtcttgaagtcttttgtgaagaccgtctcggtctgactcgtgaattgctcgatttgctggtgctgcgtggtattgacctgcgcggtatcgatattgaccctattggccgaatttacctcaatttcgccgaactggaattcgccacgttcagcagcctgatggctgagatccgccgtatcgccggcgtgacggacgtgcgcaccgtgccctggatgccgtctgaacgtgaacacctggcgctcagcgcgctgctggtagcgatgccggagccggtgctgtcgctggataccaaaggtcgggtggaactggcgaaccccgccagctgcctgctgtttggccaaagccaggcgaagctgcgtaaccacccggtggcccagctgatcgccgattttaacgttcagcgctggctggagagcagcccgcaggagacgcatgcggagcatgtggtggtgaatgggcagaactacctgctggaagtgactccggtctatctggaaggcgagcataacgagcgagtgctgaccggcgccgtggcaatgttgcgctcaaccgtgcgcatgggacgccagctgcagaccatgaccagccaggataccagcgccttcagtcagatcctcgcggtggggccgaaaatgcgccacgtggtggagcaagcgcgcaagctggcgatgctcagcgcgccgctgctgattgtcggcgacaccggcaccggtaaagatctgctggcccatgcctgccatctggccagtccgcgggcgggcaaaccctatctggcgctcaactgcggctccattcccgaggacgcggtcgagagcgagctgtttggcgacgcgctgcagggcaagaagggcttcttcgagcaggccaacggcggctcggtgctgctggatgaaattggcgagatgtcgccgcgcatgcagactaagctgctgcgctttctcaacgacggcaccttccgccgcgttggcgaggatcatgaagtgcacgtcgatgtgcgggtgatctgcgcgacgcagaaaaacctgatcgagctggtgcagaaagggcttttccgcgaagatctctactatcgcctcaacgtcctgacgctgtatctgccgccgctgcgcgattgcccgcaggacatcatgccgctgacggagctgttcgtggcccgctttgccgacgagcaggggatcccgcggccgaagctctctgccgatctcagtacggtgcttacccgctacagctggcccggcaacgtccgccagctgaagaatgccgtctatcgcgcactgacccagctggaaggatttgagctgcgtccacaggacattctgctgccggaccatgacgtcgcctcgctgccggtgggcgaggaggccatggaagggtcgctggacgacatcacccgccgctttgagcgctcggtgctgacccagctctatcgcagctaccccagcacacgtaagctggcgaagcggctgggggtgtcgcataccgccatcgccaataagctgcgtgaatatggtctgagtcagaaaaagggcgacgaataa

SEQ ID NO: 137403 - DNA, 1314 bp, Enterobacter cloacae
atgtcaggactcaaaattgtggtgatcggcggtggctccagctacaccccggaactgattgaaggtttgctcaaccgctatcacgaaatgccggtcgcttcgctatggctggtggacattgaagagggcaaagagaaagtcgagattatcgccggactggcgcggcgaatgatcgccaaagccgggctgactattgaagtggtggccacccttgaccgggaaagcgcgctgcgcgatgccgatttcgtctgctcgcagtttcgcgccggctgccttgacgcccggatcagcgatgaacgtatctccctcaagtatggcttgatcggccaggagaccaatggcctcggcggcttcgccaacgcctgccgcaccattcccatcgcccttgagatcgctgccgatatggagcgactgtgtcccgacgcctggctgctgaactttaccaacccgtcggggatggtgaccgaagcgatcctgcgccacagccgcatcaaagccgtcggcctgtgtaacgtgccggtgattatgcaaaaagggataaccactctgctgcaatgcgctgacgaaaaagaggtggtgatgcaggtcgccggcctgaaccactttatcttcgtgcgccagatcctgcacaaaggtaaagaatggctgccggaggtgatagccgagatcaacgccggtcgggatccgctggtgccgcgcaacattccgccgttccgttggccgtcgcatctgctgcagggcttaggcatgatcccctgcgcctatctgcgttattactacatgaaagacgatctgctgcgccaggagctggcggaggcgggcggcgaaggaacccgcggggaagtggttaagcagctggaaaaaatcttgtttgaccagtaccgcgacccgcacctggcagtcaaaccgaaggcgctggaagggcgcggcggccagtactattccgaggcggcctgcgagctgatgaatgccatctacaacgacaagcggattatcatgcacgtcaatacgcgtaataacggcgccatcaatggcctgccggatgactgcgcggtagaggtcagctcgctgattaccgcttctggtccgctacctctcaatgtggcgccgttcccggaagataccctgcgtttgctgcagctgatgaaatcatttgaacggctgactatcgaggccgcgctcaccggcaaccgccacaccgcatggcgtgctctgatgctgaatccgctgatcgtcagcggcgagaagctcgaactggcgttggatgaggtgatcgctgagaaccgtcagtggctgcctgctttccacgcctga

SEQ ID NO: 137404 - DNA, 900 bp, Enterobacter cloacae
gtgcttgagcaacaaagcatccttgcgctgctgcagacctttgaggtgaccgcccgccacctgagctttacccttgccgcgcatgaaatgaaccttacccagggagcggtcagccatcggatccgcaggctggagatgcacatcgggtttcgcctgtttatccgcatgacgcgtaaactggcgctgacagaggaaggtaagcggctgctggcgacgttaagccattcgctgcgggcgattaacgatgaaattgaggatattcgcgatcaggatctgcgcggcacactgcatattggtattgcgccgacgctggcccatctgtggctgatgccgcgtctgccgcgctttcaggcgcaatggccgggactgaatctgcagtttcgcgtgcgcgccggggtgatggattttaacgaggagcgggtggatctggcaatttactacggcgccacgcgctaccccgatctttatcaacagcggctgatggcggaaagtttgctcccggtctgctccccgcgttatcgccagcagtatcgtccgctgagcggcggcgacccggcggcgctcgtctggatccatgcgtgcgaatccaccgacgtacaggatcaatttgcggaatggcgcctgtggtgccagcacagcggacaggcgttaccttttgacggccggtattacgcggtgaataaccactcgctggccatcgagatggcgctcaatggactcggcgtggtgatggggcgtaaaacgctgatccagccgctgctcgacgcaggcaggctggtggccttgtctgaaaatgaagcgccctcgccctttggctatgacctgatctgtccgcaggagaaccgttcccgcccgcgctttcgcgccttcagcgagtggctggcggcggaatgcgcctaa

SEQ ID NO: 137405 - DNA, 1062 bp, Enterobacter cloacae
atgagcgaaccgttaaaaccgcggattgattttgatgggccgctgcaagcggagaaaattccgccgctgaaaggcgctcgcgccttcgacaccctggaggccgacaacttcgcgccagcgcggctggtgaccggcgaagaggaagagggggcggcggaagcggtggtggagtcggttctgcgacccaaacgcagcctgtggcggcggatggtcagcgccggactggcgatcttcggcgtcagcgtcgtggcgcaaggcgtgcagtggacggctaacgcctggcagacccaggactggattgcgctgggcggctgcgtcgccggggcgctgatcgtcggagccggcgtcggttcgctggccaccgagtggcgccgtctgtggcgactgcgccagcgcgcccacgaacgcgatgaagcgcgcgatatgctgcacagtcacgcggtcggtaaagcgaaagcgttttgtgagaagctggcgcagcaggccgggctggatcagtcgcatccggcgctgcagcgctggtatgccgcgatccacgaaacgcaaagcgaccgtgaagtggtgagcctttatgcgcagctggtgcagccggtgctcgatgcccaggcgcggcgggaaatcagccgttcggcggcggagtcgacgctgatgattgccgtcagcccgctggcgctggtggatatggcgtttatcgcctggcggaacctgcggctgatcaaccgaattgccacgttgtacggcattgagctcgggtattacagccgtctgcgactgtttcgcctggtgttgctcaatatcgctttcgctggcgccagcgaactggtgcgcgaggtgggcatggactggatgtcgcaggatctggcggcccggctgtcggcgcgcgccgcgcagggcattggcgccggcctgctgaccgcccgtctcgggatcaaggcgatggagctgtgccgcccgctgccgtggatcgccgatgataaaccgcgactcggcgattttcggcgcgagctgattgggcagttgaaagagaccctgcagaaaagcaaaacccgcccggagaagtaa

SEQ ID NO: 137406 - DNA, 1398 bp, Enterobacter cloacae
atgaagcgactgaaaactgaattgaatgcgctggtcaaccgcggggttgaccggcatttacgtctggcggtgactggcctgagccggagcggtaaaacggcgtttatcaccgcgctggtcaaccagctgttgaatatccacacgggggcccgcctgccgctgctgagcgccgcacgcgaagagcggctgctcggcgtcaagcgcgtgccgcagcgggactttggcattccccgattcacctacgacgaagggctggcccagctgtacggccagccccccatgtggccaaccccgacgcgcggggtgagcgagatccgtctcgcgctgcgctaccgttcgaatgactccctgctgcgccattttaaagatacctccacgctgtatctggagatcgtcgactatccgggcgagtggctgctcgacctgccgatgctggcgcaggattatctgagctggtcgcgacagatgaccgggctcctgcagggacagcgtgcggagtggtcggcccgctggcggcagctgtgcgccgggctggatccgctagcccctgccgacgaggctcggctggcggatatcgctgccgcctggacggactatctccacgcctgtaagcgtgaagggctgcactttatccaacccgggcgctttgtcctgcccggagaaatggcgggcgcgccggcgctgcagtttttcccgtggcccgacgtcgacgccgtcggcgaagccaagctggcgcaggccgataaacacagcaacgccggcatgctgcgcgaacgctacaaatactattgcgaaagggtggtgaaggggttctacaaagagcacttcctgcgcttcgaccggcagattgtgctggtggactgtctgcagccgctcaacagcgggccgcaggcgtttaacgatatgcgtctggcattgacccagctgatgcaaagtttccattacgggcagcgcaccttgttccgccggttgttctcgcccgtcatcgacaagctgctgtttgccgccaccaaagccgatcacgtcacgatcgatcagcacagcaatatggtgtcgctcctgcagcaactgattcaggacgcgtggcagaacgccgcctttgaagggatcagtatggattgcctggggctggcgtctattcaggcgacccagagcgggctgattgaggtgaacggcgagaaaattcccgccctgcgcggcaatcgcctgagcgacggccagccgttgaccatctatcccggtgaggtgccggcgcgcctgccgggccaggccttctggcagcagcagggatttcagtttgaaaactttcgtccgcaggtcatggatgtcgatcggcctttgccgcacattcgtctcgacgcggcgctggaatttttgattggagataaactgcgatga

SEQ ID NO: 137407 - DNA, 219 bp, Enterobacter cloacae
atgaatagcaaatggcaacgcgccgggcagcaggtgaagcccggtctgaaaatcgtcggtaagctggcgctgctgaccgcgctgcgttatggcccggcgggcgttgccggctgggcggttaaatcggtcgcgcgtcggccgctgaaaatgctgctggcggtggcgctggagccgctgctcagccggctggccaaccgcgtcacgcgcgggatgaaataa

SEQ ID NO: 137408 - DNA, 360 bp, Enterobacter cloacae
atggccgggctggatctgaataaaaaactgtggcgtatcccgcagcgcgggatggtaaagggcgtctgcgcgggcattgctcagcatcttgatgtcccggtgaagctggtgcgcctgattaccgtgctggcgatgattttcggcctctttttctttgtcctggtggcctacatcattttgacttttgctctggatccgataccggacagcgagctgtacggtcataaagcgccgagcaatggcgatctgctggccgccgtggatgccgaactggcctccggtgaacagcgtctgcgtgaaatggagcggtatgtgacctccgacacctttacgctgcgcagccgctttcgccagctgtaa

SEQ ID NO: 137409 - DNA, 225 bp, Enterobacter cloacae
atgagcatgctttttctcgccattccgctgacgctgtttgtgctgtttgttctgccggtctggctgtggctgcactacaacaatcgcggcgccaacggcagtctgacgcaaaatgagcagcaacggctgctgcagttgaccgatgacgcgaagcggatgcgcgaacgcattcaggcgctggaagcgatcctggacgccgaacatccgaactggagggacaaataa

SEQ ID NO: 137410 - DNA, 663 bp, Enterobacter cloacae
atgggtattttttctcgttttgccgacatcgtgaacgccaacatcaactccctgctggagaaagcggaggacccgcaaaagctggtgcgtctgatgatccaggagatggaagacacgctggttgaggtgcgttcgacatcggcccgcgcgctggcggaaaagaaacagctgtcccgtcgtattgagcaggcggtcgcccagcaggcggaatggcaggaaaaagccgagctggccctgcgcaaagagaaagaagatctggcccgggcggcgctgatcgaaaaacaaaagctgaccgaccttatcgctcagctggatcatgaagtgcagctggtggatgaaaccctggcgcggatgaaaaaagagattggcgagttggagaacaaactcagcgaaacccgcgcccgtcagcaggcgctggcgctgcgccatcaggcggcgagttcgtcccgcgatgtgcgtcgccagctggacagcggtaaactggatgaggcgatggcgcgctttgaatcctttgagcgtcgcatcgatcagatggaagcggagagccaccgctttggcaagcagcagacgctggatcagcagtttgccgaactgaaagcggacgatgaaatcagcgagcagctggcggcgttgaaagccaaaatgaatcagtccaaccagtaa

SEQ ID NO: 137411 - DNA, 663 bp, Enterobacter cloacae
  misc_feature (539)..(548): n is a, c, g, or t
atggcgaaattcatcatggcgcagtacaaggataatctgctgggcgaggccaacagctttctcgaggtgctggaacaggtttcccggctggccccgctggataaaccggtgctggtcatcggcgagcgcggcaccgggaaagagcttattgctaaccgtctccactacctctccagccgctggcaggggccgtttatctcgctgaactgcgcggcgctgaacgataatctgctcgactcggagctgttcggccacgaagccggggctttcaccggggccagcaagcgccatcccgggcgcttcgagcgcgccgacggcgggacgctgtttctcgatgagctggcgacagccccaatgctggtgcaggagaagctgttaagagtgattgaatatggcgagctggagcgcgtgggcggcagccagccgctgcaggttaacgtccggctggtgtgcgccaccaacgctgacctgccgcagatggtcgaggaaggtcattttcgcgccgacctgctcgaccgcctggccttcgacgtggtacnnnnnnnnnnacgtggtacagctccccccgctgcgcgaccggcagagcgacatcatgttgctcgccaaccagtttgccatccagatgtgccgcgaactcggtctgccgctgtttcccggctttag

SEQ ID NO: 137412 - DNA, 387 bp, Enterobacter cloacae
atgtgccgcgaactcggtctgccgctgtttcccggctttagcgaacgagcgaccgcgacgctgctcggctaccgctggccggggaatattcgcgaactgaagaacgtggttgagcgctcggtgtatcgccacggcgacagcgaacatgagctggacgcgattattattaacccttttcgtcagtcccccggctctccgccggaagccgcgcccggcgatgagctgcccgcgctaccgctggatctgcgcaatttccagctccagcaggaaaaacgcctgctgcagcggagtctggagcaggcgaagtatcatcagaagcaggcggcggagctgctgggattaacctatcaccagctccgcgcgctgctgaaaaagcatcagctgtga

SEQ ID NO: 137413 - DNA, 1098 bp, Enterobacter cloacae
gtggtcgctcagggaccggggctgttcctcgccggccgggtgctgcaggggctgtcggcggcgtgcattatgccggcgacgctggcgctgattaagacctggtatgaggggcgcgcgcggcagcgggcggtcagcttctgggtcatcggctcgtggggcggcagcggtctctgttccttcgttggcggggctatcgccaccggactgggctggcgctggatcttcgtcttctcgatcgccgttgccctgctggcgctgtttttgctgcgcggcacgccggagagccgcagcgccagcgccagccagcataagctggacgtcggcggtctgctgagcctgattgttgcgctggtgctggtgaatctgtttatcagcaagggccacggctggggctggagcagcccgctgacgttgaccatgctggccggggcgctggcggcgggaacggtatttatccgcaacggcatgcgcaaaggcgaggcggcgctgattgattttgcgctgtttcgcaatcgggcctacggtgcggcagtgctgtcgaactttctgctcaatggggcgattggcaccatgatgatcgccagcatctggctgcagcaagggcaccacctgacgccgctggagagcgggatgatgaccctcggctatctggtgaccgtcctggcgatgatccgggtcggcgagaagctgctgcagcgctatggcgcccggctgccgatgatggccggtccggtgttgaccgctatcgccatcgcgctgatatcctgcacctttctcgaaaaggcgctgtatatcggggtggtgttcgccagcaacgtgctgtttggcctcgggctgggctgctacgccacgccgtcgacggataccgcggtggccaatgccccggagaacaaaatcggcgtcgcctcggggatctataagatgggcagctcgctgggcggggcgatgggtatcgccgtgacagcgtcacttttcgcgctgtttttaccgctgggcatggcccatgccgcccagtatgccctgtggtttaacgccgtcttatgtctgggggcgatggcggtgagcgcgctgctgctgccgcgcgcctctcacagctga

SEQ ID NO: 137414 - DNA, 888 bp, Enterobacter cloacae
ttggttgatgatggaagtacgacagaagattctcatcgttatttgaatctcatcgagaatgattttaactctcgaggctggaaaattgtccgtagttctaataactatctgggtgctgcaaggaatttggctgcgcgacacgcctctggcgaatatctgatgtttatggacgatgataatgttgctaagccttttgaggtagaaacgtttgttactgcagcattaaactctggggccgatgtgttaaccacaccaagcgatcttatttttggtgaggagttcccttctccgttccgtaaaatgacgcactgctggcttccgttagggcctgatttaaatatcgccagctttagtaactgctttggcgatgctaatgcgctgatcagaaaagaggttttcgaaaaagtaggcggatttactgaagattacggtttaggtcatgaagactgggagttttttgccaaaatatcattacagggatataaattgcaaatcgtcccggaacctctattttggtatagagttgcaaactccggcatgttgttaagtggaaataagagtaaaaataactaccgcagtttccgtccttttatggatgagaatgttaaatataactatgcaatggggttgataccttcctacctcgagaagattcaagaacttgagagtgaagtgaatcgcttgcggagcatcaatggtggtcattctgtcagtaacgagttacaacttttaaataataaggttgatggtcttatttctcagcaaagagatggctgggcccatgaccgttttaatgctctgtatgaagcaattcatgtccaaggcgcaaaacgaggcaccagcctggttcgccgggttgcccggaaagtgaaatcaatgttaaaataa

SEQ ID NO: 137415 - DNA, 348 bp, Enterobacter cloacae
gtgatggaaaggttgcgggtgctgggcaagcgtctgccggtacgtattcagacagataacggcagcgagtttattttgaaaagtctggataaatgggcgtatgaacacggtgtcacaatggacttatcccgccccggaaaaccaacggataatccgtttattgaatcatttaacggcagtctgcgggatgaatgcctgaacattcactggtttctctcgctggaagatgcgcaggacaaactcgacaactggcgcagggaatataatcatgagagaacgcattcatcattaaatgacatgactccggctgaattcatccgaaatctccggaaagacgaagatctctga

SEQ ID NO: 137416 - DNA, 267 bp, Enterobacter cloacae
atgaaaaagacccgctataccgaagaacagatagcatttgcgctgaaacaggccgaaaccggcacccgcgccggggaagtctgccgaaagatgggcatttctgaagccactttttataactggaagaagaaattcgccggtctgggcgtgaccgaactgcggcgtctgcggcaactggaggatgaaaatctgcggctgaagaaactggtgtctgacctgagtctggacaaggagatgctgcaggaggtactgaaacaaaagttctga

SEQ ID NO: 137417 - DNA, 1128 bp, Enterobacter cloacae
atggctattggtcattttttatttaggggtgataagaccgcttgcggtggcaggattcttgaaggatgccccaaccatcaatttttcgataaagatatggcatgtgaaggccataaagtaacctgcggcaaacatccagggcattatcgtatctgcggtggccttgatagtgacgaaatacatggtaaaagagtagccggaacactgcacagccgtagttcctgtccctgcaaatcacgttttattccttccatcgatgacacttatgaattttctacaggggcagcgaaagccgacacagcccaatctcaagtcgtcgaatttcccgttctcccccgcccgatttatgatccccaagctgataatgtgactgacacctgcaagtcagaagataacccgctgctgaacggcgtttatatatggactgaaacgacaagtgcaggtcatgttttcgtttcagtgcatgagaataacaatatcttcctctacacctatggacgctatggacgcactgataaaagtaccttcactggggatgggattttagactttttccaggatgaagatgcgcgtaagtattaccgatacgaactttatgaaatgggagctcgcgctttccgcattgatgatgcagatcctaaaataatccgtaaattcttcgaaaacctttggaatggcggtgtaacaccaattcaaacgccaaacatgcaagatggtacaaagcgaagaggccgaaccattgataagtatgatgtcactggtagcaactgtaccactcactcagtcgaggggctcaagtttgctggctcaaaggtattcgaacacggttacacatccacgacaacacagctaccaatcgacatagaagaagattttactattccggtttcactgcaaagatatcttgaatcaaagagtgcagacttctcatcaatcctcgttgtcgaaatgactaatacattcaaacagcagtaccctaacaccgagaacaaaagccctcaatcaatgggagggagtgcaaaaattcaacaatctgctgccgattccgctgctgttgctggctcaacatccccctactcaggcggtacagtaggcggttcattgggaagcacttacgatgatgaataa

SEQ ID NO: 137418 - DNA, 459 bp, Enterobacter cloacae
atgcccgaacatgcgccaccaggccccgtgcgtcgccccggactgctcggctggatagcattacttcccggcgtgctggtcggcttttgcctcggcgcgtggatgctggcgataacgctggagtggctgggcgaggcgtttttctggcggaacacctgtgccagtcacagtgagcaggtattgcaggtgacatggcagtggtggaaaagctctgctggcgcaccgatgtggttagtagaagacctcgcgattgtcagcgatacgttgcagcaagggattgcggcgctggttcattcgctcaacgggcaaagcgggttgttctggacggaaaccatcactacggtgatccgctgtgcgttactgtctgcgagtaagttacccttacctttctgctgcgctggctattttattgcaggcgctaccacagtttgtgctgaccattgttatagggctgattga

SEQ ID NO: 137419 - DNA, 1488 bp, Enterobacter cloacae
atgagcttacctgaggaaaaaatagctaaacgagcactgaaagccattgaatttatttgtcgacagctctcgcgctttgcaaaaatgacacccgttgagcttatggcttacttacgaaagaatcccaaagatgccttttgtaatattccccatccgaaaggaaatggacatatccattgtggttctcttgcctggaacaagctgaatgagcttgtagacctcactatcgaattggatcacggtcttgggcgacgagtaggccgcaaactcgcaaaggaagccgtaataaatgcttttgttaaaagagtattacaggaggcacgtggagttgatcaggaaaccgcaatgctgcttcttaaagacgctttaacgattttgagagaaaagcttgtagttatcgaacactacctaccgtgtgtgcttttccctggggatacacctactgaattcagcgttggtcctgtcacattcgtccgtcgctccaagttcttcgatgataaaaaatcagtactaaaacatagtattcatgttaacacgaaggcgcatattcagtgcgtaaaggaagcgattgctcaaggtttcccacaagaacgcacgcacactaaagatgaatcaagacaactagtgcgtaaattacagtcccgagcagtcaaagcctacaaagactatccatggattgcttgtgtgaaagtgagtgattgtgatgaagcaatctctaaagaacgagcgctccaagctacagagatggcgcttcacatcatccgtatcctcttgggagctaaaccgacaagggaaattaggctagcatggtcacgcagcggagctctgcgctcggcacatttgcacgctgatgtacatggtgtgattcacgcaagtctctgcgctgattctttagaaccggttggtgtaataaactggcatgaagcattgataagggcaaatttagaattagacatcctcggttctgctttgatatccatagtcaatccagtagaaactactcaccttcaccagcgccttattgacgctatcaattggtttggggacgcggttacagattcaaatgtacattcgagtatcgtaaaatacgtatctgcaattgagcggttgttcttcggtaaattcgaagcagggcgtacaaaattgtttgccggtcgggttagggatgtgttgaaagctttcaattgtgatgaagagcatcatgtttacactaaagctctagaactatacaaaactcgttcggctttagtacatagtgaacaatttcgcactgaagatgaatcctttaacagtattaatattgcatcagaattaagtaggatgtgccttctatgctctgcacagctttactccatgatgctacaagcattcgaaaatcctaataatgcaaaattagaagaaatcatgaagcgcataaacgatgaagggttgaattggctggcagaggctgcagcattaggctgtgcaaaacactctccaatcagataa

SEQ ID NO: 137420 - DNA, 705 bp, Enterobacter cloacae
atggcgctgaccgtggcggctgaacgctatccgcgatacggatttaaaaagctttttcaggtgctgcgcaggcagggcaaaagctggaaccataagcgcgttcaccggatttactgcctgctgaaactgaattttcgccgtaagggaaaacagcgcgtgccagtgcgcaatccggttccgctggtgacgccagaggcgatgaaccagagctggtccatcgattttatgcacgatgcgctggtgtgcggcagacgcttccggaccttcaacgtggtggatgattttaaccgcgaagcactggcgatcgaaattgacctgaatatcccggcgcagcgggtcgtgagagtgctggacaggatcgtggcaaaccgcggatatccgctaaagatgcggatggataacggtccggaactggtctcgctgacgctggcacaatgggcagaagagcatggtgtgatgctggagtttatcaggcccggcaagccaacgcagaatgcctttatcgaacggttcaaccggacatacagaacagaaatactggatttttatctgttcagaacactgaatgaagcacgggaaattacagagcgctggctggctgaatataacggcgagcgcccccacgaatccctgaataacctgacgccggaagaataccggctgatggctgaaaccccggaaatctcaaaaagtgcgtggaactaa

SEQ ID NO: 137421 - DNA, 282 bp, Enterobacter cloacae
ttggaggagatcgccatacgcaaagcccgattcaccgaacaccagatcatcgccgttctgaagtccgtcgaagccggacgcaccgtcaaagatgtgtgccgcgaagccgggatttctgaggcctcgtactacaactggaaagcgaagttcggcggtatggaagcctctgatatcaaaaagatgaaggacctcgaagatgaaaaccgccggttgaaacagatgtttgcggacctgagcctcgagtgccgcgcattgaaagacgttattgaaaaaaatctttaa

SEQ ID NO: 137422 - DNA, 342 bp, Enterobacter cloacae
atgaatactttacctgcaataaaccagcgggctattcagttatgcccatcgcctgtaactatctggcaaacgttgctaactcgtttactggaacaacactacgggctggcgctgaacgacacaccgttcggtgatgaaagcgtgattcaggaacatatcgaggccggtattacactcgttgatgccgttaacttcttggtggaaaagtacgagctggttcgtatcgaccgctgggcgtttggctggttggaaccatctccatacttgcgagctgtagacattctgcgaatgcgtcgggacatggggctgttgcgaggctgcaaccacactgcagcaatgtga

SEQ ID NO: 137423 - DNA, 351 bp, Enterobacter cloacae
atgtcgagtaagacactcactgtgaatgatgatacagctgagccctggtgggggctgaatcgtaatgtcattccttgttttggtgcacgtctggtccaggaaggtaaccgcctacattacctgtctgaccgcgccagcataacaggtcagttcaataaagcggatttgctccatcttgaccaggcatttcctgttctgctgaagcaggcggagctcatgcttaccagcggcgaactgaatccccgacaccagcatagcgtcaccctctatgcaaaggggttgacctgtgaagctgatacgctgggttcctgtggtcacgtctatatctccatttatcctactcaacgctaa

SEQ ID NO: 137424 - DNA, 222 bp, Enterobacter cloacae; identical to SEQ ID NO: 94026

SEQ ID NO: 137425 - DNA, 474 bp, Enterobacter cloacae
atgtccgaactgatgttaccttcggtcttcccgatgaatgaacaacgtaccatccgtcgtgccctgcgattactggagaaatatcagcggcagcccagtgagtcgttccttgccgctagtttcgcgaaaaactggttacagctctatttggcaaagcaggagcgcgaagtctttgttgttatctatctcgataatcaacatcgtctgctggagcatgaaacactcttcctcggtacgattaaccataccgaaattcatcctcgcgaaattgtgaaatctgcactgcgtcataatgcagctgcggtaatcatctcccataaccacccatctggcattaccgatgccagtaaagctgacagagccattacgtccaggattatagaggctctggggctggtcgatgtccggctactggatcatttcatcattggtgatggtgaagcgttgtcgtttgctgagcatggatggctataa

SEQ ID NO: 137426 - DNA, 567 bp, Enterobacter cloacae
gtggcaaagtcagtacccgcaatttttctcgaccgtgacggcactattaatgtcgatcatggctacgtccacgaaatcgacaattttgaatttatcgatggcgtcattgacgcgatgcgcgaactaaaagagatgggctacgcgctggtgctggtcactaaccagtccggtattgcccgcggtaaatttaccgaagcccagtttgaaacgctgaccgaatggatggactggtctctggcagaccgcggcgtcgacctcgacggtatctactattgcccgcatcacccgcagggtgcggttgaggagtaccgccagacctgtgattgtcgtaaaccgcatccggggatgctgatttccgcccgcgactatctgcatatcgatatggctgcttcttatatggtaggggacaaactggaagatatgcaggcggcagcggctgcggatgtcgggactaaagtactggtgcgcaccggtaagcccctgactgaagaagcggaaaaagcggcggattgggtgctaaatagcctggcagagctgccggcggcgattaaaaagcagcaaaaataa

SEQ ID NO: 137427 - DNA, 1032 bp, Enterobacter cloacae
atgattaaactttccaatatcaccaaagtattccagcaggggaatcgcagcattcaggcgctgaataacgtcagcctgcatgtccctgccggacagatttacggcgtcatcggtgcctccggcgccggtaaaagtacgctgattcgctgcgtgaacctgctggagcgcccgaccgagggcagcgtacaggttgacggtcaggaactgactgccctgtcggagaaagagctaacccgcgctcgccgtcaaattggcatgattttccagcattttaacctgttggcctcgcggaccgttttcggcaacgtggcattacccctggagctggataacacgccgcaggctgaaatcaaacgccgtgtcacggagctgctggatcttgtcggcctgggtgataagcacgacagctacccggctaacctctccggcggccagaaacagcgcgtggcgattgcccgcgcgctggccagcaatcctaaagtattgctgtgcgatgaagccaccagcgccctggatccggccactacccgttccattctcgaactgctgaaagacattaaccgtcgtctggggctgaccatcctgttgatcacccatgaaatggacgtggttaaacgtatctgcgactgcgtggcggtcattagtaatggtcaactgatcgagcaggacaccgtgagcgaagtcttctcccatccgaagacgccgctggctcagcagtttattcagtccactctgcacctcgatattccggatgactatcaggcgcgtctgaaacctaccgccacagcggatagcgtaccgatgctgcgcatggaatttaccggccactccgtcgatgcgccgctgctctctgaaaccgcgcgtcgcttcaatgtgaataacaacattatcagcgcgcagatggattatgccggcggggtgaagttcggcatcatgctcaccgaaatgcacggtacacaggaagacactcaggcggccatcgcctggctgcaggaacatcatgtaaaagtagaggtattgggttatgtctga

SEQ ID NO: 137428 - DNA, 654 bp, Enterobacter cloacae
atgtctgaggcaatgatgtggctgctgttgcgcggcgtatgggaaacgctggcaatgacttttgtctctggcttcttcggttttgtcctcggcctgccggtgggcgtgctgctgtacgttacccgtccggggcaaatcgtcgccaatgccaaactgtaccgtacgctgtcggcgctggtgaatattttccgctccatcccgttcattatcctgctggtctggatgattccgtttacccgcgtgatcgtcggtacctctatcggcctgcaggcagcgattgtgccattaacagttggcgccgcgccgtttatcgcccgcatggtggagaacgccctgctggagatccccaccggccttattgaagcctcccgcgcgatgggcgccacgccgctgcagatcgtgcgcaaagtcctgctacctgaagcattgccgggtctggtcaacgccgccaccatcacgctcatcacgctggtgggttattccgcaatgggcggcgcggtgggcgccggtggcctgggtcagattggttatcagtatggctatattggatataacgccaccgtgatgaataccgtactggtattgctggttgttctggtttatttaattcaattctctggcgatcgcatcgtccgggctgtgactcacaaataa

SEQ ID NO: 137429 - DNA, 816 bp, Enterobacter cloacae
atggcctttaatttcaaaacttttgcggcagttggcgcgttaatcggttctctggcgctggtgggttgcggtcaggatgaaaaagatccgaatcatattaaagtcggcgttatcgtcggggcggaacagcaggtcgctgaagttgcacagaaagtagcaaaagagaagtatggccttgacgtagaactggtgaccttcaacgattacgttctgccgaacgaagcgctgagcaaaggcgatatcgacgtgaacgccttccagcataaaccgtatctcgatcagcagattaaagaccgcggctataagctggtggccgtcggtaacaccttcgtctacccgatcgcgggttattcgaagaaaatcaaatcgctggacgaactgcagccgggctcgcagatcgccgtccctaacgatccgactaacctcggtcgttccctgctgctgctgcagcaggtcggtctgattaaactgaaagacggcgtgggcctgctgccgacctcgctggacatcgtcgagaacccgaaaaacctgaagattgttgaactggaggcgccgcagctgccgcgttccctggacgatgcgcagattgcgctggccgttatcaacaccacttacgccagccagattggcctgaccccggcgaaagacggcatctttgttgaaggtaaagagtctccttacgtgaacctgattgtggcgcgtgaagacaataaagatgctgagaatgtgaaaaaattcgttcaggcttaccagagcgatgaagtttacgaagcagcgaacaagatctttaacggcggtgccgtgaaaggctggtaa

SEQ ID NO: 137430 - DNA, 408 bp, Enterobacter cloacae
atgcgtgctttaccgatctgtttgttagcactcatgttaagcggttgttccatgctaagcagatctcccgttgagcctgctcaaagcactgcaaccccgccggttaaatctgagccgagcaaaccgcgcgccacccgcccggccccagtacgtatttacaccgatgcgtcagagctggttggtaaaccgttccgcgatctgggtgaagtatctggcgagtcctgccaggcttcgaatcaggattctccgccgaatatccccaccgcgcgcaagcgcctgcaaattaatgccgcgcgtatgaaagccaatgccgtcctgcttcaccgctgcgaagtgaccagcggtacgccaggctgctaccgtcaggccgtttgcctgggttcagcgcttaacgtctcggcgcaatga

SEQ ID NO: 137431 - DNA, 708 bp, Enterobacter cloacae
atgagcgcatttcagttcgcgcaaataggcgtcatccgttcgccgtataaagagaagtttgccgttcctcgccagccaggcctggtgaaacacggcggcggagaacttcatctggtcgcgccctataaccaggccgacgccgtgcgtggcctggagagcttcagccatctgtggatcctgtttgtgtttcatcagacaatggaaggcggttggcgtccgacggtgcgacctccccgactgggcggcaatgcgcggatgggcgtcttcgccacccgttcaacgtttcgccctaatcccatcggcatgtcgctcgttgagctcaagggcattcgctgtcagaaagatcaggtaatactggaactcggcagcctcgatctcgtcgacgggacgccggtggttgatatcaaaccgtatcttcctttcgccgaagccctgccggacgccagcgccagctatgcacagcaggcgccgctggcgggtatgaacgtcagctttacgccggaaataaacgcacagttactcacgctggaaaaacgctacccacatatcaaagcgtttatccgcgaggtgctggcgcaggatccgcgtccggcctaccgaaaagaggaacaagcgggaaaaacgtatgccgtctggctgctggatttcaacgtccgctggcgggtgactgcctccggttttgaagtctttgccctcgaagcgcgctaa

SEQ ID NO: 137432 - DNA, 1719 bp, Enterobacter cloacae
atgcgtactagccaatatctgctctccactctgaaggagacacctgccgacgccgaggtaatcagccatcagctgatgctgcgcgccgggatgatccgcaagctggcctccgggttatacacctggctgccgaccggcgtgcgcgtcctgaaaaaagtcgaaaacatcgtgcgtgaagaaatgaacaacgccggtgcgatcgaggtgttaatgccggtcgttcagccatctgaactgtggcaggagagcgggcgctgggagcagtacggcccggaactgttgcgcattgccgatcgcggcgatcgtccgttcgtcctcggcccaacccacgaagaggtcattaccgatctgatccgcaacgagctgaactcctataaacagctgccgctgaacttctatcagatccagaccaaattccgcgacgaagtacgcccgcgtttcggggtgatgcgctcccgtgaattcctgatgaaagatgcctactctttccatacttcgcaggaatcgctgcaggaaacctacgacgcgatgtatgccgcttacagcaaaatcttcagccgtatggggctggatttccgcgcggtacaggctgacaccggttctatcggcggcagcgcctctcatgaattccaggtgctggcgcagagcggcgaagacgatgtgatcttctccgacagctccgactacgcggcaaacatcgagtttgcggaagccgttgcgccgaaagagccgcgcgcagccgccacccaggagatgaccctggtcgatacgccgaacgccaaaaccatcgccgagctggtggagcagttcaacctgccgattgaaaaaaccgtgaaaactctgctggtgaaagcggttgaagatagcgcttccccgctggttgccctgctggtgcgcggcgatcacgagctgaacgaagtgaaagcggaaaaactgccgcaggtcgccagcccgctgaccttcgccaccgaagaagagatccgcgccctggtgaacgccggtccgggctccctgggcccggtgaacatgccggttccggtgattatcgaccgtactgtagcggtgatgagcgatttcgccgctggcgccaacatcgatggcaaacactacttcggcatcaactgggaccgcgatgtcgcgacgccggaagtggccgacatccgtaacgtcgtcgccggcgacccgagcccggatggtaaaggtaccctgcttattaagcgcggtatcgaagtgggtcatatcttccagctggggacgaagtactccgaggcgatgaaagctgcggtccagggcgaagatgggcgtaaccagatcctgaccatgggctgctatggtatcggggtgactcgcgtggtagcggcggcgattgagcagaactttgacgatcgcggtatcgtctggccggatgcgattgcgccgttccaggtggcgatcctgccgatgaacatgcacaagtcttaccgtgtgcaggagctggcggagaaactgtacgccgagctgagcgcccagggtattgaagtgctgatggacgatcgtaaagagcgtccgggcgtgatgttcgccgatatggagctgatcggtatcccgcacaccatcgtgctgggagatcgtaacctcgacaacgatgatatcgaatacaagtatcgtcgcaacggtgagaagcagctgattaagaccggagatattgtggaatatctggttaaagcgataaaaggctaa

SEQ ID NO: 137433 - DNA, 843 bp, Enterobacter cloacae
atgactgcacatctcctccgcagcggactgcttacttttgccctgctcctgcttaccgcctgtaccctggacgtcggccgcagctcgccttccacatctgctgccgatgaccattcatcatcctgggctgttaccctccagcgtcaaagctcgattgccggcagcggactgcgcgaaatcgccgaaagcgacctgcgctccggcgacctgctgttctcctccagcctgggcgtcacatcgcttgggatccgcgcattcagcgcctcttccgtaagccacgtcgcgctgtatgttggcgaaggtcaggttgcggaagccaccggcgccggcgtacaagtgattacccttcagcaggcgctggcgcacagcgataaactctttgctctcagggtgcctgacctgacgccggaccaggcgacggcgatgaaaagttttgcctggcaggtcaaagacagcgggtataactatcgcggcattattcagtttatcccttatatggtcaccaaaccgctctgctcgctcaaccccttctcacgagactttcgccagcagtgcgtcagtggcctggctaaagcgcagctgggcgatgcggcaagcggcgacaagaaagcgtggttttgctcggagtttgtcagcgaggcctttgtccgagccgggcatccgctgacgctcgcgcaggcggcgtggatcagtccttccgatctgctgcacatgcgggaaggagacgtcgccacgtttaaacccgaaacgcagctccagtatgtcgggcatttgaaactgggagtttatcttcaggccggtaagctggtggggctgaacaaaccgaaggacggtgcggagtaa

SEQ ID NO: 137434 - DNA, 720 bp, Enterobacter cloacae
atggatgataaggaaagcaaagtgaagaaaatcgtattctccgtgatagcggcctgttcgctgttcgcgctgtttggttgtaaccatcgcgccgagactgacacggtccagccagcggcgatggaagagctcaagccgatgcagcaaagctggcgaggcgtgctgccttgcgcggattgcgaaggtatcgacacctcgctgttcctggaaaaagacgggacctgggtgatgaatgagcactaccagggcgcccgtcgtgagccgtcatcctttgcctcgtacggcacctgggcacgtaccgcggataagctggtgctgaccaacagcaagggcgagaaatcttactttcgcgcgaaaggcgacaagctggagatgctcgaccgcaacggaagccccattcagtctcctctcaactataccctggagccagtgaaggccagcctgccgacgacgccgatggcgatgcgcggcatgtatttctatatggccgatgcggcaacctttaccgattgtgcgaccggtaaacgcgtcgcggtggcgaacaatgcccagcttgagcgggattatgccgccgcgcgcgggaccgatactcgcccggtactgctggtggtagaagggcactttactctcgaagcgaacccggataccggcgagatgatgaaaacgctgatgacggatcaagccggcaaatttattcccggtaaagactgcagccattga

SEQ ID NO: 137435 - DNA, 414 bp, Enterobacter cloacae
atgattactattagccgcagcgtagcccttgccgacgacgagatcgtcttgtcaggcattcgcgcccagggagcaggggggcagcatgtgaacaaagcgtcgacggcgatccatctgcgctttgatattaaagcttcaagcctgccggagttttacaaagagcgcctgctcgccgccagccaccacttaatttctgctgacggtgtggttatcattaaggctcaggaataccgcagccaggagatgaaccgtgaagcggcgatcgcccggctggtggcccttattaaagaattaaccgcagtgcaaaaaagtcgccgggagacgcgaccgactcgggcatcgaaagagcgacgccttgcttccaaggcacagaagtcctcagtcaaggcgctgcgtgggaaagttcgccagtga

SEQ ID NO: 137436 - DNA, 546 bp, Enterobacter cloacae
atggcgctgaaagcgacaatatataaagctgcggtaaatgtagccgatctggatcgcaaccagtttctggatgctaacctgacgctggctcagcatccgtcagaaacccaggagcgcatgatgctgcgcctgctggcatggatcaaatatgccgatgaacggctacagtttacccgcggtctgtcgtcggatgacgagccggagctgtggctgcttaacgatcatctcggggtcgatctgtggatcgaactgggtctgccggatgagcggcggattaagaaagcctgctcacgggcgcaggcggtggcgctgtttgcttataatagccgggcagctgaaatctggtggcagcagaatcagagcaagcttgcggcgtacccgaagctgaccatctggtatcttgatgatgcgcaactggcactgcttagcgcctttgccgaccgtaccatgacgctgcaggccactctgcaggagggcagtatctggttatccgacgctcggaataatctggaaattcagcttaccgcctggcaagcgtcggcatga

SEQ ID NO: 137437 - DNA, 201 bp, Enterobacter cloacae
gtggaccactattgtgagttaatacgcaagcggtatgcggaaatagccagcggagacttagggtatatcccggatgcgctgggttgcgtgttgaaagtattgaatgagattgcggcggatgaggccctttcggagtcagtcagggaaaaggccgcttatgcggcagcaaacttactggtgagcgattatgtcaatgaatga

SEQ ID NO: 137438 - DNA, 261 bp, Enterobacter cloacae
atgtcaatgaatgatacttatcaacccattaactgcgatgattacgacaacctggagctggcctgccagcatcacctggtgctgacgctggcgctgaaggatggcgaacagctgcaggcaaaggccagcgatcttatctcgcgaaaaaatatcgagtatctggtggtcgaactcgccggcaacgtccgcgagctgcgcctggataaaatcgccagcttcagtcacccggaaatcggcaccgtggtggtgagcgaatcctga

SEQ ID NO: 137439 - DNA, 1314 bp, Enterobacter cloacae
atgttcgtggatatgacggctgatattgcgcatacgcttcatccccatcgccagctgctggtggccttcagcggcggtctggactcgacggttcttctgcatcagctggtgctgctgcgggaacaggatccctcgctgacgctgcgggcggtgcatgttcaccacggccttagcgcccacgcagacgactgggtggcgcattgtcggcagatttgccagcagtggcaggtgccgctggtggtgcatcgcgtgacgttagcccggggagggctgggcgtcgaggcccacgctcgtgcggcgcgctatcaggcctttcaggatacgctcaatgccggcgaggtgttagtgaccgcccagcaccaggacgatcagtgcgaaaccctgctgctggcgttaaaacgcggcagcggtcctaccggcctgtcggcgatggcgccatcctctgcctttgccggcagtcgactactgcgtcctctcctcaatgaaacccgcgaatcactacgccagtgggcgctcgcccatcagctgtcgtggatcgaagatgagagtaatcaggatgatacctatgaccgcaatttcctgcgcctgcgggtgatcccggtgctgcgcgagcgttggccgcactttagcgaggccgtcgcccgcagcgccagcctgtgcgccgagcaggaacaactgctggacgagatgttggcggcggagctggcgtcgctggtggccgaagatggctcgctggctatcgcgccgctggcgacgatgagtccgccgcgccgagcggcgctgctgcgtcgctggctcgccgggcagcaggcgccgatgcccgcccgcgaggtgcctgagcgcctctggcacgaggtggcgctggcgcgggaagatgccagcccctgtctgcggctgggggaatttaccgtccgccgttttcaacagcgtttgtactgggtgaagtatcttcccggtcaggcggacagcgttcagcgctggcccgactggcgccagccgctgcggctggcggacggtctcggcgagctgacgctgcggcccggcggcaggctgcgcccgccgtcggcggatgagccggtcaccgtccgctttcgcgccagcggccacctgcatattgtcgggcgccatggcggacgcaagctcaagaagctctggcaggagctgggcgttgctccgtggcgacgagacaccacgccgctgctgttttacggcgaaacgccgattgccgcagcggacgatctgtttgtgaccacagaaggtgaagtgaaggacggggaaggggtcaggctgatgtggaggaaaacgggcgattaa

SEQ ID NO: 137440 - DNA, 390 bp, Enterobacter cloacae
atgctgggtttgaaacgggttcaccatattgccatcattgcgaccgactacgcccgcagtaaagcgttctattgcgatattctggggtttacgctgcaaagtgagttttatcgcgccgagcgcgattcctggaaaggcgatctggcgctcaacggcgagtatgtaattgagttgttctcgttcccgtttccgccagcccgccccagtcgtccggaagcctgcgggctgcgtcatctggcctttagcgtggatgacatcgacgccgcggtagcccatctcacctcgcatggcgtggagtgcgaagcgattcgtgtcgatccctttaccggtaaacgctttaccttctttagcgatccggacgacctgccgctggaaatatatcagcagtaa

SEQ ID NO: 137441 - DNA, 2190 bp, Enterobacter cloacae
atgatgcttgacttaggtgaataccaggaggaaagcgtgaatatcatcgccatcatggggcctcacggcgtctaccacaaagacgagccgatcaaagaactggaagcggcgctgcagcgccagggcttccagaccatctggccgcaaaacagcgccgacctgctgcagtttatcgagcacaacccgcgcatctgcggggtgatcttcgactgggatgaatacagcgtcgatctgtgcagcgatatcaatcagctcaatgaataccttcctctgtacgcctttattaacgcccactcgacgatggatgtcagcagtcaggatttgcgcatgacgctgtggttcttcgaatatgcgctgggactctccgaagagatcgccacccgcattgggcagtacacccgcgagtacctggagaatatcaccccgccttttacccgcgcgctgttcaactatgtccaggagggaaaatataccttctgcacgccgggccatatgggcggcagcgcctatcagaaaagcccggtgggctgcctgttctatgatttttttggcgggaatacgctgaaggcggatgtctcgatttcggtcaccgagctgggctccctgctggatcataccggcccgcacctggaggcggaggagtatatcgcgcgcgcctttggcgccgagcaaagctatatggtgaccaacggcacctcgacgtccaataaaattgtcggcatgtactcggcgcccgccggcagcaccctgctgattgaccgtaactgtcacaaatcgctggcccacctgctgatgatgagcgatgtggttcccctgtggctgaagccgacccgcaacgcgctggggatcctcggcggtatcccccggcgcgaatttacccgcgacagcattcagcagaaagtgcgcgacacgggcggggcgcagtggcccgtgcatgcggtgatcaccaactccacctacgatggtctgctctataacaccacctggcttaaggagacgctcgatgtcccgtcgatccatttcgattccgcctgggtgccctatacccatttccatccgatatatcaggggaaaagcggtatgagcggggagcggatccccgggaaagtcatcttcgagacgcagtcgacgcataagatgctggccgcgctgtcgcaggcctcgctgatccacattaaaggcaactatgatgaagagacctttaacgaagcctttatgatgcatacctctacgtcgccgagctaccccatcgtcgcgtcgattgagaccgcggcggcgatgctgcgcggcaactccggtaaacgtctgatccagcgctccattgagcgggcgctggacttccgcaaagaggtgcagcgactgcgcgaggagtcggacggctggttctttgatatctggcagccggaagccgtagataaagccgagtgctggccggtagcgccgggcgaggactggcacggtttcaaagatgccgatgcggatcatatgtatctcgatccggtgaaggtcaccattctgacgccgggcatggacgagcaggggaatatggatgaagaggggatcccggcggcgctggtggcgaagttcctcgacgagcggggcgtggtggtagagaaaacaggcccctacaatctgctgttcctgttcagtatcggcatcgataaaacccgggcgatggggctgctgcgcggcctgaccgagtttaaacgcgcctacgatctcaatctgcgggtgaaaaatatgctgccggatctgtacgccgaagatcccgacttctaccgcaacatgcggatccaggatctggcgcaggggatccaccgcttgatccgtcagcatcagctgccgcagctgatgctcagcgcctttgacgtcctgccggaaatgaaaatgacgccgcatcacgcctggcagcgccagatcaagggggaggtggaaactattgaactggagaacctggtggggcggatttcggccaacatgatcctcccttatccgccgggggttccgctgctgatgccgggagagatgatcaccgaggaaagccgggcggtgctcgattttctgctgatgctttgctctatcggccgtcattacccgggctttgagaccgatattcacggcgccaagcgcgatgaggacggtgtgtatcgggtacgagtcttaaaaaatgaccaaaggcttgcgcgttaa

SEQ ID NO: 137442 - DNA, 960 bp, Enterobacter cloacae
atgagtctgaatttcctagattttgaacagccgattgcagagctggaagcgaaaatcgattccctgactgcggtaagccgtcaggatgagaaactggatattaacatcgacgaagaagtgcatcgtctgcgtgagaaaagcgtagagctgacgcgcaaaatcttcgccgatctcggtgcatggcaggttgcgcaactggcgcgccacccgcgccgtccttacaccctggattatgtccgcctggcgttcgacgaatttgacgaactggccggtgaccgcgccttcgctgacgataaagcgattgtcggcggtatcgcgcgtcttgacggtcgtccggtgatgatcatcggccaccagaaaggtcgtgaaaccaaagagaaaattcgccgcaactttgggatgccggcgccggaaggctaccgcaaagcgctacgcctgatggagatggctgagcggtttaaaatgccgatcatcacctttatcgacaccccgggcgcctacccgggcgtcggcgcggaagagcgtggccagtcggaagcgatcgcccgcaacctgcgtgagatgtcgcgtctgagcgtgccggttatctgcaccgtaatcggtgaaggcggctccggcggcgcgctggcgatcggcgtgggcgacaaggtcaacatgctccagtacagcacctattcggtcatttcgccggaaggctgcgcctccattctgtggaagagcgcggataaagcgccgctggctgcggaagcgatgggcattatcgccccgcgtctgaaagagctgaagctgatcgattctatcgttccggaaccgctgggcggcgctcaccgcaacccggaagcgatggcggcaagcctgaaggcgcagctgctggcagacctggcagacctcgatctgctcagcgaagaagagctgctgaaccgccgttatcagcgtctgatgagctacggttacgcttaa

SEQ ID NO: 137443 - DNA, 543 bp, Enterobacter cloacae
gtggtcgctgaagcggactttatagccgatgcagccgcccggctcgctctgcagctcttcggcaatacgattggcgacggtccgcgccgccaggcgacgcggctgggtatggccgatgagtcctttcagcccgcgccccagctccatgcagattttgggcaactgggtggttttacccgaaccggtctccccggcgacgatcaccacctggtggtcgcgcaccgcctcgagaatctcttgttttttctggctaaccggcaggttttccggataggtgatggccggacgcgccgcttcgcgcagcaggactttaccggctgcctggcttatctccagcgccatctcctgcagaatggcctgttgcgattcaggatttttaaccttcttcacgccgtgcagacggcgggcaaagcgcgttttgtcgcgcagcatcaggccgtcgagctgttgataaagctgggggaaggtgattttttgttgttctgtcatagcgttatcgggcagagctctgccgggaaaatctcttttgaagtattgccttag

SEQ ID NO: 137444 - DNA, 606 bp, Enterobacter cloacae
atgagcaaagtattagttctgaaatccagtattctggcagggtactcacaatctggtcagctttccgactattttgttgaacaatggcaggaaaaacaccctggcgatgagatcaccgtgcgtgacctggccgccaatccgatcccggttctggatggcgaactggttggcgccctgcgtccgagcgacgcgccgctgactccgcgtcagcaggaagcgctggccctttccgacgagctgatcgccgaactgaaaggcaacgatgtgattgttatcgctgcgccgatgtacaacttcaacatcccgacgcagctgaaaaactatttcgacctggtggctcgcgccggcgtcaccttccgctacaccgagaaagggccggaaggtctggtaaccggtaaacgcgcggtcgtcgttaccagccgcggcggtatccataaagatactccgaccgacctggtcaccccatacctgtccaccttcctcggcttcatcggcatcaccgacgtgaactttgtgttcgccgaaggtatcgcttacggcccggaagtcgcggccaaagcgcagtctgacgcgaaagcggccatcgacagcgtggttgcagcctaa

SEQ ID NO: 137445 - DNA, 408 bp, Enterobacter cloacae
atggcagagaaattatccgctcattgtcactgcggtgcggtggcgtttaccgtggaactcagcgacggcttcaacaccgttcggcgctgtaactgctcatattgtcgcatgcgtggggcggtcgcggtctcttcgccgcgttcaggaatagaggtggtacgcggaggggataagctcacagagtatcgctttaatacaggggaagccgtgcactttttctgctcggtatgcgggatctacacctttcatcaacggcgatcaaacccacagcagtatggggtgaatgtggcctgcattgacggcgtttcgcctttcgatttcccttgcgtggaggtcaacgacggcgtgaatcatccaaaagatggcggcggaggcgtggtggggtatttacgctacgagaaaaagtaa

SEQ ID NO: 137446 - DNA, 597 bp, Enterobacter cloacae
atgccgatatatcagattgatggactgacgccggtggtgccggaggagagttacgttcacccgaccgcggtgttgattggcgacgtgatcctcggcaaaggggtctatgttgggcccaacgccagcctgcgcggcgacttcgggcgcatcgtggtcaaagacggcgccaatattcaggataactgcgtgatgcatggcttccccggccaggatacggtggtggaagaggagggccatatcggccacggcgctattctgcacggctgcgtgattggccgcaacgcgctggtgggcatgagtgcggtgattatcgacggggcggtcattggcgaaaacagcattgtcggcgcttcggcctttgtcaaagccaacgccgagatgcccgccaaccatctgattatcggcagcccggcaaaagcgattcgcaccctgagcgaacaggagctggcgtggaaaaaacaaggtacccgtgaataccaggcgctggtggaacgctgtaagcagacgctgcaccaggtggagccattacgggaagtcgaagcagggcgtaagcggctggcgtttgatgaaaacctgcggccaaaagccgccacctga

SEQ ID NO: 137447 - DNA, 936 bp, Enterobacter cloacae
atgaatcagatgagtaaactcgacgcctttattcaacaagcggtgacggcgatgccgatcagcggcacgtcattaattgcctcgctgtatggcgacgctttattacaacgcggtggggaagtgtggctgggcagcgtcgcggcgctgctggaaggattaggcttcagcgagcgcttcgtacgcaccgcgctgtttcgcctcaataaagaagagtggcttgatgttgtccgcatcggccggcgcagcttctatcgcctgagtgataaagggttgcgcctgacccggcgcgcggagcataaaatttatcgcgccagtgccccggaatgggacggtacctggctgttgctgctttcggaaggcctggagaaaaatgtgctcgccgacgttaaaaagcagctgctgtggcaggggtttggcgcgctggcgccgagcctgctggcctcgccgtcgcaaaagctggcggacgtccagtctctgctccacgaagcgggcgtcgccgaaaatgtcatctgttttgaagcccattcgccgctggcgctctccagagcggccctgcgcagccgggtggaggagtgctggcatctcaccgaacaaaatgagatgtacgaggcgtttatcgccttgttccgacctctactgccgctgctgcgcgattgcgacccgtcagagttgacgccggatcgctgtttccagatccaactgctccttatccatttctatcgccgggtggtgctcaaagacccgctgctgccggaagagctcctgccggcgcattgggcagggcaaaccgcccgccagctgtgtatcaatatttatcaacgcgtgagtcccggtgcgctggcgtttgtcagcgagaaaggtgagagctcggtgggcgagctcccggcgccgggtccgctctattatcagcgctttggcggtttgccgggcgcataa

SEQ ID NO: 137448 - DNA, 1317 bp, Enterobacter cloacae
atgataactactacaaaattagatccgattgaaaccgcatcgcgtgacgaactgcaagccctgcaaacccagcgcctgaaatggacgctgaagcatgcgtacgaaaatgtgccgatgtatcgccgcaaattcgacgccgccggcgtgcaccctgacgactttcgggaattaaacgatctgcaaaaattcccctgcaccaccaaacaggatctgcgcgacaactatcccttcgataccttcgcggtgccgatggagcaggtggtgcgcattcacgcctcttccggcaccaccggcaaaccgacggtggtgggatatacgcaaaacgatattgataactgggccaatattgtcgcccgttcgctgcgcgcggccggtggttcagcaaaagataaaattcacgtcgcctacggctacggcctgtttaccggcggccttggcgcgcactacggcgcggaacgtttgggcgcgacggtgatcccgatgtccggcggacagaccgaaaaacaggcgcagctgatccgcgatttccagccggatatgatcatggtgacgccgtcctactgtctgaatctgattgaagagctggagcgccagatgggcggcgatgcccgcagctgttcattgcgggtcggcgtctttggcgctgagccgtggacgctggcgatgcgcgcggaaatcgagcgccggctggggatcaccgccctggatatttacggtttgtcggaagtcatgggaccgggcgtagcgatggagtgtctggaaaccgttgacggcccgactatctgggaagaccacttcttcccggaaatcgtcaacccggacgacggtacgccgctggaagatggcgagcatggtgagctgctgtttaccaccctgaccaaagaagcgctgccggtgatccgctatcgtacccgcgatctgacgcgcctgctgccgggaaccgcgcggaccatgcgccgcatggatcgcatcagcggacgcagcgacgatatgctgattatccgcggggttaacgtcttcccctcgcagctggaagaggagatcctcaagtttgaacacctggcgccgcactatcagttagaggtcaatcgccgcggtcatctggattcgctggcggtgcgcgttgagctgaaagagagcgggctggcgctgagtcatgaacaacgctgccagatttgccatcagttgcgtcaccgcattaagtcgatggtcgggatctccaccgatattactatcgtcaactgcggcagcattccgcgctcggaagggaaagcctgtcgggtattcgacctgcgaaaagcggtggttagcggttaa

SEQ ID NO: 137449 - DNA, 1206 bp, Enterobacter cloacae
atgcgcgacgcctttatttgtgacgggatccgtacgccgattggccgctacggcggcgcgctggccagtgtgcgcgccgacgacctggcggcgatcccgctgcgtgagctcctgagtcgtaatcccgggctcgacccggcagcaattgatgatgtgattttcggctgtgcgaatcaggccggggaagataaccgcaacgtggcgcacatggcgacgttgttggccggttacccgcataccgtgccgggcaccacgattaaccgcctgtgcggatcgggtctggatgccatcggctttgccgccagggcgatcaaagccggcgatgccgatctgctgattgccggcggcgtggaatcgatgtcgcgtgcgcctttcgtgatgggaaaagccagcgcgccgtaccagcgtcaggcggaactctttgataccacgattggctggcgttttgtgaacccgctcatggcgcaacacttcggaactgacagcatgccggaaacggccgagaatgtagctgaattgttaaatatcagccgggccgatcaggacgctttcgcctggcgcagccagcagcgcacggcgcaggcccagcgcgacggcattctggcgcaggagattgtgccggtgcagattgtcggccggaaaggggcggttagcgacgttcgcgaggacgagcatccgcgcccggaaaccacgcttgagcagctggcgaaactgaaagcgccgttccgccagggcggcgtcatcactgcgggcaatgcttcaggcgtcaacgatggcgccgcggcgctgatcatcgccagcgaacagcaggccgctatccaggggctcacgccgcgggcgcgtatcgtggcgatggcgacggcgggtgtcgaaccgcgcctgatgggactggggccggtaccggcggtgcgtaaagtgctggagcgggcgggactcaatattaacgatatggatctgattgagctgaatgaggccttcgccgcccaggcgctgggggtgctcagacagctcggcgtgccggacgatgcggcgcacgtgaatcccaacggcggcgccatcgcgttaggccatccgctgggcatgagcggcgcgcggttagcgctgagcgccagccttgagctgcaacgccggggcgggcgctatgcgctgtgtacgatgtgtattggcgtgggtcagggcattgccatgatcctcgagcgagtgtga

SEQ ID NO: 137450 - DNA, 423 bp, Enterobacter cloacae
atgagcaatgatccgtggcgcaacgcgcgcgtgatgtacgaaaaagatacctgcgccagaaagatggggatcgaacttatcgaaatggacgacggttttgcgcagatgagtatgaccgtctcggcggacatgcttaacggccatcaaacctgtcacggtggtcagctatttacgcttgccgataccgctttcgcctacgcctgtaacagccaggggctggcggcggtggcctcggcggcaagcattgattttcttcgtccggcgtttgccggcgaccggctggtcgccaccgccagagtcaaacagcagggcaagctgaccggcgtctacgacatcgaaattgttaatcaacagcaaaagattgtggccctgttccgcggcaaatcgcaccgcatcggcggcacaatcacgggagacgtgtaa

SEQ ID NO: 137451 - DNA, 1422 bp, Enterobacter cloacae
atgacgacatccttagccaccgtggcggtgatcggcagcggcaccatgggggccggcatcgccgaagtggctgccgccgccgggcatccggtgcgtatttttgatattaaccctaaggctgtagacctggcgatagagggtatcgccgggcgtctggcgtcacgcgttgcgcggggcaaactggcgtcagagcaggctgatgcgctgctggcgcgcctgcatccggcccacgatttagccgcacttgccgacgcggatttagtgatcgaagcggcctctgaacggttggaggtgaaaacggcgctgttcgcgcagctggcggcgatctgcgcgccgtcaacgctgttgaccagtaatacctcgtctatttcgattaccgctatcgccgccggggtcaaaaacccggagcgggtggccggactgcacttttttaatccggcgccggtgatgaagctggtcgaggtggtgagtggtcttgcgacctccacagaagtggtggagcagctgtgccagtgcgtaagcggctgggggaaacagccggtgcgctgccgctcaacgcccggttttatcgttaaccgcgtagcgcgtccgttctacgctgaggcctggcgcgcgctggaagagcaggtcgccgccccggagattatcgatgccgctttgcgtgacggcggcggcttcccgatgggaccgctggcgttgacggacctgattggccaggacgtcaacttcgccgtgacctgttcggtgtttaacgccttctggcaggaccgccgctacctgccatcgctcctccagcaagagctggcgctggccgggcggctaggtaaaaagagcggccacggcgtctatcgctggcccgctgagacactgccggacgcggcgctgccgccggtaatgataggtgctgaatccgttaccgtcagaagtgacaatgtcactgaattagacgatgtcttgctgctggagactgaaggcgagaccgccctggcgctgagtattaagcatcaccgcccggtggtggtgtatgacctgtgcgccagcgatacggtggtgctggccgcagcggcaaccaacgcgcctgcggccactgataaggccgtgcattacttccagctgcagggcaagaaagtgctgcgtattgccgattatcccggcctgctggtgtggcgcacggtggcgatgctgattaacgaagcgctggatgcggtgcaaaaaggcgtcgccagcccgcaggatgtcgataccgcgatgcgccttggcgtcaactatccgcatggcccgctggcatggggagaacgccttggctggcggcgggtgctgcaactgctggagaacctgcaacaccattatggcgaggagcgctatcgccccagttccctgctgcgccagaaggcgctgatggagaagcaccatgagcaatga

SEQ ID NO: 137452 - DNA, 789 bp, Enterobacter cloacae
gtggaagctttcattctcagcgcagtggaacagggcgtcatgaccattaccctcaatcgcccggaccgccttaacagttttaacgacctgatgcatcaccagctggcggaatgtctgaagcaggccgagcgcgatgatggcgtgcgctgcctgctgataaccggcgccggccgcggtttttgcgccggccaggatttgaacgaccgcaatgtcgaccccagcggcccgccgccggatcttggcatgtcggtagaacgcttttacaacccgttagtgcgccgtctggcggcgctgccgaaaccggtcatctgcgcggttaacggcgtggccgccggcgcgggcgctaccctggcgctgggctgcgatatcgtgctggccgcgcgttcggccaaatttgtgatggcgttcagcaagctcggcctggtgccggactgcggcggcagctggttcctgccgcgggtggccggccgtgcgcgcgcgatggggctggcgctgctgggcgacagccttagcgcggaacaggccgcgcagtgggggattatctggcaactggtggacgattcagaactggcggataccagtctgcaactggcgcgccatctggcggcgcatccgacgtttggtcttgggctgattaaaaaggcgctgctggcctctgaaaccaacagtctcgacgcgcagctggacctggagcgcgattatcagcgtctggccggacgcagcgatgattaccgcgaaggggtcagcgcgtttctggccaaacggccaccacagttcagcgggaaatag

SEQ ID NO: 137453 - DNA, 768 bp, Enterobacter cloacae
atgagcgacctgctgatccaccgtcatggccgggtgcttcagttgacgctgaaccgcccgcaggcccgcaacgcgctgaacaatgccttattaacccagattgccgaggtgctggaggccgcggcagttgatgacagcgtcggcgtctgcgttattcgcggtaacgcgcgttttttcgccgccggggctgacctcaatgaaatggcggaaaaagatctgcctgccaccctggatgatattcgcccacggttatgggcgcgaattgatgccttctccaaaccgctgatcgcctcggtcaacggctacgcgctcggcgccggctgcgagctggccctgctgtgcgacctgattgtcgccggggacaatgcccgctttggcctgccggaaattaccctcggcataatgccgggcgcgggcggcacccagcggctgatccgcagcgttggcaaggcgctggccagccggatggtgctgagcggcgagagtattgacgcccgccaggcgcagcaggccgggctggtcagtgatatccatccggcggcgttaaccgatgagtatgccctgaaactggcaaccaccattgcccgccattcgccgctggcgctacgggcggcaaaacagtcgctacgcctgtcgcaggaagtcagcctgcaggccggtctgcaacaggagcgccagctgtttagcctgctgagcgctaccgaggaccgccgcgaaggcatcgacgccttcttacaaaaacgtaccccggaatttaaaggacgctaa

SEQ ID NO: 137454 - DNA, 408 bp, Enterobacter cloacae
atggacgaggcggaagcgacgttacgtgaacttggcgtagcggagaaatcgattcatctcgaacgctttaataccccaggcggcaatgtgaagcgggccgctggagtgcaggcggaagggcgcacggtgaccatccgccaggacgggcgcgatcggcttatcgccctcagcgccgaagacgacagcatcctggatgccgcattgcgtcagggcgccgatctgccgttcgcctgtaagggcggggtatgcgccacctgtaaatgtaaagtgctgcgcggcgaagtggcgatggccgccaattacagcctggaagcggatgagctggcggcgggctacgtgctgagctgccagtcgctgccgaccagcggcgatgtggtggtcgactttgacgcgcgggggatggcatga

SEQ ID NO: 137455 - DNA, 603 bp, Enterobacter cloacae
  misc_feature (573)..(582): n is a, c, g, or t
atgacgacgttccattcgcttaaggtggcgagagtcgagccggaaacccgcgatgcggtgaccatcacttttgcgattccgcaagccctgcaggcggaatactgttttcgcccgggccagcatctgacgctaaaagcccgtctgggcggcgaagaactgcgccgctgttactccatttgtcgcagccgcacgcccggcgaaattagcgtcgcggtcaaagccatcgacggcggacgcttctcgcgctacgcccagcacgatatccagcagggtatggagctggaggtgatggtgccgcaggggcatttcggttatcaaccgcaggccgaacggcagggagaatatctggcgattgccgccggctccgggatcacgccgatgatggcgatcatgagcgcgacgctggcgaccgagccgcaaagccgctttacgctgatctacggcaaccgcagcagccatagcatgatgttccgccaggcgctggccgatttaaaagaccgctatccgcagcgcctgcaggtgatccacctgtttagccaggagtcgatggacagcgatctgctacaggggcgnnnnnnnnnncaggctccatggccgcattga

SEQ ID NO: 137456 - DNA, 498 bp, Enterobacter cloacae
atgcaacgtcttgccgatatcgctcctgcagaggttcgcaccatctggggattattaagcgcgatcccggatccggaagtgccagtactcaccatcaccgaccttggtatggtgcgcagcgtcgcgcgccatggcgacggctgggtgattggctttaccccgacctattcgggctgtccggcgacggagcatctgctgggggagatccgcacggtcatgagcgagcatggctttcagccggtacatatcgtcctgcagctggatccgccgtggaccaccgactggatgagtcaggatgcccgcgagcgcctgcgccagtacggcatcagcccgccccaggggcacgcctgccatgcggacatgcccgctgaggtgagctgtccgcgctgcggcagcgcccatacctcgatgattagcgaattcggttccacggcctgcaaagcgctctatcgctgcgacagctgccgggaaccttttgattactttaaatgtatttga

SEQ ID NO: 137457 - DNA, 756 bp, Enterobacter cloacae
atgaataaccctaaccccgtagccacctacgccctgcggcttggcgacaatggtctggttctggcccagcgtttaggcgcctggtgcggacatgctcccgagctcgagatcgatcttgcgctggccaatatcggcctcgacctgctcggccaggcgcgcaattttttaagctatgccgccgagcttaacggttgcggcgacgaagatacgctggcttttggccgcgatgagcgccggttcagcaacctgctgctggtggagcagccaaacggcaattttgccgacactatcgcccgccagttctttatcgacgtctggcatgtcgccctgttcagccggctggtgaacagccgcgacgcgcagctggcggccattgccgctaaagggctgaaagaggtgcgttaccaccagcgctttagccgcggctggctggagcgtctcggtaacggcaccgaattatcaaatcgcaaaatgcagcaggcggtcgacaatctgtggcgcttcaccggcgaactgttcctggctgatgaagtggagctcagcctggttgagcagggcattgcggttgatccgcgtgaactgcaggccgaatggcaaagcgcggtacacacggcgcttctcgtctccggcttacagatcccgcaggaagcggccttccgcagcggcggcaaacaggggctgcacagtgaacatctcggcccgctgctggcggagatgcagtatctgcagcgttcgcatcccggactgcagtggtaa

SEQ ID NO: 137458 - DNA, 288 bp, Enterobacter cloacae
atgagcaaagtttattggccgttatatgaagtgttcgttcgcagcaaacaggggttatcccatcgtcacgtcggcagtctgcacgctgccgatgatcaaatggcgctggagaatgcccgtgatgcctacacccgccgcagcgaaggctgctcaatttgggtggtgaaggccagcgaaatcgttgcttcgcagccggaagatcgcggcgaattcttcgacccggcggaaagcaaagtctaccgtcatccgactttctataccgtgccggacggcatggaacatatgtga

SEQ ID NO: 137459 - DNA, 930 bp, Enterobacter cloacae
gtgacagaagaacaacgctttgaccagcgcatcgcgcaggaaacggccatcgaaccgcaggactggatgccggatgcctaccgtaagaccttgattcggcagataggccagcacgcgcactcggagatcgtcggcatgctgccggaaggcaactggatcacccgcgcgccgacgctgcgccgcaaagcgatcctgttggctaaggtacaggatgaggctggacacgggctgtatctctatagcgccgcggaaacccttggctgcgcccgggaagacctgtatcagaagatgctcgacgggcagatgaaatactcctccatttttaactacccgaccctcagctgggcggatatcggcgtgatcggctggctggtcgatggcgcggccatcgtcaaccaggtggcgctgtgccggacctcctacggcccctatgcccgggcgatggtcaaaatctgcaaagaagagagctttcaccagcgtcagggttttgaagcctgcatggcgctggcgcagggcaatgaggcgcagcggcagatgctgcaggacgctattaaccgcttctggtggccggcgctgatgatgtttggccctaacgatgacaactcgccgaacagcgcccgcagcatggcgtggaaaatcaaactgcactccaacgacgagctacgtcagcgcttcgtcgacaataccgtgccgcaggtagagatcctcggtatgaccgtcccggacccggatttgcagtttgatgaagccagcggccactaccgcttcggcgaaatcgactggcaggaatttaacgaggtgattagcggccgtggcatttgcaatcacgagcggttggccgccaagcgtaaggcctgggaagagggcgaatgggtgcgcgaagccgcgctggcccatgcgcaaaaacagcaggcccgcagcgcggcatga

SEQ ID NO: 137460 - DNA, 1932 bp, Enterobacter cloacae
  misc_feature (1257)..(1262): n is a, c, g, or t
atgcagcagttagccagctacttatccggcgcctggcagaccggccggggccgcgcccgtactatccatcacgccatcaccggcgcggcgctttgggaggtgaccagtgaaggcctggatatggcgcaggcgcgccgcttcgcgattgagcgcggtggtaaagccctgcaggcgatgacctttattgaacgcagcgcgatgctgaaagcggtggcgaaacacctgctggagcagaaagaccagttctacgccatctccgcgcaaaccggcgccactcgcgccgacagttgggtggatattgaaggcggtatcggtacccttttcacctatgccgggctcggtagtcgagaattaccggacgatatcctgtggccggaagacgagctcatcccgctctccaaacagggcggttttgccgcgcgtcatgtgctgacatcaaaatcaggcgtcgccgtccatatcaacgccttcaacttcccctgctggggaatgctggaaaaactggcgcccacgtggcttgccggtatgccggcgatcattaaaccggcaaccgctaccgcccagctcacccaggcaatggtgaaagcgattgtcgacagcggcctggtgccggagggcgccatcagcctgatttgcggcggcgcgggcgatctgctcgaccacctcgatagccaggacgtggtgacctttaccgggtcagccgccaccggccagcagctacgggcgcaccctaacctggtagccaaatccattccctttaccatggaagcagattcactcaactgctgcgtgttaggcgaagacgtcactccggagcaaccggaattcgcgctgtttattcgggaagtggtccgcgagatgacggcgaaagccgggcaaaaatgtaccgctatccgcagaatcattgtgccactggctcagattaatgcggttagcgatgcactgatctcccgcctgcataaagtaaccgtcggtgaccctgcgcaggagggcgttaagatgggggccctggttaatagcgaacagcgtcaggacgtacaggagagcgtcaataagctgatagccgctggctgcgaagtactactcggtggagaggcggatctcagcgcggccggcgcatttttcccgccgaccctgttgtactgctcacagccggatgaaacgccggcggttcacgccattgaagcttttggtccggtggcgacgctgatgccgtatcgtgaccgccagcatgcgctgacgctggcggtcacgatnnnnnngtcaaccggccacggttcgccgctgccgcagctggtgcacggcggccccggccgcgctggcggcggagaagagcttggcgggctgcgttcggtgaaacactatatgcagcgtaccgcggtccagggcagcccaacgatgctggcgaccatcggtcaacagtgggtgcgcggcgcccaggtgaacgaagaccgtattcacccgttccgcaaatatttcgaagagattcagcctggcgacagcttattaaccccgcgccgaaccctgaccgaagcggatatcgttaacttcgcctgcctgagcggcgatcatttctacgcgcacatggacaaaatcgccgccgccgagtcgatttttggcgagcgggtggtccacggttatttcctgatctccgccgcggccgggctgttcgtcgatgccggcgtcgggccggttattgccaactatgggatggaaaacctgcgctttattgagccggtcaaaccgggcgacaccattcaggttcgcctgacctgtaagcgtaaaacggtcaaacgtcagcgcagcgccgatgagaaagccaccggcgtggtggaatgggcggtggagattttcaaccagcaccagcaggcggtggcgctgtattccattctgaccctggtggcgcgtcaacagggagatttcccggcgtga

SEQ ID NO: 137461 - DNA, 270 bp, Enterobacter cloacae
atgaaactatccctctgcaccggcgctgcgctactgctgtgctccacggccgtactggcggctcccgactcctgtgaacgggtcaaaagcgacatccagcagaagatcatcaacaatggcgtaccggaaaccgccttcagcctggccattgtgccaaacgatcaggcagaccagcccggggttcaggtggtcggtcattgcgccaacgacaccttcaaaatcacctatacgcgtaacagcgacagtcccgccgaaaacgacgctcagtaa

SEQ ID NO: 137462 - DNA, 711 bp, Enterobacter cloacae
gtgaaaagattgtattggctgatcccggcagcgctgctgctgacggcatgcgaccgtaaaagcgccccggacgccttcaccccggagatggcgagtttttccaatgagtttgagtttgatcccctgcgcgggccggtgaaagattttagccagacgctgctggatgaacacgatgtggtggtcaagaaggtgagcgctcagctctcaagggaagggtgtttcgatctgctgaccctggaagatgtggagaacaaaaccggcgccacgctgctgctggacgccaactattacgtcgacgggcgcacccacgagaagcggctgcgcctgcagggcaagtgtcagctggcggagatgcctgccgccggggtgagttgggagacggatgataacggttttattatcagcgcacgcggcaaagagaccaccgccacctacagctatgacagcgatggctatccgctgggaaaaaccaccaccgccaaagaggagcgatttaccgtcgcctcaacgccgtcaaaggatccgcgtaagaaattggactataccgccatcagcaccttcaacgatcgcacgctgggcacggtgcgtcagacctgcgactacgacgatcacgacaatccgctgagctgtgagctgcaggtgatcgatgaaagcgtccagccgccgctgacccgccactacaccattaaaaaccgtatcgattattactga

SEQ ID NO: 137463 - DNA, 561 bp, Enterobacter cloacae
atgaccgacgcgctacacgtcaaactccgcccgcttgagcgcgaagatttgcgcttcgtccaccagctcgataacaacgccagcgtcatgcgctactggtttgaagagccgtacgaggccttcgttgagctctccgatctgtacgacaaacatattcacgatcaaagcgagcgccgctttgtcatcgaatgcaatggcgataaagccggactggtggagctggttgaaatcaaccatgtgcaccgccgggccgagttccagatcatcatctcccccgacttccagggaaaaggtctcgccacccgcgccgcacgcctggcgatggactatggctttaccgtgctcaatctgtataagctgtatttaatcgttgataaagagaatgaaaaagcgatccatatttaccgtaagctcggctttatggtcgagggtgaactgatccatgagtttttcattaacggcgagtaccgcaacaccatccgcatgtgcctgttccagcaccagtatctggccgagcacaaaacgtccgggccgtccctgctgaagccgacggctcagtaa

SEQ ID NO: 137464 - DNA, 342 bp, Enterobacter cloacae
atgaacatgacactgaacaaacgctggtgcctgaccgccattctggcgttaagcgctgtggtctacacctccagctcctatgccgccaccgaccggctggtgattgaatctggcgacagcgcgcagagccgtcagcaggcgtcgatggaaaaagagcaatggaacgacacccgcagcctgcgccagaaggtgaacaaacgggcggaaaaagagtgggataaagccgatgtcgctttcgacgcgcaggataactgccagaagagcgccaacgtcaatgcctattgggagccaaacaccctgcgctgtcttgaccgtcgcaccggccgcgcgatcaatccctga

SEQ ID NO: 137465 - DNA, 327 bp, Enterobacter cloacae
atgctcaaaacaacgctgctgttctttgctaccgctctgtgtgaaatcgtcggctgttatctaccgtggctatggctcaagcgcggggcaacgccgctgctgctgatccccaccgccctggcgctggcgctattcgtctggctcctgacgctccatccggccgccagcgggcgggtatatgccgcctacggtggggtgtacgtttgtaccgcattgctctggctgcgggtcgttgatgggatcaaattaacccattatgactgggcgggcgcggccatcgccctgtgcggcatgctaatcatcgtggcggggtggggacgggcctaa

SEQ ID NO: 137466 - DNA, 1284 bp, Enterobacter cloacae
atggctatcgagactcttgccgcccggaccggggcgacgccgttacgcatccgtcgggtgcagaagatcaccctgacgctgctgtttatcgcgggtatcgtcaactttcttgaccgctcttcgctgagcgtcgccggggaggcgatacgcgccgacctgggccttagcgccaccgagttcggggtgctgctctccgccttttcgctctcctacggcttcgcgcaactgccctccggtattttgttggatcgcctggggccacggattgtgctgggcgccgggctgattttctggtccgcaatgcaggccctgaccgggatggtcaattcgttctcgcattttattctgctgcgcattggcctcgggatcggcgaagcgccgtttatgccagccggcgtgaaatcgatcaacgactggtatgcgcaaagagagcgcggcacggcggtgggaatattcaactcctcgacggtgctgggccaggctatcgccccgccggccctggtcatcatgcagttggcctggggttggcgaacgatgtttgtggtgattggtttagccgggatcgtggtcggcctgtgctggtatgtgggctaccgtaaccgtcggcagtttaccctgcaggaggaggagcagcagtatctggccagtgaggaggcggcccgcccggcgctgaagtttagcgaatggctggctctgtttaaacggcggactacctgggggatgatcctcggcttttccggtgtgaactacaccggctggctgtatatcgcctggttacccggctatttgcaggcgcagcaggggttaagcctggcccgtaccggctgggtggcggcgatcccgtttcttgccgcggcggtggggatgtgggtcaacggcctggtggtcgatgccctggcgcgcagaggctacgatcaggcgaaaacccgcaaaacggcgattgttatcggtctggtgctgtcggcgctgggcaccttgctggtggtgcaatcgtccacgccagcccaggcggtggcttttatctccatggcgctgttttgcgttcattttgccgggacgtccgcctgggggctggtgcaggtaatggtggcggagcataaagtggcttcggtggcggcgatccagaacttcggcagctttgtgtttgcctccttcgcgccgatcgtgaccggctgggtagtggatacgactcactctttcaatctggcgctggtgatcgccgccggggtgacctttgccggggcgctgtgctacttctttatcgtcaaaactcgcatcgattaa

SEQ ID NO: 137467 - DNA, 1515 bp, Enterobacter cloacae
  misc_feature (50)..(59): n is a, c, g, or t
atggttgatgggctacataacaacgagagtcatcatggaaaacaccctcnnnnnnnnnncaccctcttaaccgctaacgccacgctgccgacctacgatcgcagcgcactgatcccccgtatcgttcatcttggttttggcgcgtttcatcgcgctcatcaggctgtgtatgccgatatactggccagcgagcacggcagcgactggggctacaccgaagttaatctgattggcggcgagcagcagatcgccgatctccagcagcaggatctgctgtataccgtcgccgaaatgtccgccgacgcctggaccgcgcgcgtggttggtgtggtgaagcaggcgctgcacgccggggttgatggtctcgaagcggtgctggcggcgatgtgtcagccacaggtggccattgtctccctgacgattactgagaaaggctattgccattcgccagccagcggcgaactgcagctcgatcacccgctgatcgccgccgatctgcataacccgcaccagccaaaatcggcggcgggggtagtggtggaggccttatctcgccgccgggcggccggcctgcctgcttttaccgtgatgtcctgcgataacatgccggaaaatggtcacgtgatgcgcaacgtcgtctgcgcctacgcccgggctttagacgaggatcttgccgcatggatagagcagaatgtcacctttccgtcgacgatggtggaccggattgtcccggcggtgactgccgaaaccctcgataaaattacccagctgaccggggtgcgcgacccggccggggtggcctgcgaacctttccgtcagtgggtgattgaggataactttgttgccggacgtccgcagtgggagaaagcgggagcggaactggtcgccgacgtggtgcctttcgaagagatgaagctgagaatgctcaatggtagccattcgttcctcgcttatctcggctatctggccggttatcagcatatcaacgactgtatgcaggacgataactaccgtcgcgcggcgctgtcgttgatgctggacgaacaggcaccaacgctgaaggtgcagggggtggatctgtcacgctatgccagtttgctgattgaccgttactgcaatccggcgctgaagcaccgcacctggcagatagccatggacggcagccagaagttgccccagcgcatgctggactccatacgctggcatctggtgcatcagcgtgattttacactgctggcgctgggcgtggcagggtggatgcgttacgttggcggcgttgacgatgcgggccagtcaatcgagatatgcgacccgttgttgccggttatccagcaagcggtggctgccagcgccgatggcgaagcgcgagtcaaagcgctgctgggtattgaggctattttcggcgtcgaactgccgcaggagtcacgctttgtcacggcggtgacccgcgcctacttagcgctgcagcggcagggggctaaagctaccgtcgccgcgtgggccgccgcgcaataa

SEQ ID NO: 137468 - DNA, 432 bp, Enterobacter cloacae
atgtataaaaaaattttattgcctgttgatgtctttgaaatggatttaagcgataaagcggtgcgtcacgcggaatttctcgcttcggccgaaaatggcgagatcaccttgctcaacgttctgccgaacagcagccgttcgctattgcgcggttttacggcggatattcgtaagtttgaagcctatatggaagaagagtcggagaaaaaaatgcgcgaggtggcgcgactgttcgccatccccatgacgcggatccatacccgcgtagtctttggcaacgtgcgtgacgaaattctggctatcagtaacaacgaagagttcgatgtcattgtgattggttcccgcaaaccagggatctccacccatctgctgggctccaacgccgagtcaattctgcgctacgccaaaacgccggtattggtcgttagataa

SEQ ID NO: 137469 - DNA, 666 bp, Enterobacter cloacae
  misc_feature (37)..(46): n is a, c, g, or t
atggccgcagaatcgcaactgaatccgacgcaacccnnnnnnnnnngggatatcgttcactgcctgatcccgcctggtacaccgctgtcggagaaagaagtctccgtgcgttttgcggtgtctcgtcagccggtgcgcgaagccttcattaagctggcggaaaacggacttatccagattcgtccccagcgcggtagctacgtcaataaaatctcattgtcgcaggtgcgtaatggttgcttcgtccgccaggcgattgagtgcgcggtggttcgccgtgccgccggcatgattaacgaagagcaactttatcagctggaacagaatcttcaccagcagcgtattgccgttgatcggcagcagttaaacgactttttcctgctcgatgatgaatttcaccagaagctgtcgattatcgccgactgtcagctggcctgggagacggtggaaaatattaaagccgccatcgatcgcgtccgctatatgagtctggaccatgtcacctctccggagatgcttctgcgccagcatcatgagattttcaccgcgctggaaaaacgcgatgccgaggcggtagaaaaagccatgagtatccatttgcatgaaatcagcgaatccgtactgctgattcgccaggagaaccgcgactggtttagtgaagaataa

SEQ ID NO: 137470 - DNA, 750 bp, Enterobacter cloacae
atgattatcatggtcaccggcgccaccgccggttttggtgaaagtattactcgccgttttatcgctaacggtcataaagtgattgccaccggtcgtcgtgaagagcgcctgaagacgctgaaagacgagctgggcgataatctttatatcgcgcaacttgacgtccgcaaccgcgccgccattgagacgctgattgctgacctgccggccgagtggcaggctatcgatgtgctggtgaacaacgccggcctggcgcttggtctggagccgtcgcaccgcgccagtgtggaagactgggaagatatgatcgacaccaataataaagggctggtgtacatgacccgcgccgtgctgccggggatggtggagcgcaatcgcggccatatcatcaatatcggctctacggcaggcagctggccttacgccggcggaaacgtctatggggcgaccaaagcctttgtccgtcagtttagcctcaatcttcgtaccgacctgcacggcaccgcggtgcgcgtgaccgacatcgagccgggtctggtgggcggcaccgagttttctaacgtccgctttaagggcgatgacgctaaagccgaaaaagcttacgaaaatacccaagcgctaacgccggaagatgtgaccgaggcggtctggtgggtcgccaccctgccgaagcatgtcaacatcaacaccctggagatgatgccggtgagtcagagctttgccggactcagcgttcaccgtcagggctaa

SEQ ID NO: 137471 - DNA, 2046 bp, Enterobacter cloacae
atgtccgaacgaaaccccttttttagcgtcagtacgttgccttaccaggcgccgccgttcgatgtgattgacgacagccactatcgcccggcgtttgatgagggcgtccggcagcagcgggccgaaattcgcgctattatcgacaatccgcagccggccagtttcgccaacacgctcgaggcgctggagcagagtggtcagctgctggcgcgggtgacgcgggtctttttcgccatggctggcgcccataccaatccttatattcaatcactggatgaacaattttccgccgaactcgccgagctggggaatgacatctggcttaatgcggccttgtttcagcgcgtgaacagcgtctacgagcagcgcgacgcgctggcgctggacagcgagtcctatcgtctcctgaccctgacgtggcaacgttttgttcacgccggggcgacgctggctcccgagcagcaggcggcgctgcgcacactgaacaccgaagcggctacgctgcaaagtcagttccagcagcgactgctgggagcggcaaaaagcggcggcctcgtggttgattacaggcatcaactggctggcctgagcgatgaggagatagcggcggcggctgacgcagcgcgtgaaagagggcttagcgaccgctggttgctgacgctgaccaataccacccagcagccgcagctgcttgcgctgcgcgaccggcaaacgcgggagaatctcttcgccgccggctggacccgcaatcagcagggcgatgagcatgatacgcgtgacctggtactgcggctggcggcgatccgcgcgcagcaggctgagctgttgggagccgctgattacgccagctgggcgctgaccgatcaaatggcggcttccccggcggaggcattgggctttatgcgtcagatcgcgccggcggcgcgggcgagggcggaacgtgagttggcggacatccagcaggtgatcgacaacgaaggcgggggttttcgcgcgacggcatgggactggctttactacagcgagcaggtgcggcgggctgcctatgccattgatgacgcgcagctcaaaccctattttgccctcgagcgggtgctgcaagacggtgtattctggacggcctcgcagctctttggtctgcgctttgttgagcgcttcgatataccggtctatcacccggatgtgcgggtctgggagatcttcgatcacaacggcgaagggatggcgctgttttacggtgactactacgctcgtgactcaaagagcggcggcgcatggatggatgtgtttgtcgaacagtcgactctgcgcgcgcagcgcccggttatctacaatgtctgcaactacgtccgcccgcaggcagggcaaagcgcgctgctgtcgtgggatgaggtgatcaccctgtttcatgagttcggccataccctgcatgggctgttcgccagccagcgctacgccagtctctcggggaccaatacgccgcgcgattttgtcgaatttccttcgcagatcttcgaacactgggccagccagccgcaggtgtttgcccactacgcgaagcactaccagtccggggagccgatgccgcaggcgctacgcgacaatatgttgcgtgcggcaaccttcaataaagggtatgacatgagcgagctgttggctgctgcgttactcgatatgcggtggcatagcctgtcgacctcggcattaccggaggaggtggacgcgtttgagcagctggtgcttcgggaagagaacctggatctggcggcggtccccccgcgctatcgcagcagctatttctcccatatcttcggcggcggctatgcggcaggctattacgcctatctgtggacccagatgctggccgacgacggctatcaatggttcgtggagcagggcggtttgacccgtgagaacggtcagcgtttccgtgaggcgattttatcacgcgggaacagcactgatttagctgaactgtatcgccagtggcgcggacacgatccgcagattgagccgatgctgaaaaatcgcgggttgagtgcgtag

SEQ ID NO: 137472 - DNA, 387 bp, Enterobacter cloacae
atgattactattactagggtattggatgacattatcaaccaccaacagataccactggatcggatactcagtcgctattttagtcccggttatcggcagcgtactgataacaagtgggaaggattagatggctttgctcagcatgcgcgtagactccgggaaattatcgccttcgctaaaattgagttacatgacgaacttcgtaacgggaatctttatgccacaaggcatcgcgttctgtgcaccaggcgcagcggagaagaggtggacatggaagtttatatgttcgctgaaatagatgattccgggcgcttcattcgtatcgaagaagccacgctaatgcttaaagggagagagagcgatagagatttaggcagcgtgaggtaa

SEQ ID NO: 137473 - DNA, 843 bp, Enterobacter cloacae
atgaatactttacaatcgactaactggcttcagtacggtataaaagacattaaacacctcaaacacgccaatatgcacgatccattgattccattcgaaccggtgttttcaccccagggacccactttactcgtcgcggtacgtcagtctgaggtaatacgggagactccacgccaccatcacagctgtgggcagttaatcggtgccatacgtgggctacttacggtcgatggcggtgattgtcgctgggtggtaccggcaacacatgccgtctggataccgccaggtgttccgcacggcctgtgctcgcacggtccatattcaggatggagtgtttatgtttctgccaaagcctgtggcgagctacctgataagccatctgttctctcaatgacaaatctgctgcgtgaagcgataacgcgagcggctgcatggcaaggtgtagagcttaatgcgtcccaaaaacgtttagctggcgttattcttgatgaaattggttcccttcccagggttaatcttgggcttccaatgccgcaagatagccgattgctcagaatcgcgcaggcgctgtcagcaaacccggacgacgggcgcaggttggaagaatgggcagcctgggccggcatgtcatcacgcacgctcacgcgacgattccgagccgaaacgggttttagcttcaatgaatggcgacagcggatacgcttactcagggctcttgagctactggctgccggcaagccagtgacggcgatagcgctggatctgggatatgacaatgtgagtgccttcatagccttgttccgtcggatgttcggcactactccagggcggtataaaatttaa

SEQ ID NO: 137474 - DNA, 675 bp, Enterobacter cloacae
atgtgcggacgttttgcgcaagcgcaaagccgggaggaatacctggcgcatctcgtggaagcggccgaacgagatattgcctgggacccggcgcctatcgggcgctataacgtcgcgcccgggacaaaagttttactcctcaatgaacgcgatgagcaactccatctcgatgccgtttactggggctatgcgccaggatggtgggataaaccgccgctgattaatgcccgggttgagactgcagcctccagcaggatgttcaagccgctgtgggagcacggacgggcgatctgcttcgccgacggctggtttgagtggaaaaaggaaggaaataaaaagcagccatactttatccagcgtaaggatggccagccaatttttatggccgcgattggtcggactccgttcgaacgtggggaccatgccgaaggattcttgatcgtgacggccgccgccgatcgcggtcttgtcgatattcatgaccgtcggccgttggtcctggcgcctgaagccgcccgggaatggatgaggcaggatgtcaccggcgcggaagcggcggagattgccagtgacggagccgtttccgccgacgattttacctggcacccggtaacgcgggcggtcggcaatgtgaaaaatcaggggcccgaattacttgcccctctcagcccatga

SEQ ID NO: 137475 - DNA, 507 bp, Enterobacter cloacae
atgatgagcactttcgacaaacatgacctcagcggctttatcggtaaacatctggtctatacctacgacaacggctggaactacgagatttacgtcaaaaatggccacaccctcgactaccgtattcacagcggcatcgtcggcaatcgctgggtgaaagatcaggaagcgtacattgtgcgggtgggggaaagtatctacaaaatctcctggaccgaaccgaccggcaccgacgtcagcctgatcgtcaacctgggcgacaaactgttccacggcactattttcttcccgcgctggatcatgaataacccggaaaaaaccatctgcttccagaacgaccatattccgctgatgaattcgtatcgcgatgccggcccggcctacccgacggaagtgattgacgagttcgccactatcaccttcattcgcgactgtggcgcggataatgacgaggtcattaattgcccggcgagcgaattgcctgcggattttcctgcaaatttgtaa

SEQ ID NO: 137476 - DNA, 861 bp, Enterobacter cloacae
atgcacaagacaaccctggaacagtgggcgttactcgaaaaggtagtggaattgaggagctttgccagagcggcggaggagaccaatcgcagtcagtcatcggtaagctataacctcgcgctgctgcaggagcgcttaggcgtggcgctgctggcgccgtccggccggcgggcggtgctgacgccggctggcgaactactgctgaatcaggtcaagccgctgctgcaggccttcgcctacgtcgagacgcacgccgccactctgcgcaacggggcgcggacccgcctggatctggtggtcgacagtattttcccgcgccagcggctgttcgcgattttacgccagtttcagcagcgctatccgcagacccaggtcaggctcaccgaagtgctggaaaacctggatgacgagagcgcggcgcggacggaagccgatgtgatggtgttgacccgccgccaggatattaccggccgcggggagtggctgatgaatattgatttcatcgccgtcgcccaccgcgaccaccctctcgccgcgctggacggaccgctggaggatagcgcgctggcgccgtggccgctggtgcgcattgccgatcagggcggcgatagccaggcgccgcgagacgcctggaccttctccaccattgatgccgccattgatgcggtgatgtatcaggtcggcttcggctggctgccggaggagcgcattcgcccccatctcgaccagggcgtgctgaagcggctgcccctcagccatggcgcgcgccgcgcgacgccgctgcatctgatcgtcaagcgggacctggcgccgatcgacgaacaggtggccacgctgctggcgttgttccggacgccctga

SEQ ID NO: 137477 - DNA, 1569 bp, Enterobacter cloacae
ttgtctattatccgcctcaccctgctggcgctgctcgcctgcgtccctctgctggctcaggccgcgccgtaccagctcaccaccgcctggccggttaacgtcggcccgctgaatccccatctctatacgcccaaccagatgtttgcccaaagcatggtctatgaaccgctggtgaagtatcaggctgacggcagcgtacagccctggctggcaacccgctggcgtcactccgccgacggcaaaacctggtggttcaccctgcgcgacgatgtggccttctccaacggcgaaccgtttaatgcccaggccgcggcggccaattttcaggcggtgctggccaaccgccaacgccacgcttggcttgagctcgccaaccaaataaccgacgtgcgggccctcagcgccaccgagctgcagatcaccctgaaaagcgcctacgcccccttactgcaagagctggccctgccccgcccgttccgcttcatcgccccctcgcagtttatcgatggcggcaccgccaggggcattaaagccccgatcggcaccggcccgtggcggctggcaagctcgcagctcaatcagcgcgatgtgctggtgcgcaatgagcgctactggggtcgcaaacccgcgctacagcaaatcaccatcaaggtgatccctgacgccaccagccgggcggtggcgttcgaaaccggggaaatcgatatgctctacggcgatgaagggctgctgccgctggacaccttcgaacgctttcgccatcaccccggctacgtggcgcgcctgtccgccccggcggagacggtaatgctggcgctaaacgccagccagggcccgacccgcgagcaggcggttcgtgaggcgctcaactacgccgtcgataaacagacccttgtcgatagcgtgttgtatggcacccagcaggttgccgacaccctgtttgccccctccgtcccttacgccccgcagaatctgacgccgcgccgttacgacccgacaaaagcccgcgccctgctggaacaggccggctggcagcagctggagggccagccctggcgacaaaaagccggacaaccgttggcgattgagctggcgtttattggcaccgacgcgctggctaaatcgatggccgaaattattcaggccaatctgcggcaggtcggcgtgcaggtcaccctggtgggcgaggaggaaagcagcatttacgcgcgccagcgcgaaggccgcttcggcatgatcttcaatcgcacctggggcgcgccctacgatccgcatgcctttttaagctcgatgcgcgtcccttcgcatgcggattaccaggcccagcgcggcctgccagacaaggcactgattgataaagagattagtgaagtgctgaccaccggggacgaggcgcagcggagaaaactgtaccatgatgtgctgacccgtctgcatcaggacgcggtgtatctgcccatcagctatgtctcgctgatgtcggtcgcgcgccaggaggtcggggagatcccgttcgccccggtgaccagcgagatccctttcgaccagattaccccggtaacgccataa

SEQ ID NO: 137478 - DNA, 945 bp, Enterobacter cloacae
atgctacgctatattttacgccgcctgctgctgctgatcccgctgctgctcgccgcctcagccatcatctttctgctgctgcggctcggcgccggcgacccggcgctggattatttacgcctgtcgaacctgccgcccactgaagagatggttgcctcgacccgcgagctgctggggctcaaccagccgctggcaatgcagtatctgcactggctatggcgggcgctgcacctggatttcggtctctcctatgccacccagcgcccggtgctggacgacctgctgcacttcctgccggccaccctgctgctcaccggcgcggcgctggcgctgatcctcgtcacctccctgccgttgggcatctgggcggcgcgccatcgcgatcgcctgccggactatatcgtacggctgattgccttcctcggcgtctcaatgcccaacttctggctggcctttctgctggtgatgctcttttccgtgcatctgcagtggctcccggcgatggggtatggcgactggcagcacctgattttgcccgccgtctccatcgcctttatgtcgctggcgatcaacgcccacctgctgcgcgccagcatgctggacgccgccagccagcgtcacgtgatatgggcgcggctgcgcggattgagcgcgcgccaggtggagcgccgacatatcctgcgcaacgccaccctgccggtggtgaccgccatgggcatgcacattggcgagctgatcggcggcaccatgattatcgaaaatatctttgcctggcccggggtcggccgctacgcggtttccgccattttcaatcgcgattacccggtgatccagtgctttaccctgatgatggtgacggtgttcgtgctggctaatctggcggtggatgtgcttaacgcggcgctcgacccgcgcctgcgccgccacgaggaggtgagcgcatga

SEQ ID NO: 137479 - DNA, 834 bp, Enterobacter cloacae
atgagagggctacaaagctttcgctggccggtaaaactcgccctgttagtcatcgcgctgctggcggtcatcgccatcggcagcggctggtggctgccctgggatccagcggcgattgaccttcagcagcggctgctgccgccgggcgcagcgcactggctcggcaccgatcatctcggccgggatattttctcacgcctgctggccgccacccgcgtttcgctgggggcggtgatggcttgtctgctgctggtgctgctgatcggcctggcggtcggcggctgcgccggactgctgggcggccgcgccgaccgcggcctgatgcgcatcgccgaactgtttatgacctttccgacctcgatcctgtcgttctttatggtgggagtgctgggtaccgggctgaccaacgtgatcctcgccattgcgctgtcgcactgggcctggtacgccagaatggtgcgtaacctggtggtttccctgcgccagcgcgaatttatcctcgccgcccgtctgagcggcgccagccagtggcggctgttcagcgaccatctggccggcgcggtgatcccctcgctgctggtactcgcctcgctggatatcggccatatgatgcttcacgtagccggcatgtcgttcctcggtctcggcgtcagcgcgccgacggcggaatggggggtgatgatcaacgacgcccggcagtatatctggacccagccgctgcaaatggtctggccggggctggcgctattcatcagcgtgatggcttttaacctgctgggcgacgcgctgcgcgatcgtctcgatccccacctgatcgcggagcatagccactga

SEQ ID NO: 137480 - DNA, 765 bp, Enterobacter cloacae
atgccgcagaagatccaactggaacagatctcgcttgccgctgaccgaccgctggtcagcgacgtctccttcaccctgcgccgcggccaggtactggcgctgctcggcagcagtggttgcggaaaatcgctgacctgcgccgccgcgctggacctgctgccgcccggcgtcaggcaaaccgccggccgggtgcttctcgacggcattccggtgcacggcgaacagctgcgcggggcgaccatcgccaccatcatgcagaacccgcgcagcgcctttaacccgctgcataccatggccgcgcacgcccgggaaacctgccgggcagtcggtcgtgaagcgaatgacgccgtactgctggcagcgatggaggaggtcggtctggacaatccgcgggcgctgctgaagcgctacccttttgaaatgagcgggggcatgctgcaacggatgatggtcgctctcgccctgctcagccgcgcgccctttatcatcgccgacgagccgacgaccgatctcgatgccatcgcccaggcgcgcatcctcgacctgctggcggatattgtcgccaggcgcggtctgggactgctgctggtgacgcatgacatgggcgtcgtggcgcggctggcgcatcacgtaacggtgatggagaacggtcgcctcgttgaacactgcgatgtgaatacgctatttagcgccccgcggcacccgctcagccagcgcctgctggccgcgcatctggcgttatacggtctggagaaaacaccatga

SEQ ID NO: 137481 - DNA, 792 bp, Enterobacter cloacae
atgaatttactcagcgctaccggggtgagtcacgattatcctcaccacggcagggtcctgcatgcgatccatctcgccatcgcccctggcgaaacggtggccctgctcggacgcagcggctgtgggaaaagcaccctggcgcggatgctggtgggtctggaaacgccgcagcacggcgatattgcctggcgcggcacgccgctggccgccctgaagggcgaggccatcggcgccttccgccgtgatattcagctggtatttcaggatgccttcagcgcggtgaatccgcgcaaaacggtgcgcgagatcgtcagcgagccgctgcgccatctgttacgcttgtcgcgtgaggcgcgtgcgcggcgggtggaagaaatgctgctggccgtcgacctcgcgccgtcgctgctcgataagcgcccggcgcagctcagcggcggacagctgcagcgcgtctgcctggcacgcgccctggcggtacggccgcagctgttgatccttgatgaagcggtttcaaatctcgatctgctgctgcaggcggagattatcgccctgctgaagcgtctgcaggcgcagtttgacaccgcctgcctgttcatcacccatgacctgcggctggtggagcgcttttgccagcgagtgctggtgatggagcacgggcgcatcgtcgaaaccgcaacggttagtctaccgctacgcctgcgctctcctgccggacaggcgctccagcaggcggtgctccccccttttcctgccactctgcttaacgaggccatgccatgcagcgcgtaa

SEQ ID NO: 137482 - DNA, 399 bp, Enterobacter cloacae
atgcagcgcgtaaccctgacccttgatgatgacctgctggccgccctcgatgcgctaagcgcccgccgcggctaccacaaccgttcggaggcggtacgcgatattctgcgcgacgccctcaaccaggatcctccgtcgccggaatcacggcgcgggtatgccgtcctgtcgtacgtgtatgaacatgagaaacgcgaactggcgagccggctggtggccacccagcatcatcatcacgatctctccgtcgccacgctgcatgtacatatcagtcatgacgactgcctggagattgcggtgctgaaaggtgatatggccgaggtacagcattttgccgacgacgtgattgcccagcgcggcgtgcgccatgggcatttgcagtgtttagcggatgattaa

SEQ ID NO: 137483 - DNA, 1014 bp, Enterobacter cloacae
atgtcttccattcaactctgcgccgcccatcaggcgacctctggcttcgacggcgatgcgatcgcccagtacatgcgtaccgattttattacgctgcaggaacatctcagcgttcatgaggcgcgcgaacactttatctcccagctggccagcgatgatattcccgggcaggtgtttgtcgtcgccggcaagaagctgcgtggcagcctgtcggtcaaaaagctactccaggaaacggatatcaaccagtctatccgccacctgatggacagctgcctgtttcgcgtcaaacctgacgatgagcgccagcaggtgattgccgagctcagcgagcgcggcctcgacctggtccccgtcgtcgataaaggcgagctggtcggctgcctgatggagaaggagatcgcccatctgctggaggatgacgtcaccgaagatgctcagctgcagggggcaacgctgccgctggaaaaaccgtacctcgagatcagcccctggacgctgtggaaaaaacgctcggtgtggctgctgctgctgttcgtggccgaagcctacaccagcagcgtactgcagcatttcgaagaagccctggaatcggccatcgcgctggccttctttattccgctgctcatcggcaccggcggcaacagcggaacgcagatcacctcgacgctggtgcgctcgatggcgctgggggaagtgcgactgcgcgatatggggcgggtgatccgcaaagaggtatcgacttcgtttctgattgccctgaccctgggcctggcgggctgcctgcgcgcctggatgatggggattggcatggaaatcacgctcatcgtcagcctgacgctggtctgcattaccctgtggagcgcgattgtctcctcggtcattccgatggtgcttaagcggctcggcattgacccggcggtagtttccgcgccctttatcgccacgctgattgatggcaccgggctaattatctatttcaaaatcgcccagtattttcttgggttgaactga

SEQ ID NO: 137484 - DNA, 1149 bp, Enterobacter cloacae
atgttttgcgcagcgcaggcgggccagcttggctgccgcgtcctgatgctggataacggcaaaaagccggggcgaaaaattctgatgtccggcggcggccgctgcaactttaccaacatgtatgttgaaccggcggcctatttgagccaaaacccgcatttttgcaaatctgccctggcgcgctacacccagtgggactttatcgagctggtcggtaaatacggcatcgcctggcatgagaagaccctcggccagctgttttgcgatgattcggcggagcagatcgtcaatctgctgctcgcggaatgtgaaaagggcggcgtgcagatccgtctgcgcagcgaaatcctcagcgtggagcgcgatgaacaaggctaccggctacaggtgaacggcgaaacgctggtgaccaaaaagctggtgatcgcctccggcggtctgtcgatgccggggctcggcgcctcgccgtttggctataaagtcgccgagcagttcggcctgaaggtgctgccgacccgcgcggggctggtgccgtttaccctccacaagccattgcttgagcagctgcaggtcctctccggcgtgtcggtgccgtcgaccattaccgccgagaacggcactctgtttcgcgaaaatctgctgttcacccaccgcggcctttccggaccggcggtgctgcaaatttccagctactggcagcccggcgagttcgtcaccgttaatctgctaccggactgcgatcttgatgacttccttaacgagcagcgcagcgcgcatcccaaccagagcctgaagaacaccctggcgatgcagctgccgaagcggctggtggagtgtctgcagcagctggggcagatacctgatgtgacgctcaagcaactgaacgttcgcgatcagcagacgctggtggagacgttaaccgcctggcgcgtgcagccgaacggcaccgaaggctaccggacggcggaggtgaccctcggcggcgtggacaccaacgaactctcgtcgcgtactatggaggcgcgtaaggcgccgggtctctactttatcggcgaagtgatggacgttaccggctggctcggggggtataacttccagtgggcgtggtcaagcgcctgggcctgcgcgcaggcgctggtggaagggtaa

SEQ ID NO: 137485 - DNA, 1497 bp, Enterobacter cloacae
atgctacatttatttgccggtctggatttacataccggactattattattgcttgctttagcttttgtactgttttacgaagcgattaacggtttccatgataccgcaaacgcggtggctacggttatctacactcgcgcaatgcgctcacagctcgctgtggcgatggcggcgctcttcaacttcttcggcgttctgctgggcggtctcagcgtagcctatgccatcgtgcatatgctgccgaccgatctgctgcttaacatgggttccgcacatggcctcgccatggtgttctctatgctgctggcggcgatcatctggaacctcggcacctggtacttcggtcttccagcttccagttctcataccctgattggcgccatcatcggcattggtttaaccaatgcgctgatgaccggtacttccgtggttgatgcgctgaatatcccgaaagtcatcggtatttttgcttcgcttatcatctcgccgatcgtcggtctggtgatcgcgggcggcctgattttcctgctgcgtcgctactggagcggaaccaaaaaacgcgcgcgtatccacctgacgcccgcagagcgtgaaaagaaagacggtaagaaaaagccgccgttctggacccgtatcgcgctgatcctgtctgctattggcgtgtcgttctctcacggtgctaacgatgggcagaaaggcattggcctggtgatgctggtgctgatcggcgtcgcgccggcgggtttcgtggtgaatatgaatgcctctggttacgaaatcacccgtacccgcgatgcggtcaacaacgtggaaaccttcttccagcagcgtcctgaactgctgaaaaaagccaccggcgtcgatcagctggtgccttctccggataccaataccgcggccaatggcgagttccactgccatccggcgaacaccatcaacgcccttgaccgcgtcaaaaccatgctgaccggcgttgagaactacgagtcgctaaaaccggaacagcgcggccagctgcgtcgcatcatgctctgcatctccgacaccaccgacaaggtggcgaagctgccggatgtgagcgctgacgaccagcgtctgctgaagaaactgaaaaccgatatgctgagcaccatcgagtacgcgccaatctggattatcatggctgtcgcgctggcgctgggtatcggcaccatgatcggctggcgccgcgtggcgaccaccatcggtgagaagattggtaagaaaggcatgacctacgctcaggggatgtcggctcagatgaccgcagcggtttctatcggtctggcgagctacaccgggatgccggtttccaccacccacgtactctcctcctcggtagcggggacgatgctggtggatggcggtggtctgcagaaaaagacggtgaccagcattctgatggcctgggtgctgaccctgccggcagcgattatcctttcaggcgtcctttactggctctccctgaaactgatttaa

SEQ ID NO: 137486 - DNA, 336 bp, Enterobacter cloacae
atgatcagcactattgcgctgttttgggccctgtgtgtcgtttgtgtggtgaatatggcacgctacttctcatcgttgcgtgcattattggtggtgctacgtggttgcgatcccttgctctatcagtatgttgatggcggcggcttttttacctcgcacgggcagcccagcaaacagatgcggctggtgtggtatatctatgcccagcgctaccgtgaccatcacgatgatgaatttattcgtcgctgcgaacgtgttcgtcgccagtttatcctgaccagcgccctgtgcggcctggtggtggtgagcctgattgcgctgatgatctggcactaa

SEQ ID NO: 137487 - DNA, 438 bp, Enterobacter cloacae
atggcttacaaacatattctgattgcagtagacctgtccccggagagtaaagtactggttgaaaaagccgtttctatggcccgcccgtataacgcgaaagtctcccttatccatgtggatgtgaattactccgacctctacaccgggctgattgacgttaacctcggcgacatgcaaaaacgcatctccgaagagacccatcacgcgctgaccgagctctcgaccaacgcaggctatcccatcaccgagaccctgagcggcagcggcgaccttggtcaggtgctggtcgatgcgattaaaaaatacgatatggacctggtggtctgcggccatcatcaggacttctggagcaagctgatgtcctctgcccgccagctgattaacaccgttcatgtcgacatgctgatcgtcccgctgcgcgacgaagaagacgaataa

SEQ ID NO: 137488 - DNA, 1473 bp, Enterobacter cloacae
atgaatacaactgcacctacgggcttgctgcagcaacctcgtccgttctttatgatcttctttgtggagctctgggaacgttttggctattacggcgttcaggggatcctggcggtcttctttgttaaacagctgggcttctctcaggaacaggcctttatcaccttcggcgccttcgcggcgctggtttacgggctgatctccatcggcggctacgtgggcgaccatttgctggggaccaaacgcacgctggtgctcggcgccattgtgctggctatcggctactttatgaccgggatgtcgctgctgaaaccgcagctgatctttatcgctctcggcaccatcgccgtcggcaacggtttgtttaaagccaacccggcgagcctgctctccaaatgctatccgccgaaggatgcccgtctcgacggggcatttaccctgttctatatgtcgataaacatcggttcgctgctgtcgctgtcgctggcgccggtgatcgccgaaaaatttggctacgcggtaacctataacctgtgcggcgcggggctgattatcgcgctgctggtctacttcgcctgccgcgggatggtgaaagatattggctccgagccggatcatcgccccctcagcctacgcaatctggcgctggtgctggccggtacggtggtaatgatttttctctgcgcctggctgatgcataacgtgatgatcgccaacctggtgctgattgttctgtcggtcgtggttattgcgttctttttccgtgaggcgtttcgcctcgataaaactggacgcaacaaaatgttcgtcgcctttattctgatgatcgaggcggtgctgttttacattctgtatgcccagatgccgacctcgctgaacttcttcgccatcaacaacgtccatcatgagatccttggctttaccatcaacccggtcagcttccaggcgctgaatcccttctgggtagtggtcgccagcccggtgctggcggcgatctacacccatctcggtcataagggtaaagacctgaccatgccggtgaaatttaccctcgggatgttcctctgcgcgctgggcttcctgaccgccgcagccgccgggatgtggttcgccgacgcccaggggttaacctcgccgtggtttattgtgctggtctatctgttccagagtctgggcgaactgttaatcagcgctctggggctggcgatggttgccgcgctggtgccgcagcatctgatgggctttattctggggatgtggtttctgacccaggccgccgcgttcctgctgggcggctatgtggcgacctttaccgcggtgccggaaaacatcaccgacccgctgcagaccctgccggtctacaccaatgtgttcagtaaaattggcctggtgacgctgggcgtcacggtggtaatggcgctgatggtgccgtggctgaaccggatgattaataccccggccagcgccgagtaa

SEQ ID NO: 137489 - DNA, 753 bp, Enterobacter cloacae
gtgaagatctgcttaattgatgaaacaggcgccggtgacggcgccttatctgttttagccgcccgctgggggctggagcaggatgacgataacccgatggcgctggcgctgacgacggagcatctggagctacgcaagcgcgatgagcccaagcttggcggcatcttcgtcgatttcgtcggcggggcgatggcccaccggcgcaagtttggcggcggccgcggcgaagcggtggctaaagcggtgggtattaaaggcgattacctgccggatgtcgtcgatgcgacggccgggctgggacgcgatgcctttgtgctggcgtcggtcggctgtcgcgtgcggatgctggagcgcaatccggtggtcgccgcgctgctcgatgatggcctggcgcgcggctatgctgacgcggaaatcggcggctggctgcaggagcggctgcagctgatccacgcctccagcctgacggcgttaaccgatatcaccccgcgcccgcaggtggtgtacctcgatccgatgttcccgcataagcagaaaagcgcgctggtgaagaaagagatgcgcgtctttcagtcgctggtggggccggatttagacgccgatggtctgttggcgccagcgcgccagctggcaactaagcgggtggtggtgaagcgcccggattacgcgccgccgctggcggaagtcgccacgccgaatgcggtggtgaccaaaggacatcggtttgatatttacgccggtacgccggcgtaa

SEQ ID NO: 137490 - DNA, 324 bp, Enterobacter cloacae
atgtcgattactcttagcgacagtgcagcagcgcgagtcaatgccttcctggcgaaccgcggtaaagggtttggcctgcgcctgggcgtaagaacctccggctgctcgggtatggcctatgtactggagtttgttgacgagccggcggctgaagacaccgtgtttgaagacaaaggcgtgaaggtcgtgatcgacggcaaaagtctgcaattcctcgacggcactcagctggacttcgtcaaagaaggcctcaacgaagggttcaaattcactaaccctaacgtcaaagatgagtgcggctgcggcgaaagctttaacgtataa

SEQ ID NO: 137491 - DNA, 516 bp, Enterobacter cloacae
atggactatttcaccctcttcgggttaccagccagctataccctctcgcttgaacaactggctgtccggtatcaggatctgcagcgccagtaccatccggataaatttgccagcgcgcctgcggcggaacagcttgcggcggttcagcattccgccactataaaccaggcctggcagacgctgcgccatccgctgactcgcgcagaatatctcctttcgctgcatggcttcgatctggccagcgagcagcataccgttcgcgataccgcgttcctgatggaacagctggaattgcgcgaagagctggatgagatcggccaggcgaaagacgacgcgcggctggaaggttttatcaaacgggtgaaagcgctgtttgatacccgtcagcagctgatggttgaccaattgcataatgagagctgggaggcggcggcggaaacggttcgtaagctccgtttcctcgataaactgcgcagcagtgctgaagaactcgaagaaaaactgctcgatttttaa

SEQ ID NO: 137492 - DNA, 1572 bp, Enterobacter cloacae
  misc_feature (1546)..(1555): n is a, c, g, or t
atggccttattacaaattagtgagcccggcctgagcgccgcgccgcaccagcgtcgtctggcggccggtatcgacctgggcaccaccaattctctggtggctaccgtgcgtagcggccaggccgagactctgcccgatcatcaaggccgctatctgctgccgtcggtggtgaactaccacgcttcggggctgaccgtcggctatgacgcccggcttaacgccgctcaggatcctgccaataccatcagctccgtgaagcggatgatggggcgctccctcgccgatattcaaaaccgttacccgcatctgccgtatcagctgcaggccagtgaaaacggcctgccgatgatccagacggccggcggcctgctgaacccgattcgcgtctccgccgatatcctcaaagcgctggccgcccgggcgaccgaagcgctggccggcgaactcgacggcgtggttattaccgttcccgcttacttcgatgacgctcagcgccagggaaccaaagacgcggcgcgtctggcgggcctgcacgtgctgcgcctgctcaatgagccgaccgcggcggctattgcctacggcctcgactccggccaggaaggggtgattgcggtctacgatctcggcggcggcacctttgatatctccattctgcgtttaagccgcggggtgtttgaagtgctggccaccggcggcgactcggctctcggcggcgatgatttcgatcacctgctggctgactacctgcgcgagcaggcgggcttcagcgaccgcagcgataaccgtctgcagcgtgagctgctggatgccgccatcgcggcgaaaatcgccttgagcgatgccgaggcagcgcacgtcgaggtcggcggctggcagggcgatatcacccgcagccagtttaacgatctgattgccccgctggtaaaacgtaccctgatggcctgccgtcgggcgctaaaagacgctggcgttgaagcgcaagaagtgctggaagtggtgatggtcggcggttcgacccgcgtgccgctggtgcgtgagcgcgttggcgagttctttggtcgcactccgctgacctccattgacccggacaaagttgtcgccatcggcgcggcgatccaggccgatatcctggtgggcaacaagccggacagcgaactgctgctgctcgacgttatcccgctgtcgttaggcctggaaaccatgggcggcctggtggagaaagtgatcccgcgtaataccaccattccggtggcccgcgcgcaggagtttaccaccttcaaagatggccagacggcgatgtccattcacgtgatgcagggcgagcgtgagctggtccaggattgccgttcgctggcgcgctttgcgctgcgcggtatcccggcgctgccggcgggcggggcgcatattcgcgttaccttccaggtggatgccgatggcctgctgagcgttacggcgatggaaaaatcgaccggcgtggaagcctccatccaggtgaaaccgtcttacggtctgaccgatggcgaaatcgcctccatgattcaggacnnnnnnnnnnaccgtcttacggtctga

SEQ ID NO: 137493 - DNA, 318 bp, Enterobacter cloacae
atgattaaagattcgatgagctacgccgaacaggatattcaggcgcgcatgctggctgaacagaaagtggaagccgcgcgcgtactggagagcctgacaagcgcgctggccgccgacgccgcgctgttaagcgccgcggagcgtcaggccatcgatgccgctgcggagcaggtacgcgccgccgcggcaggcgacgacgctgacgcgattaaagaagcgattaaaaatatcgacacacaaacccaggaattcgccgctcgccgtatggatcagtcggtccgtatcgcgctgaaaggccaatccgtggacgaggtttaa

SEQ ID NO: 137494 - DNA, 336 bp, Enterobacter cloacae
atgccaaaaattgtatttctgccccaccaggacctgtgtccggatggcatcgttgtggaagctgagaccggtgaaaccattctcgatgccgcgctgcgtagcggtatcgaaattgaacacgcctgcgaaaaatcctgtgcctgcaccacctgccactgcatcgtgcgtgaaggttttgactcgctggcggaaagtagcgaagatgaagacgacatgctggataaagcctgggggctggaacctgacagccgtctgagctgccaggcgcgcgtcaccgacgaagatctggtcgttgagatcccgcgttacaccatcaaccacgcacgcgagcactaa

SEQ ID NO: 137495 - DNA, 201 bp, Enterobacter cloacae
atggcactgaaatggaccgacagtcgcgaaatcggcgaagccttgtatgacgcttacccggatctcgacccgaaaaccgttcgctttaccgacatgcatcagtggatttgcgatttggaagagtttgatgatgatccaaacgcatccaatgaaaaaattctcgaggcgattctgctagtctggctagacgaggccgaataa

SEQ ID NO: 137496 - DNA, 1287 bp, Enterobacter cloacae
atgaccgaagctatgaagattacgctttctactcagccagccgatggacgctggggagaaaaagcgacctggagcatcaataacgacggcatcgctctacatctcaacggtaaagacgacctcgggcttatccagcgcgcggcgcgcaaaattgacggcatgggcatcaagcacgtcgccctgagcggcgaaggctggaacaccgatcgcgcctgggccttttgggccggctataaagggccgaaaggtcagcgtcaggtcgaatggccatcccttgacgacgcgcagcgcagcgagctggataaccgcctgacgatcatcgactgggtgcgcgacaccatcaatgcgccggcggaagagctgggtccggagcagctggcgcagcgcgctgtcgacctgctgtgtggcgtggcgggtgagaagataagctatcgcatcaccaaaggcgaagatctgcgcgagcagggctatcttggtctgcataccgtgggccgcggctccgagcgtccgccggtcctgctggcgctggactataacccgaccggcgataaagaggcgccggtatacgcctgcctggtgggcaaaggcatcacctttgattccggcggctacagcatcaagcaaagcgcctttatggattcgatgaaatccgatatgggcggtgcggcgactatcaccggcgcgctggctttcgccattacccgcggtctgaacaaacgcgtgaagctctacctgtgctgcgccgacaacctgatcagcggtaacgccttcaaactgggcgatattattcattatcgcaacggcaaaaccgttgaagttatgaacactgacgcggaaggccgcctggtgctggcggatggcctgattgacgcctcggcgcagaagccagagctgatcatcgacgccgccaccctgaccggcgcggcgaaaaccgcgttgggcaatgattaccacgcgctgttcagctttgacgatgcgctggcgaatcgcctgctggcgagcgctcaggcggaaaacgaagccttctggcgtctgccgctggccgagttccaccgcaaccagctgccgtccaactttgctgacctgaacaacaccggcagcgcggcctatccggccggcgccagcaccgcggcgggcttcctgtcccacttcgtggaaaactaccatcagggttggctgcatatcgactgttcggcaacctaccgcaaatctgccgttgagcagtggtcggcgggcgccaccgggcttggcgtgcgtaccattgctaacctgctgacagctgagtaa

SEQ ID NO: 137497 - DNA, 777 bp, Enterobacter cloacae
atgtcagatacaaaaaatgaattagaaaccctgctggaaaaagcggcgactgagcccgcccatcgtccggcatttttcagcgcgctgctggaggccaccgtctgggtgccgggcagggcagccgatggcgagcagattgtcgaagatagcgcgctggatctgcagcattgggaaaaagacgacggtacctcggtgatccctttctttacctcgctggaggcgctgcagcaggcggtggcggatgaacaggctttcgtgatgatgccggcccgcacgctgatggcgatgacgttgggcgaatcgttattcctcaacccgaagctgccgagcggcaaagagttcaccccacgggaaatcagccatctgttaggcgaagagggcagcccactgagcacccagacggtactggaaggcggcgaagcgctgctgctgtctgaagtcgccgaaccgccggcgcagatggtcgattcgctgaccacgttgttcaaaacgctgaagaccgtcaagcgggcgtttctgtgctcgattaaagagcgcgccgacgcgccggcaaacttattgatcgggattgaagcggaaggagatattgaagccattatccagaccaccggcagcgtggccaccgataccttgccaggcgacgaaccgatcgatatttgccaggtggtggaaggcgagaagggcatcagccactttatgattgcccatatcacgccgttctatgaaaagcgctggggcagcttcctgcgcgattttaagcagaaccgcatcatctga

SEQ ID NO: 137498 - DNA, 303 bp, Enterobacter cloacae
atgatacttaccctcgggttccagacgattttgccggcgcagatcgcgctgatgagcgcccggggcgtgaatacgccgctgggctggtacattgttatcgcgcaaatggcaggggtgttactggcgtttatgctggtcggcgggctggtggcagcgctacgttctctgctgggcgaagagaggtgccgggcctggcgcggggatatggcgctcttcaacggcattgtcacactgtgcgtgacgggatttctcctctatcacatggtgtctgcctatccgcgaatctttgccgccctgcattag

SEQ ID NO: 137499 - DNA, 558 bp, Enterobacter cloacae
  misc_feature (380)..(389): n is a, c, g, or t
atggcattagtctctaacccacattcggcttattcaccgcgccttccctggctgggaggtatagctggcctgctggcaggcggcgcgatcctttatttttggccgcaatggaaccggacatggctaagcctggtgcctgcgccagtctccgtgtatacccgctttctcggggtcactctcgaagacgttccgttagtcacctattgccatcaggcgctgttgggttttctgatggtgctgctcgcgcccggttacggtaagtcgacccttgccgcgtggatgatgcataacccagcgtcaagccggcgctggcccggcgaggtattccgtgcctgggtcacaaaatttggcctgctggccatggtcttttgcaatctgtnnnnnnnnnnctgttctttttgtcccgggtcccatccggaaccctggcgttatacatttttattctccagcacatcagcgttgccgcggcggtggcgtcaggggtgctgctcctgcgtgacgcccggcgcctggcccgcacgttcgacgctcagctggcggacctgcgtcttctcatga

SEQ ID NO: 137500 - DNA, 858 bp, Enterobacter cloacae
atgtccacctcgttttttgtcgctgccgactggctggcagaacatattgatgacccggaaattcagattatcgacgcccgcatggcgcccgccgggcaggaggccctgcgggatatggccgcggaataccgcgccggccatgtgccgaacgcgctgtttttcgatatcgaggcgctatccgaccacaccagtccgctgccgcatatgatgccgcgggccgaagcgtttgccgtcgccatgcgcgaactgggcgtctgcagcgataagcatctggtggtctatgacgaaggcaatctgttttccgccccgcgcgcgtggtggatgctgcgcacctttggcgtagagaaggtgtcaattctggccggcgggctggagggctggcggcgcgacgaactgccgctggaacaagggatgccggaggtggccgaaggggaattcgacgtgcggttcgatcctcaacaaattaagcgtctgaccgacgtcctgttggtcagccatgaaggatcggcgcagattgtcgatgcccgtccggcggcccggtttaacggccaggccgacgaaccgcgcccgggcctgcgccgcgggcatatccccggcgcgctgaacgtaccgtggacggatctggtgattaacggcgaactgaaaaccgttgacgagctgaacgacatctttttacgtcagggtgtcgattttgaacggccgatcatcgccagctgcggctcgggggtgacggcggcggtggtcgtgctggcgctcaccacgcttggcgtgaacggcgtctgcctgtatgacggctcctggagcgaatggggcgcgcggagcgatctgccgattgaaccggcccctgccgctccgtaa

SEQ ID NO: 137501 - DNA, 1674 bp, Enterobacter cloacae
  misc_feature (1566)..(1575): n is a, c, g, or t
atgaaaccatttcgtttagcggcgctatcactggcgctccttaccgcattttcattaaccgggtgtgatgacagcggtacaccgcaggcctcggccccggcgccagccgcggatagcaacccaggcgcgacggcaaaaccggaccgcgcccagctggcggcgctggcggaaaaaagccagggtaaagcgctgacgctcctcgacgcctcggaggtgcaactggatggcgccgcgaccctggtgctgacgttttccgtcccgctgcagccggaccaggatttctcgcgcagcgtgcatctggtcgacaagaaaagcggtaaggtggacggtgcctgggagctggcgccgaatctgaaagagctgcgtctgcgtcaccttgagccaaagcgcgagctgattgtctcggtcgacccgacgctgaccgccctgaacaaggcgacgctcgacaaaccgtttgagaagaccctgaccacccgcgatatcgcaccgagcgttgggtttgccagccgcggctcgctgctgccgggcaacgtggtcgccgggctgccggtgatggcgcttaacgtcgataatgtcgacgttaatttcttccgcattaagccggaatcgctctccgcctttgtcagtcagtgggaataccgtaactcgttaagcaactgggaatctaatgaactgctgaagatggcggatctggtctacagcggccgcttcgatctcaacccggcgcgtaatactcgcgaaaagctgctgctgccgctgagcgacatcaagccgctccagcagcctggcgtctacgtggcggtcatgaacccggcgggccgttatagctacagcaacgcggcgacgctgtttaccctcagcgatatcggcgtctcggcgcatcgctaccataaccggctggacgtttttacccagagtctggaaaacggcgccgcccagtcgggtattgaggtgcagttgctcaatgccaaagggcagaccctggcggaagcgaaaagcgacagccagggccacgtcaccctgcaaaccgataaagaagccgcgctgctgctggcgcgcaaagaggggcagaccacgctcctcgacctcaagctgccggcgctggatctggcggaattctctatcgcaggcgcgcccggctttagcaaacagttctttatgtttggcccgcgcgatctctatcgtcccggcgaaacggtgatccttaatgcgctgttgcgcgatagcgacggcaagccgctggcggagcagccggtgaaactggaggtggttcagccggacggccaggtgatccgctcggtgatgagcaaaccagtgaatggcctgtaccagtttacttatccgctcgacagcggcgcggctaccggcatgtggcacattcgcgccagcgccggcgacaatcagccgcgcgaatgggatttccacgttgaagactttatgccggaacgcatggccctgaacctgacgccgcaggccgcgccagtcgcgccggatgccgacgtcacctttggcgttagcggcgcttatctctacggcgcgccggccagcggcaaccagctgcagggnnnnnnnnnngctgcagggcaagctgttcctgcgcccgctgcgcgacgccgtcgctgcgctgccgggcttccagttcggcgatattgcggaagaaaacctctcccgtag

SEQ ID NO: 137502 - DNA, 3249 bp, Enterobacter cloacae
gtgaccacctcaagccagtggcaggatagccattcgccgctgcaggtggtgctgcaggccagcctgctggaatccggcggtcgcccggtgacccgtacggttaagcagccgatctggcccgccgaggcgctgccggggatccgcccgcaatttacgctgaaggacgtttacgattaccgcaccgataccaccgtgaaacagccggtggtggatgaaaacagtaacgccgcgtttgatatcgtctatgccgacgtcaaaggcgagaaaaaagcgatctccggtctccaggtgcggctgatccgcgagcggcgcgactactactggaactggtccgacagcgaaggctggcagtcgcagttcgatcaaaaagatctgcaggagggcgaggagtcgctggacctgcaggccggccagatcggcaaagtgagcttcccggtggagtggggatcctatcgtctggaggtgaaaggaccggacgacgtggtcagcagcgtgcgcttctgggcgggctacagctggcaggataacagcgaaggcgccggcgcggcgcgtcctgaccgggtcaccatgaagctggataaaccgagctataaaccgggcgacaccatcaggctgcacatcgccgccccggcggcgggtaaaggctacgcaatggtggaatccagcgaagggccgctgtggtggcaggaaattgacgtcccggcggaggggatggacctgtcgatcccggtggataaaacctggaatcgccacgacctctacctcagcacgctggtggttcgtcccggcgataaatcgcgctcggcaacgccgaaacgcgcggtgggcctgctgcatctgccgctgggcgatgaaaaccgtcgcctgacgctggcgctggaggccccggacaaaatgcgccccaaccagccgctgacggtgaaagtgaaagccagcgtcaaagagggcgaggcgccgaaacaggtcaatgtcctgctctcggcggtggatagcggggtactgaatatcaccgattacgctaccccggatccgtggaacgccttctttggccagaagcgttacggcgcagatatctatgacatctacggccaggtgatcgaagggcaggggcgggtggccagcctgcgcttcggcggcgatggcgacgagttaaaacgcggcggcaaaccgccggtcaaccacgtgacgatcgtcgcccagcaggcgcagccggtggtattgaacgatcagggcgaaggcacggtgacgttacccattggcgattttaacggcgagctgcgggtgatggcccaggcgtggacggcggatgacttcggcagcagcgaagataaagtggtggtggccgccccggtcatcgccgagctgaacactccgcgtttcctcgccagcggcgataccacacggctggcgctggatctcagcaatctgaccgacaaaccgcaaaccctgcaggtacatcttaccgccagcgggctggtgaccttgaccgagggccaactgccgccggtacagctggcgccgggggcgcgcagcacgctgtttataccagtgagcgcgctggcgggcttcggcgatggtcaggttaatgccaccatcagcggcctgagcctgccgggcgaaaccttcgccccgctgcaaaaacagtggaaaatcggcgtgcgtccggcgtacccggcacagaccgtcaacagcggcgcagtgctgcagccaggtgaaagctggcagccgccggcggcgcagagccagggctttgccccgcaaacgctgcagggccaactgctgctcagcggtaaaccaccgttgaatctcgcccgctatatccgcgagctgaaagcctatccttacggctgccttgagcagaccgccagcggcctgttcccgtccctgtataccagcgcggcgcagctaaaggcgctgggcattagcggggacagcgacgaaaaacgccgcgcggccatcgatgtcggtatttcacgcctgctgcagatgcagctggaaaacggcggctttgcgctatgggatagagaggggccggaagagtactggctgaccgcctacgccatggacttcctcgtgcgcgccagcgagcagggctatagcgtaccggtcaacgccattaataaaggcaacgagcgcctgctgcgctatctgcaggagccaggcctgatgaccgtgcgctacagcgacgacgcccaggctagccgctttgccgctcaggcctatgccgcgctggtgctggcgcgtcagcaaaaagcgccgctcggcgccttgcgtgaaatctggagccgtcacgaccaggcgcgatccggcttgccgctgctgcagctcggcattgcgctgaaaactatgggcgatgcgccgcgcggcgacgccgccctgaagctggcggttgccaccccgcgccaggatgagaatcgttggctgggcgattacggtagcccgctgcgcgataacgccctgaagctggcgctgctggaagagaataagctgctgccggaggtgcaaactcagctgttgagcacgctgtcggaagaggcctatggccagcgctggctgtcgacccaggaaaccaacgccttgttccttgccggacgtacgctggcggacctgccgggcagctggcaggcgcaaacctcgctgcaggcggagccgctggccggcgacaaagcgcaaacccgcaacctcgacggcgatcggctggcggcgctgcaggtgagtaataccggcagtcagccgctgtggctgcgtctcgacagcagcggctatccgcaaagcgcgccgcagccgggcggtaacgtcctggggattgaacgcactattttcgatacccaggggcagcagaaatcgctgtcttcactgcgcagcggcgaactggtgctcgtcaagctggaggtgaccgccaaacgcaacgtgcctgacgcgctggtggttgatctgttgccagccggtctggagctggaaaaccagaatctggccaacagcagcgccagcctgcaggagaatggcgacgcggtgcaaaacctgcttaaccagatgcagcaggcggatattcagcatatcgagttccgcgatgaccgtttcgtcgccgccgtcgctgtcaatgaaggccagccggtgacgctggtctatctggcgcgggcggtgacgccgggcacttatcaggtcccgcagccgcaggtggaatcgatgtatgcgccgcagtggcgggcgacaggagcggccagcggtccgctcaccgtgacgccgtaa

SEQ ID NO: 137503 - DNA, 1647 bp, Enterobacter cloacae
atgaaaaaaacgattatttccttaaccgcattagcgatgttcgtcagcgctgcgacgcatgctgaagcggatacctcgaaaaaaaccgacttcctgctgattggcggcgggatcatgagcgcctcgctcggcacctggctgcaggcgctgcagccggactgggatctgaccatggtggagaaactggacggcgtggcgctggagtcttccaacggctggaataatgccggtactggccactcggcgaatatggagctgaactatacgccggaacgggcggacgggtcgattgacgtcagcaaagcgctcgatattaacgagcaatttatgatttcccgtcagttctggtcggcacaggtgaaacgcggtattttgcacgatccgcactcgtttattaattccacgccgcatatgagcttcgtctggggtgataatgtggattatctgcagaagcgttataacgcgctgcagcagaccactttattccaggggatgaaattctccaccgatcacgcgcaaattaaacagtgggcgccgctggtgatggaaggccgcgatccgcagcagaaagtggccgccacctggacgccggtgggtaccgatgtcaactacggcgaaatcactcgccagctgatcggcagcctgaagaaaaataaccacttcaccctgcagacctcctctgaggtaacggatttcaaacgtaatgccgacaactcctggcacgtaacgattaagaatgtgcagagcggggaagcgcagactattgacgccaaatacgtctttatcggcgccggcggcggcgcgttgaagctgctgcaaaaaaccggtattccggaagcggacaactatgccggcttcccggtgggcggctcgttcctgatgaccgagaacccggcggtcactgcgcagcacctggagaaagtgtatggccaggcttcagtcggcgcgccgccgatgtcggtgccgcaccttgatgcacgttacctcgacggtaagcgcgtggtgctgttcgggccattcgccaccttctcgaccaagttcctgaaaaatggttcgttcttcgatctgctcagcactaccaccaccaataacgtgctgccgatgacccacgtcggtctcgacaacttcgatctggtgaaatacctggttagccaggtgatgctcaacgatgatgaccgtttcgctgcgctgaaagagtactacccggacgcgcgtaaagaagactggaaactgatccaggccggccagcgcgtacagatcatcaagaaagacgcagagaagggcggcgtgctgaagctcggtaccgaagtggtggtcgatcagcagaaaaccatttccgcgctgctcggcgcttcgccgggggcttccaccgccgcgccgatcaccctgaacgtgctcaagcagatgttcccgcagcagtttaactcgccggagtggcagagccgcattcacgctattgtgccgagctacggccagaagctgaacggtaacgtggcgctgacccagcaggtttgggatgacaccgctgcgaccctgcagctgacgaaaccgccggtgatccagatgccagcggctgcgcctaccgcgaccgccaagccggcagagacgccgcgcgaggcctcgccgcagcacgatatggcgctgtaa

SEQ ID NO: 137504 - DNA, 927 bp, Enterobacter cloacae
atgcaagaggatattaaccaggagatcaccttccgcaagctgtcggtctttatgatgtttatggcgaaaggtaatatcgccagaaccgccgaagcgatgaaactcagcagcgtcagcgttcaccgcgcgctgcatacactggaagagggggtgggctgcccgctgtttgtccataaagggcgcaacctgctgccgctgcaggcggcgtggacgctgcttgaatactgccaggatgtgataagtctgatgaaccgcgggctcgaggcgacgcgcaaggttgcaggcgtcggtcaggggcggttgcgcatcggtaccctctattctctgaccctggaaaccgttccgcgcatcattatggggatgaagctgcgtcgcccggagctggagctggacctgacgatgggttcaaatcagatgctgctggatatgctggaagacgatgccctcgatgccatcctgatcgccaccaacgaaggggagttcaataataccgctttcgacgtggtgccgctgtttgaggacgatatttttctcgccgccccggcgaccgaacggctggatgcctcacggctcgccgatctgcgcgattacgccgaccgcaagtttgtttcgctggcggaggggttcgccacctatgccggattccgggaagcattccatatcgccggcttcgagccggagatcgtcacccgggtgaatgatattttctcgatgattagcctggtgcaggctggcgtcggttttgccctgctgccggggcgaatgaagaaagtgtatgagaaggatgtacagctgctaaagctggcggaagcctaccagatgcgccagctgatctctatcgtctattcgcaccatcgcgaacgcgatgccgatctgctggcgctggcggcggaaggacggatgtacgcccgcagtattaatcgctaa

SEQ ID NO: 137505 - DNA, 903 bp, Enterobacter cloacae
atgaagattttatttacctttcccggtcagggcggccagcgtcccggcatgctggcgatgatccccgatcgcgaagcgatcctcacccaggcgcgcgccgtgctgggggatgaagtcgataccctcgatagcgccgatgcgctacaacacacccgtgcggtccagctctgtctgctgatcgccggggtagcctgggcgcgcgagctacagcgtcagggcgtggatccgcagatggtcagcggcctgtccatcggcgcgtttccggccgcggtgattgccggcgcgctcgatttcgccagcgcgttgcggctggtggccctgcgcggggacttaatggaacaggcgtatcctgaaggttacggactgacggcgattatgggcctgacccgcccgcgggttgaggcgctgatgcagggccacgaggtttatctcgccaacctgaacgccgaaacgcagttcgtgattgcgggccgtgatgaggcaatggccgaggtggcgcagctggcgctgcgggctggcgccagtaaagcccagcggctggcggtcagtgtcccgtcgcactgcgcgcagctggataaacccgccgctgagctggcgaaagcttttgccggcgccagcttaaggcgcccacggtgcgcctatttaagcggctcgacggcgcgcgtgctatgggatccgcagcggatcgccgacgatctggcgatgaacatggcgcgcccggtccactggcaggaggcgatggtcgccgccgatgagcgcgatgcgcgcttagccattgagatgccccccggcggggtactcacctgcctgacccgccaggcgggctggcgcggggagaccattgcgctggagcgcagcggcctggacgtcgcccgccatctggcgcagcggcttagcgattaa

SEQ ID NO: 137506 - DNA, 618 bp, Enterobacter cloacae
atgtcagcaacgccgcgtccccatgatctagtttggttaaaccacgccagcgccctggaagatattgccgagccgtgggtggctcagcagtggcgagccgcgctgccggtggtggtgaggcgcgacgttgacgaccaggcccgcgtcccggttggggtgcggggcatgaagcgcgagcagcgcgccgccggctgggtacaggcgcgcaatatcgtgcgcagcgtcaccccggagatgcttgttgatcgtgaggtcttactccattcgccttttgtctcgcagccgccggtccagggggctatcgccctcaccttacaccgctggccctggggctggggcgtcaccggcagtaccggctacgcgctggcaaccgagatcccggtgctgcatgcggacagcgatctggatctgctgatccgcgcgccacaaccgttggaccgcgaggcgctgctggaatggcagacccgggtggcccaactcccatgccgcgctgatacccaggtcgaaacgccgtacggcgccttcgcccttaatgaatggctgcgcgacgggcgcgcgctgctgaaaacgtcccgcggcgcgcgcttaaccgcgacgccgtggcacagggaggaataa

SEQ ID NO: 137507 - DNA, 960 bp, Enterobacter cloacae
atgacttatgtgattattcatgctcttgccccgattttcgtcattatgctgctgggcttctgggccggtaaggccgggatggtagataacaaaaacgtctcgctgcttaatatttttgtaatggattttgccttacccgccacgctgtttagcgcgacggtacaaacgccgtgggccggtatcgtcgcccagtcgccgttggtgctggtgttgaccggcgcgatgtggatcacctatgccgcgatctacttcctcgccaccagcgtgttcaaacgcacgccgcaggatgccgcggtgctgaccctcaccgtcgccctgccaaactatgccgcgttaggtctgccgatcctcggcagcgtgctgggtgaaggcgcgtcaacctcgctgtcggtggcggtctctatcgcctgcggctcggtactgatgaccccgttctgcctgctgattctggagcgtgaaaaagcccgcgccgcgggtgaaaacagcggttctacgctggcgatgctgccggtgctgatgtggcgttcggtgaaaaaaccgatcgtctggggcccgctgcttggggtggtgctttccgcgatcggcattaaaatgccggacctgctgctggcgtcgatcaaaccgctgggcctggctgccaccgccgccgcgctgtttctcaccggggtgatcctgtcggcgcgtaaactgcagctcaatgcgctgatcgctacatcaaccatcgtgaaactgctggtgcagccgtttattgcctggggtctggtgatgttacttgggttgcacggttccattgccattaccgcgatcctgatgatagccctggccgccggcttcttcggcgtggtcttcggcaaccgcttcggcgtccagtctccggatgctgaagccgtgctgctgttgagctcggttctgtgtatcctgtcgctaccgctgtttatctctttgacttcaggactgtaa

SEQ ID NO: 137508 - DNA, 384 bp, Enterobacter cloacae
atgtccggggcgtttctggcccacggctaccaggccaaccgcctgatcgcctttaacgatagcggcgtgctggtccacgcgatgggtaaagcgtcggcggcgcgcattacgctgcgtaccgtagaggcgctggagaaactggcggctaccattccgccaatggcctacgacgtcagcaactatgcgacgctcggcctgctctccgccctgctggatattaataatccggatgcccctgacgatcacgatctgtcgttggtcagcaacacgctgcgcgacgccatcgctgatgcgcgcaccgatgcctcactgaagtgccgcctgggtgcggaaaaccgccgcagctcgcaactggttcgcgatcgcatgcgcgccagctggtaa

SEQ ID NO: 137509 - DNA, 387 bp, Enterobacter cloacae
  misc_feature (348)..(357): n is a, c, g, or t
atgagtcagttcccaaaccgcgccgcgctgtggctgaacaaactggcgcccgacgcgccgctgatgagcggcctgtgcccttccgtccaggtggcagacggccagattaatggcgaaaacgtgcgttttatcgccgtggtcccggatgctaacaaccactacccgcgcgccgccggcggcgaagttggcctgctggaaggctggacgctggcgaaagtggttaatgaaaccatcgccgccgacaccgaccagccagtcaaacggccgatcgtcgccgtgatcgatgtgccaagccaggcctatggccgccgcgaagaagctttcggcattcgccaggcgctggccggnnnnnnnnnnccaaagcccgtttggccggccacccggtaa

SEQ ID NO: 137510 - DNA, 834 bp, Enterobacter cloacae
atgcgtaacgatcgcagctttatcgaactgcgcgctcgcgaacgcgtccacgccctgctggacgacggcagctaccgcgaactgctggatccgtttgacggtattatgtcgccgtggctcggcgcccagggcatcgtcccgcagtccgacgacggtatggtggtcgccaaaggcacgatcaacggccagcctgcggtggtgattgccatcgagggcaccttccagggcggcagtatgggcgaagtgtccggcgccaaaatggccgccgcgctggagctggcggcggaagataaccgcaacggtatcccgacgcaggcggtgctgtgcctcgaaaccggcggcgtacgtctgcaggaggccaacctcggtctggccgccatcgctgatattcacgcggcgattgtcgatctgcgccgctacacgccggtagtcggcatcatcgccggcaccgtcggctgctttggcggtatgtctatcgccgccgcgctgtgcagctatctcattgtcactcgtgaagcccgtctcggcctcaacggcccgcaggttatcgagcaggaagccggcattgaagagtacgactcccgcaaccggccgtttatctggagcatgaccggcggcgaaattcgcgccgccagcggactggtcgacgcgctggttaacgatggcgttaacgccgttaaaaccgcaatgaatgaggcgatcgccaaaggcgtaccggtacagcaccgcagcgacaactatgacgattatctgcgtcgcttgagccagttcgacacccgccagcaggcggataccgcgcagattaaacagctttttgcccgggaggataaataa

SEQ ID NO: 137511 - DNA, 300 bp, Enterobacter cloacae
atggaacagattacattgtcatttcctgccagccgcgccctgagcggccgagcgctggcaggagtcgtgggttcaggcgatatggaagtactttataccgccgcacagagcgccacgctcaacgtacagatcaccacctcagtggataacagccaggcgcgctggcaggcgctgttcgacaggctgaacctgatcaacggcctgcccgccgggcagttgattatccacgacttcggcgccacgccgggcgtcgcccgtattcgtatcgaacaggtttttgaggaggccgctcatgcgtaa

SEQ ID NO: 137512 - DNA, 843 bp, Enterobacter cloacae
atgaaaaatctctcccccctgcacgcagaaagccgcgtcagctggctggcgcataccgccagcgcctgtctgattgacgaagcccgtctgagcccgaaaccaggtctggtggatagccgcggcaacggcgcgcatcaggacctgaatctggcgctgatggagcgctccgcccgcagcctgcagccgacctttcacgcgctggccgagcaaagctggcgtcgcccggcggacatcgccctgcgcgaaaccgtcggccgccttggccgcgaaggcgaagcgcagatgatgctggcgacagggggggttaacacccaccgcggcgctatctgggcgctaggcctgctggtcagcgcggtggcgatgttgggtggagagggtcagtcacaggcgatcgccgacgccgccgccgccctcgcccgcctgcccgacggcttcgcgccgaaaagctttagtaaagggcttcgcgccagccgccgctggcaggtgccaggcgcccgcgaggaagcgcagtgtggtttcccgcatatcacccgcctggcgctgccgcaactgcagcacagccgggcgcgaggcgccagtgagccgcaggcgcagcttgatgcgctgatggccatcatgacctcgctgagcgatacctgcgtgctgtcgcgcgccggtatggccgggctgcaggccatgcagcaaggcgcttgcgaggtgctggcggctggcggttgcgccagtttcgccgggcgcgccgccctggcccgcctggacgcaatcatgctggcgcaaaacgcctcgccgggaggcgccgccgatctccttgccgccaccctgtttctcgacagagttggcggctaa

SEQ ID NO: 137513 - DNA, 1656 bp, Enterobacter cloacae
atgaatgccgaacaaacgacggggcgggtctggaaccgtcgccgaacggaaaaacagcggcggctggccgaggcgaacgtgccaggtaaggtcatcccgactgaccagttggtcagcgtactggaaaacctgctcgcccccggcgaccgggttgtgctggaaggcaacaaccagaaacaggccgatttcctctcgcgcatgctggcggaagttaatccgcaaaaaatccacgacctgcatatgattatgcccagcgtcgggcgcagcgagcatctggacctgtttgaaaaaggtattgcccgcaagctggatttctctttctccggcacccagagcctgcgcatttcgcaactactggaagatggcctgctcgaaatcggcgccatccacacctatatcgaactctactcgcgcctgtacgtcgatctgtcgccaaacgtcgcgctgattgccggctataaagctgaccgcaaaggcaacctgtataccggaccgagtaccgaagataccccggcgctggtggaagccgccgccttccacgacggcattgtgatagcccaggtcaacgaactggtggacgacgaatgcgatctgccgcgcgtcgatattcccggctcgtggatcgattacgtggtggttgccgacaagccgttctttatcgaaccgctcttcacccgcgatccgcgcctgattaagcaagaacacatactgatggcgatgatggcgatcaagggcatctatgcggaacatcaggtgcagtcgcttaaccacggtatcggctttaataccgccgccatcgagttgctgttgccgacctatggcgagcagctcggcctgaaaggcaaaatctgtaaacactggaccctgaatccgcatccaaccttaatcccggccatcgagagcggctgggtggagagcgtgcactgcttcggcggcgaactggggatggaagagtacatccgcgcccgcccggatatcttctttaccggcccggatggctcgatgcgctctaaccgcgccttctgccagctggcgggccagtacgcggtagatatgttcattggttcaaccctgcaggtggatggtctggctaactcctcgaccgtcacccgcggccgtctttccggcttcggcggcgcgccgaacatgggccacgacccgcacggtcgccgccacgccaccccggcatggctcaatatgatcaccgagccggacccgatgcagcgcgggaaaaagctggtggtgcagatggtcgaaaccttccaggccggcgtgaaaccaaccttcgttgagacgttggatgcagttgaggtggcgaaaacctccggcatgccgctggcgccggtgatgatttatggtgatgacgtcacccacgtcctgaccgaagagggtatcgcctacctgtaccgtgcggagagccttgaagagcgccgggcgatggtcgccgcggtggccgggatcaccgatatcggccttggagtggacgccaaacgcgtcgccgcgctgcgtcagagcggcaaagtggtctacccggaagatctcgggattcgccgcagcgatgccacccgctccctgctggccgccggcagcgtcgccgagctggtggagtggtccgacggactgtacaacccaccggcaaaattccggagctggtaa

SEQ ID NO: 137514 - DNA, 1035 bp, Enterobacter cloacae
atggctaaacccattattacacttaacggattaaagatggtcatcatgttgggcatgctggtgatcatccttaccggcattcgctttgcggcggacataatcgtcccgtttatcctggcgctttttctggcggtgatcatcaatcctctggtccagctcctggtccgctgccgggtgccgcgcgtgctggcgatctcgctactgattggcctgattgttatgttagccattgtgctgctggcctcgctggggacctcgctcaacgagctggcgcgcaccctgccgcagtatcgcaactatctctatgagccgatgcaaaccatcgcgccctggctgcagcgtatgggattcaccgtttcggtggtcgagctcaataagtacatcgaccctaacgccgtaatgaccctggtcaccagcctgctcactcagctgtcgaatgccatgtcttctatttttctgctgctgctgacggtggtgtttatgctgctggaggtgccgcagcttcccgctaagctgcagcagttaatgtccagaccagtagaaggcatgggcgccatccagcgggccatcgacagcgtatcgcattatctggtgctgaaaactgcgataagcctgatcaccggcctggtggtctggggcatgctggtgctgctggatgtgcgcttcgcctttatgtgggggctactggccttcgcgctgaactatattcccaatatcggttccgtgctggcggccattccgccgatcctgcaggtgctggtattcggtggtctgtacgaggcgctggtagtgctggccggctacctgatcgtcaacctggtattcggcaatattctcgaacctcgtatcatggggcgcgggctgggcctctcgacgctggtagtattcctgtccttaatcttctggggatggttgctgggtccggttggcatgctgctctcggtgccgttgacgattatcgtcaaaattgccctcgagcagaccagcggcgggcagagtatcgctttcttattaagcgatgtcagtaaacagtag

SEQ ID NO: 137515 - DNA, 363 bp, Enterobacter cloacae
atgttttattggattttattagctttagcaattattgctgaaatcaccggcaccttgtctatgaaatgggcaagcgtgagcggcgggcacaccggctttattttaatgctggccatgattgccctgtcatatatttttcttgcctttgctgttaaaaagattgccctcggtgtggcctatgcgttgtgggaagggatcggtattttactgattaccctgttcagcgtgctgctgtttgatgagagtctgtccctgctgaaaatagccggcttgaccaccctggtgatagggatcgtcttaattaagtccggcacccagaaaaaagcgtcttccaagcaggaggtggcccatgcagcagtttga

SEQ ID NO: 137516 - DNA, 330 bp, Enterobacter cloacae
atgcagcagtttgagtggatccacgccgcctggctggcaatcgccattgtgctggaaattattgccaacgtctttttgaagttttccgacggcttccgccgcaagatctacggcatcctgtccctggcggcagtattgggcgcgttcagcgccctgtcgcaggcggttaaagggatcgatctctcggttgcctatgcgctgtggggcggcttcggtatcgcggcgaccatcgccgccggctgggtgctgtttggtcagcgtctgaataacaaaggctgggcgggggttatcctgctggtaaccggcatggtgttaattaaactcgcctga

SEQ ID NO: 137517 - DNA, 813 bp, Enterobacter cloacae
atgcgtagagacgttctgttattactgtgttcattttatctgttacctctgggcgcacatgccgatgatagcggactgagcgccaaagatattaagacgttgtttttcggtcacgatgaccgtaaagcggtgaaccgccccgaggagagtccgtgggacgcgattggccagttggaaaccgccagcggcaatctgtgtacggcgacgctcatctctccgcatctggcgctgaccgcgggccactgtctgttaacgcccccgcgcggcaagccggacaaagcggtcgccctgcgctttatttcccgcaagggcaactgggtctatgagatccacggcattgacgggcgagtcgatcccagcttaggcagacgcctgaaagccgatggcgacggctggattgtcccttccgctgcagcgccgtccgattttggtctgatcgtgctgcgctatgctccgtctggcattacgccgatcccgctctttccgggcagcaaggccgatctcaccgccgcgctgaaggcggcggaccgtaaagttacccagtctggctatcctgaagatcatctcgataatctttacagccaccaggattgcatcgtgacagggtgggcgcaaaccagcgtactatcgcatcagtgtgacaccctgcctggcgacagcggctcgccgctgctgctgaaaacggaggacggctggcaggtgatcgccgtgcagagttcggcccccggcccgcaggatcgctggcgggcggacaatcgcgccattgcggtgactggctttcgcgataagctggaggcgcttgccggtgagtaa

SEQ ID NO: 137518 - DNA, 372 bp, Enterobacter cloacae
gtgtttagtggttttgtggtgttttttcgctgcctgcgctttctgggctgccggtttagccacagctttgtgatgctttttcgccgcctgagctttctgcggagcagctggtttagctgctacttttttgtgttttttagcggcctgggctttctgagcagcggctggtttagcttctgcttttttgtgttttttggcagcctgagctttctgctctgcggccggttttgccgcggctttgtggtgttttttgtgatgggtggtcttggcagccgtgctgtgggtggcagccggtgcctgagtggtgcttactgcgtcagcagcgaaagcggcggaagagagacccatagcagcggcaacgaccagagctaa

SEQ ID NO: 137519 - DNA, 1503 bp, Enterobacter cloacae
atgagcgcgaatcgccttgagatgcataacattagcctggccttctccggctttcaggcgctgaacaaggtggactttaccctccatggcgggtcggtgcatgccctgaccggggccaacggcgcgggtaagtcgacgctgatggccgtgctgtgcggcacccacgcccactatgagggcgaagtgacgatcaacaacctgccggtcatcattcgttcgccgcgggatgctaaacagctggggatccacctggtgcagcaggaggtggacgtggcgctggtgccgggcctgagcattgccgaaaacattatgctggacaggctggcggagccgggcatgaccttccgctggtcgcgggttcggcagctggcgcgcgaggcgctggcgcagctggatgtggcgctggacgtccggcgctccattgacagctgcacgctcgccgaaaaacagcaaatcctgttggcccgcgccctgtcgcaccattgccgctttttgatcctcgatgaacccaccgcgccgttggatcagcatgaaagtgagcgtctgtttgcggtagtacgccgtctgcagcatcaggggatcggggtggtgtttatttcgcatcgtatccatgagctgaaggcgatctgcgacaccctgacggtgctgcgcgacgggcggctgattgagagcggcccgatggcgccgctgagcggcgaacagatcgtcgaaaagatgctgggccacgagctgagcgatatcttcccgccgccgcgcccgccgcacggcgaagaggtgctgttgcaggttgacggtctgcatgatgaggcgttgctgcaggatatttcgctgcgcctgcggaagggggaaattctgggtatcgccgggctggccggcgcgggcaaaaccgagctgtgcaaagcgctgttcggcgccagcaaaagccgggtgcagcgtggcgagctgaacggccagccgtggcgaccgcgcgatccggccgactcggtggggcgcggcctggcgctggtcccggaggagcgacgcaaagagggcattttcattgaagagccgatcgcgatgaacctggcggtcagcgccgataacagcttttcgcgctggagcctgtttggccatcggcaggcctggcgctgggcggaggaggtgattgcccgcctcggcgtgcgcgctaccggtcccggtcagacgctgcgccgtctttctggcggcaaccagcagaaggtggccattggcaaatggctgcgcggtgatgccaacgttttgatttttgacgaaccgaccaaaggggtcgatgtgaaagcgaaaaccgatctgttcatgctgatcgatggtctggcacgggaaggcaaaggggtgatttatgcctcgggtgaattcgccgagctggtcggtttatgcgaccgcatctgcgtactgtgggacggacggatcgtagcggagatccccggcgcggaagcccgggaagagacactgctttattattcaaccggaggagcggcagcgtga

SEQ ID NO: 137520 - DNA, 1089 bp, Enterobacter cloacae
atgagcaacagcgatatccgcgtcgtgcccggcccggccaactatttctcccatcctggcagccttgagcggctgagcgatttttttaacgccgaccagctctcgcgagcggtgtgggtctatggcgagcgcgccctggccggcgccgaaccttttctgccggcggccttccacctgccggaggcgaaaaagatccgctttaccggccactgcagcgaacgcgacgtggcggggctggtgcaggcctccggtgacgatcgggcggtagtgattggcgtcggcggcggcgcgctgctcgacagcgcgaaagtgctggcccgccgcctgggggtaccgctggtggccatcccgactatcgccgccacctgcgcggcgtggacgccgctgtcggtgtggtataacgacgccggacaggccctgaattttgagctcttcgatgacgccaactttctggtgctggtcgaaccgcgcattattctcaacgccccggcggagtacctgctggcgggcattggcgacaccttagccaaatggtatgaggccgtggtgctggcgccgcagccggaggcgctgccgctcaccgtgcggctggggattaacggcgcgctggcgatccgcgatgtgctgctggccagcagcgaaacggcgctggcggaccagcgccgcggcgatctgacccaggcgtttcgcgatgtggtggaggcgattatcgccggcggcgggatggttggcgggctgggggaacgttacacccgggtcgccgccgcccatgcggtgcacaacggactgacggtgctgccgcagacggataaattcctccacggtaccaaagtggcctacggcattctggtacagagcgccctgcttggtcaggacgatgtgctggcgcagttagtgcaggcgtatcagcactttaacctgccgaccaccctggcggcgctggaagtcgatatcaataaccgcgcagagctggaccgggtcattgcccataccctgcgcccgggcgagtcgattcactatttaccggtgacgttaacccctgaggttctgcgcgcggcgtttgagaaggtggaatacttcagccgttaa

SEQ ID NO: 137521 - DNA, 744 bp, Enterobacter cloacae
atgcagatcgatttaacaggtaagaaggcgctggttaccggcgccagccgtgggttgggtcgcgccatcgcgctgtcgctggcgcgcgccggcgccgatgtggttattacgtatgaaaaatcggccgataaagcccaggcggtcgccgatgaaataaaggcgctgggtcggtacggcgaagcggtacaggccgacagcgccagcgcgcaggcgattcaggaggcggtaacccatgcggcccggtccctcggcgggctggacattctggtcaacaacgccggaatagcccgcggcggtccactggaatccatgacgctggcggacattgacgcgcttatcaacgtcaatatccgtggagtggtcatcgccacccaggaagcgctggtgcatatggccgatggcggacggatcatcaatatcggcagctgtctggctaaccgcgtggccatgccgggcatctcggtttacgccatgaccaagtccgccctcaacgccctgacccgtggcctggcgcgtgatttaggccctcgcgggatcaccgttaaccttgtccatccagggccgaccaacagcgatatgaacccggaagacggagaacaggcggaagcccagcgccagatgattgcggtcggtcactacggccagccggaagacatcgccgcggcggtcaccttcctcgccagcccggccgccgggcagatctccggtacggggctggacgtggatggcggattgaacgcctga

SEQ ID NO: 137522 - DNA, 405 bp, Enterobacter cloacae
atgactattcagtacatcaaggatgaagaaggaaaagaccagtatgtcgtcattccttacagcgattactttcgtatgcgcctggctctgctggagtacgacgacgaggatgaaagcgactgggaagatattccttatgaatcagatatctatgataacgtcatgctgccgggcgaagtatgcgacgtgatgcataaagaaaacgtcagcctgcaggccgcgtggcgcatcctgcgcgggatgtcccagcaggaggtagccgaaaagcttggcatcagccagtccgcggtgtcacagctggaagcgctggactcccgtccgcaaaagcgcacccgcgagaagctggcggcgatttacggctgtactcaggagcagatcagcctctatctgccgaaagagggttaa

SEQ ID NO: 137523 - DNA, 198 bp, Enterobacter cloacae
atgtttgacaccctttccaaagcaggtaagtacctgggccaggcggcgaagatgatgatcggcgtgccggattacgataactacgtcgagcacatgcgaataacccacccggatcagacgccgatgacctatgaagagttctttcgcgaacgccaggacgcgcgctacggcggcaagggcggggcgaagtgctgttaa

SEQ ID NO: 137524 - DNA, 414 bp, Enterobacter cloacae
atggcctggaagcgagagcttacgctggcggcgctgaacgccagcagcgaaaataccatggtggcgcatcttggcatcatctacacccgactggaagaggggctgctggaggcggagatgccggtggatgcgcgcacgcatcagccgtttggcctgctgcacggcggcgcttccgcggcgctggcggagacgctgggctcgatggccggttggctgatgaccgaagaagggcagtgcgtggtgggcaccgagcttaacgctacccaccatcgtccggtctccagcgggaaagtgcgcggcgagtgccgtccgctgcatcttggccgccagagccagagctgggagattgtggtgtatgacgagaaggggcggcgctgttgcacctgtcgtctgggcaccgcggtgctgggctaa

SEQ ID NO: 137525 - DNA, 756 bp, Enterobacter cloacae
atggcggcgctggattttcacggccagaccgtgtgggtgaccggcgcaggtaaagggattggctatgccaccgcgctggctttcgtcgaggccggggccaacgtcaccgggttcgacctcgcctttgacggcgaaagctacccgtttgccaccgaaacgctggacgttgccgatgccgaccaggtacgcgaggcatgcagccggctgttggcgaataccgagcgtttagatgtgctggtgaacgccgccgggatcctgcgcatgggcgctaccgaccagctgagcgcggaagactggcagcagaccttcgcggtcaacgtcggcggggcgttcaacctgtttcagcagacgatggcccagttccgtcgccagcggggcggggcgatcgtcaccgtcgcctccgatgccgcgcacacgccgcgtatcggcatgagcgcctatggcgcctcgaaggcggcgctgaaaagcctggcgctgaccgtcggccttgagctggcgggcagcggggtgcgctgtaatctggtgtcgccgggctccaccgataccgatatgcagcgcaccctgtgggtcagcgacgatgcagagcagcagcggatccgcggcttcggcgagcagtttaagctcggcatcccgctgggtaaaatcgcccgcccgcaggagatcgccaataccattctgttcctcgcctcttctcacgccagccatatcaccctgcaggatatcgtggttgatggcggctcgacgctgggggcgtaa

SEQ ID NO: 137526 - DNA, 702 bp, Enterobacter cloacae
  misc_feature (689)..(698): n is a, c, g, or t
atggcaatccctaaattacaggcatatgcgctgccggaagccagcgatatcccggcgaacaaggtcaactgggcctttgagccgtcgcgcgccgcgctgctgatccacgatatgcaggaatatttcctcaacttctggggcgaaaacagcgcgatgatggagaaagtggtggctaatatcgccgccctgcgcgacttctgcaaacagaacggcattccggtgtactacactgcccagccgaaagagcagagcgatgaagaccgcgccctgctgaatgatatgtgggggccgggtctgacccgctcgccggagcagcagcaggtgattgccgcgctggcgccggatgaagacgataccgtgctggtgaaatggcgctacagcgcgtttcatcgctcgccgctggaggagatgctgaaagagaccggtcgcgaccagctgatcatcaccggcgtttacgcccatatcggctgcatgaccaccgccaccgatgctttcatgcgcgatatcaaaccgttctttgtcgccgacgcgctggcagatttcagccgtgaagagcacctgatggcgctgaaatacgttgccggccgctccggacgggtggtgatgaccgaagagctgctaccgctcccagcctccaaagcggcgctgcgcgcgctgatcctgccgctgctcgacgaatccgatgaacnnnnnnnnnnatga

SEQ ID NO: 137527 - DNA, 1608 bp, Enterobacter cloacae
atgattgcatttacccgttggccggaagagtttgcggcccgctatcgtcaaaaaggctactggcaggatctgccgttaaccaatctgatcacccgtcacgcggaaaacgacgccgtggcgattatcgatggcgagcggcagattagctaccgccagtttaaccagctggtggacaacctcgcctgctcgctgcagcgccagggactgaagcgcggggagaccgcgctggtgcagttgggcaatgtcgccgagttttacatgaccttctttgcgctgctgcgcatcggcgtcgcgccagtgaacgctttgttcagccaccagcgcagcgaacttaatgcctacgccgcgcagattaaaccggcgctgctgattgccgatcgcgagcacgctctgtttgctgacgatagctttctccacgcgtttatcgcggaacatccttccctgcgcgtcgcactgttgcgtaacgacggcggcgagcgcgatctggcgacggagattaaccgcccggcggataactttatcgccaatccaacccctgccgacgaagtggcctttttccagctctccggcggcagcaccgggacgccgaagcttatccctcgcacccataacgattacgactacagcatccgccgcagcaacgagatctgcgggattaacgctgaaacgcgctacctcaacgcgctgccggcggcgcataactatgcgatgagttccccgggttcgctcggcgtcttcctcgccggcgggcgggtgatcctcgccgctgacccgagcgccacgctctgtttcccgctgatcgaaaaacatcagattaacgtcgcgtcgctggtgccgccggcggtcagcctgtggctgcaggcgattcacgaatggggcagcaacgcccagctgcaatcgctgcagctgctgcaggtcggcggcgcgcgcctgtcagcgaccctcgccgcgcgcattccggcggaaatcggctgccagctgcagcaggtgttcggcatggcggaggggctggtgaattacacccgccttaacgatagcccgcagcggatcatcaatacccagggctgtccgatgtgcccggacgatgaagtgtgggtagcggatgccgacggcaacccgctgccgcgcggcgaagtgggccgcctgatgacccgcgggccgtacactttccgcggctactacaacagcccgcagcataacgcggaagcctttgacgccgaggggttttattgctccggcgatctgatttcgatcgacgaagatgggtatatcaccgtccagggccgggaaaaagatcagatcaaccgcggcggcgagaagatcgccgctgaagagatcgaaaacctgctgctgcgccatgaggcggtgatccacgccgcgctggtcagcatcgaagacaatctgctgggcgagaaaagctgcgcttatctggtggtgacctcgccgctgcgcgccgtcgccgtgcgccgcttcctgcgcgagcagggggtggcggaatttaaactgccggaccgcgtggagtgcgttgccgcgctgccgctgacgccggtgggcaaagtcgataaaaaacaattacgtcagtggctggccgaaggcaagctgggctga

SEQ ID NO: 137528 - DNA, 1104 bp, Enterobacter cloacae
atggaaacgtcactggctgaggatgtaaagaaaccgacccggaccctgtcgccggacagcttcttctttatgtcgccgtaccgcagttttaccacttcaggctgcttccgtcgcttctcacagcccgccgttggcggcgatgcgctgaacggcgagttccagcagcagatggcggccgcctttgccgaggcccgggcggcggggatccgcaagccggtgatggtcggggctatcccgttcgacacctgtcagccttccgagctctatatccccgagcgctgggaagcgttctctcgcccggaaaagcagcgttccgcccgctatgccgcgccgctggaggcgatggaggtggtggagcgtcgggagatcccggagcaggacgcgtttttagccatggtggaacgcgccgccgcgctgaccgccaccccggaagtcgacaaagtggtgctatcaaggcttattgatattaccacccgcgaccgcgtcgacagcggcgcgctgatggagcgactgatcgcccagaaccccgccagctttaacttccacgtgccgctctccgacggcggcgtgctgctgggcgccagcccggagctgctgctgcgtaaagaaggacagcacttcagctctctgccgctggccggctccgcccgtcgccagccggacgatgtgctggatcgggaagcaggcaacaggctgttggcctccggcaaactaccggagtcgccgcagctgattaccaccccgacgctctggcatctggcgacgccgatcgcaggcaccgcgctggcggaagaaaacgccatgtcgctggcctgtctgctgcacccgacgccggcgctgagcggtttcccgcatcaggcggcgaagcgcctgattgctgaactggaacccttcgatcgccagctgttcggcggcatcgtcggctggtgcgatgacgaaggcaacggcgagtgggtggtgactatccgctgcgcgcgtctgcagcagcgtacgctgcgcctgtttgccggcgcgggcattgttccggcctcctcgccgctgggcgaatggcgcgaaaccggcgtcaaactgaccaccatgcttaacgtatttggcttgaactaa

SEQ ID NO: 137529 - DNA, 753 bp, Enterobacter cloacae
gtgaacttcttttctttctgccgccgcggtgcgctgaccggcatgctgttgcttttaggaattacctcagcccaggcggcggactggccgcgccaggtcaccgacagctacgggacgcataccctgccgagtcagccgctgcgcattgtctccaccagcgtgacgcttaccggttcgctgctggcgattgacgctccggtggtcgccagcggcgcgaccacgccgaacaaccgcgtcgccgatagccagcaaaccctgctcacccagctggggcagatcaccggtcatgaacaacaggccagcgcgcgcattgccgacttcaataaacagctcgtttcgttaaaagaaaaaatgaaactgccgccgcagccggtgaccgccctggtctataccgccgccgcgcacagcgccaatatctggacgccggaatcggctcaggggcagatgctcgaacagctgggctttagcctggcgacgctgccgggcggcctgcccgccagccatagccagggtaaacgccacgatatcgtgcaactgggcggggagaacctcgcggccggtctgaacggccagagcctgttcctgttcgccggcgaccagaaagatgcggatgccatctacgccaacccgctgctggcgcatctcccggcggtcgcaggcaaacgcgtctacccgctgggcaccgagaccttccgccttgactactacagcgctctgctggtgctccagcgtctctccagcctgttcggctaa

SEQ ID NO: 137530 - DNA, 531 bp, Enterobacter cloacae
atggccagcgcggtgcgggtgctctatccggcgctggccggtagctggcagatgtcggccggacagattggcctgctgtacgccgctattccgctcggtgcggcgctgggggcgttgaccagcggccaactggcccagacggtgcggccgggcgcgctgatgctggcgacgacggtgggatcgtttgtcgccattgcgctgttcagcctgatgccgcactgggcattgggcgcgctgtgcctggcgctgtttggctggctgagcgctattagctcgctgctgcagtacaccctgattcagacccagacgccggaacatatgctcgggcggattaacggtctgtggaccgcgcaaaacgtcaccggcgacgccatcggcgcggcgctgctcggcggcttaggggcggtgatgacgccggcggcatccgccagcgccagcggctgggcgctggcgcttgtcggtgtgctgctggttgggttgctacgcgagctgcgccgtttccagcgcccggaaattgtcaacgaaagttaa

SEQ ID NO: 137531 - DNA, 675 bp, Enterobacter cloacae
gtgtgcattgtctttgaaggccgggacggcgccgggaaaggcggcaccattaaggccatcaccgagcgcgtcagcccgcgtatctttcgggtcgtcgccttaccctcgcccaccgagcgcgaaaaaagccagctctactttcagcgctatatcaagcatctcccggcggccggcgaaatcgtgattttcgatcgcagctggtataaccgcgccggcgtcgaacgggtgatgggcttttgtacgccggaggaggtgcagaagttcctcgacggcgcgccgatggtggagcgcggcatggtcgaatcgggcattattctgctcaagtactggctggaggtctctccgcaggagcaggagcgccgtctgcgggatcgcatcgacgacgggcgtaaaatctggaagctctcgccgatggacattaagtctttcaaccgctgggatgaatatactgctgcccgcgacgccatgttcgccgccaccgataccgcctgggcgccgtggttcgtcgcccgctcggaggataaaaagcgcgtgcgtctgaatatcatcacccatctgctgtcgcagatcccctatgaagctttaccggtggagcctgtgacgctgccgaagcgcaaaattggcaaaatgaaacagactaattttcctttccgcttcattccagagaagttttga

SEQ ID NO: 137532 - DNA, 186 bp, Enterobacter cloacae
atgaaaagtaatacgctacgtaaaagacccactgacgtacccgtccagaaggcgtcagaacagccaggtaaggatttacgagaagcagataaacagcgacagcacaaggaattcattgccgcaatgaatgaatttattgcaaaaggaggcactcttactgatgatgaatttttcagggtgctataa

SEQ ID NO: 137533 - DNA, 324 bp, Enterobacter cloacae
atgcttgaacaattcaatatttatccttggtacgacatgctgatgcctaaaaccctgccatattatatgatcgtgcagaatgattattatgcagacctggccacgagagtcattattcctttaatgcgaccacaacagttaccacgctggcatcagcatgtcgtaccaaggataaatatagaatttgacagctttttactttgtacgccaacgagcagtaacttaaataataaacggatcccgccacaggatttcgtctgcaatctgagtcatgcgcgccagggcgttatcgattcaatcgatacacttatcacgaactgctga

SEQ ID NO: 137534 - DNA, 657 bp, Enterobacter cloacae
atgagtaaatcgaagatgattgtgcgcacaacgtttatcgatcgcgcctgtcactggacggtggttatctgtttcttcctcgtggcgctgtcgggaatatcgttcttctttccgacgctacagtggctaacggaaaccttcggcacgccgcagatggggcgtattctgcacccgttctttggggtgctgatttttgtcgcgctgatgtttatgttcgtgcgctttgtccaccacaacatccctgataaacaggatattccgtggctgaaaggcatcgtcgaggtgctgaaaggcaacgagcataaggtggcgcgcgtcggtaagtataacgccgggcagaagatgatgttctggaccatcatgagtatgattttcgtgctgctggtgaccggggtgattatctggcggccctatttcgcgccgtatttcccgatgcaggtgattcgctatagcctgctgattcatgcgacgtcggccatcattctgatccacgccatccttatccatatgtatatggcgttctgggtgaaggggtcgattaagggaatgattgaaggcaaggtgagccgccgctgggcgaagaaacaccacccgcgctggtatcgcgatgtcgaacgcctggaagcgatgaaagagagtcgtgaagggatgaagtaa

SEQ ID NO: 137535 - DNA, 885 bp, Enterobacter cloacae
atggcgatggaaacccaagacattattaaacgctccgcgaccaacccgatcacccccgcgccgcgcgcgcgggactataaagcggaagtcgccaagcttatcgatgtctcctcctgcgtgggctgtaaagcctgccaggtggcctgttccgagtggaatgacatccgcgatgacgtggggcactgcgtcggggtgtacgacaacccggcggatctcagcgccaaatcctggacggtaatgcgttttagcgagaccgaacagaacggcaaactggagtggcttatccgcaaggatggctgtatgcactgcgcagagccgggctgcctgaaggcctgcccatccgccggggcgattattcagtacgccaacggcatcgtcgatttccagcaggaaaactgcatcggctgcggctactgcattgcggggtgtccgtttaacgtcccgcgcctcaataaagaggataaccgggtctataaatgcaccctgtgcgtggatcgggtcagcgtcggccaggaaccggcctgcgtgaaaacctgtcctaccggcgcgatccacttcggtacgaagaaagagatgctggaggtggccgaggagcgggtggctaagcttaaaaaacgcggttatgccaacgccgggatttacaacccgccgggcgtcggcggcacccacgtgatgtacgtcctgcatcatgccgaccagccggagctgtatcacaagctgccgaaggaaccgcagatcgataccagtatcagtctgtggaagggggcgctgaaaccgctggcggcggcgggctttatcgccaccttcgccgggctgatttaccactacatcggtatcgggccgaacaaggaagttgacgacgacgaggagaagcatgatgagtaa

SEQ ID NO: 137536 - DNA, 2412 bp, Enterobacter cloacae
atgaccaaccactgggtggatatcaaaaacgccaacgtcgtggtggtgatgggcggtaacgccgccgaagcccatccggtgggtttccgctgggcgatggaggcgaaaaacaataacgacgccacgctgatcgtcgtcgacccgcgctttacgcgtaccgcgtcggtggccgatatctatgcgccgattcgttccggtaccgacattaccttcctgtcgggcgtgctgctgtacctgatcgaaaacaataagatcaatgccgagtacgttaagcattacaccaatgccagcctgctggtgcgggatgattttgccttcgaagaggggctgttcagcggctacgatgcggaaaaacgccagtacgataaatcgtcctggaactaccagttcgatgaaaacggctacgccaaacgcgatgaaacgctcagccatccgcgctgcgtgtggaacctgctgaagcagcacgtttcccgttacacgcccgaggtggtcgaaaacatctgcggtacgccgaaagcggacttccttaaagtgtgcgacgtgctggcctcaaccagcgccgcggaccgcaccaccaccttcctgtatgccctgggctggacgcagcacaccgtcggcgcgcagaacatccgcaccatggcaatgatccagctgctgctcggcaatatggggatggccggcggcggcgtcaacgccctgcgcggccactctaatattcaggggctgaccgatttgggcctgctgtcgaccagtctgccgggctatttgacgctgccatcggacaaacagaccgatctgcaaagctacctcagcgccaacacgccgaaggcgaccctgcccgagcaggtgaactactggagcaactacccgaaattcttcgttagcctgatgaaatccttctacggcgaggcggcgcaaaaagagaacgactggggctttgagtggttaccgaagtgggaccaggcttacgacgttatcaaatacttcaacatgatggataacggcaacgtcaccggctatatctgccagggctttaacccggttgcctccttcccggacaaaaacaaagtggttcgcagcctcagcaagctgaaatatatggtggttatcgacccgctggtgaccgaaacctcgaccttctggcagaaccacggcgagtctaatgatgtcgacccgtcggcgattcagaccgaagtcttccgtctgccgtcgacctgctttgccgaagaggacggttcgatcgccaactccggtcgctggctgcagtggcactggaaaggtcaggatgccccaggtgaagcgcgcaatgatggcgaaatccttgccgggatttaccatcgcctgcgcgaactgtaccgcaccgaaggcgggaagggcgcggaacccctgctgaagatgagctggcgctacaagcagccggaccatccggaatcggaagaagtggcaaaagagaacaacggctacgcgctggcggatctctacgatcaaaatggcactctgctggcgaaaaaaggccaactgctcaatagcttcgcgctgctgcgcgatgacggcagcaccgcgtcgtcttgctggatctataccggcagctggaccgagcagggtaaccagatggcgaatcgtgataacgccgatccttcgggcctgggcaatacgctgggatgggcctgggcgtggccgctcaatcgtcgggtgctgtacaaccgcgcttcggccgatatcaacggcaagccctgggatgcgaagcggatgctgatccagtggaacggcagcaagtgggtcgggaatgatattccggacttcaataccgcgccgccagggagcaaaaccgggccgtttatcatgcagcaggaggggctgggtcgcctgtttgcgctcgataaactggcggaagggccgttcccggagcactacgagccgatggaaaccccgcttggcactaacccgctgcacccgaaggtggtctccagcccggtggtgcggttgtatgaagaggacgccattcgcttaggtaagaaggataaattcccgtatgtcgggaccacctatcgtctgaccgagcatttccacacctggaccaagcatgcgttgctcaattccatcgcgcagccggaacagtttgtcgaaatcagcgaagggctggcgaaaagcaaaggtatcgctaacggcgattgggtgaaagtcagcagcaagcgcggcttcattcgcgcggttgccgtggtgactcgccgactgcgcacgctgaacgtcaacggccagcaggtggagaccgtcgggatcccgctgcactggggttttgaaggcgtggcccgaaaaggctacatcgccaacaccctgacgcctaacgttggcgattccaactcgcaaacgccggaatacaaggcgttcctggtcaacatcgagaaagcgtaa

SEQ ID NO: 137537 - DNA, 588 bp, Enterobacter cloacae
atggacgtcagccgcagaaagttctttaagatctgcgcaggcggtatggccggaactaccgccgccgccctgggctttgcccctaaaatggcgctggctcaggcacgcaatttcaaattgctgcgtgcgaaagagatccgcaacacctgcacttactgctccgtgggctgcgggctattaatgtatagcctcggcgacggtgcgaaaaacgccaaagaagcgatctaccatatcgaaggggacccggaccatccggtgagccgcggcgcgctgtgcccgaaaggggcaggcctgctggactatgtccacagcgaaaaccgtctgcgttatccgcaataccgcgccccgggctcggacaaatggcagcgcatctcctgggatgaagcctttaaccgcatcgcccgactgatgaaagccgaccgcgacgccaactttattgaaaagaatgaacagggcgtgacggttaaccgctggctttccaccggcatgctgtgcgcctcggcggcaagcaatgagaccggcatgctaacgcagaaatttgtgcgatcgctgggtatgctggcggtagacaaccaggcgcgcgtctga

SEQ ID NO: 137538 - DNA, 879 bp, Enterobacter cloacae
atggagaaaaagagagccacgaccatcggcttcgccgccattatcttatggagcacgatggtcggattgattcgcggcgtcagcgaaggactgggagcggtcggcggcgcggcgatgatttacagccttagcggcctgctgctgatctttaccgtcggctttcccaacctgcgccagatcccgcgtcgctatctgctggccggcagcgtgctgtttgtcagctatgaaatctgcctcgcgctgtcgctgggctatgccgccagccgccagcaggccattgaggtggggatggtcaattacctgtggcccagcctgacgattttattcgccattctctttaatggccagaaaagcagctggctggtgatccccggcctgattctcgccctgctgggcgttggctgggtgttgggtggtgagcatgggctacagcccgatgagattatcagtaacgtcatttccagcccgcttagctatctgctggcctttgtcggggcgtttatctgggccgcctactgcacggtgacggccaaatatgcccgcggtaaaaacgccattacgctgttcgtcctgttaaccgccctgacgctatggctgaaatttctcgccagcgaccagccgccgatgctgtttagctggccggtagtcattaagctgatgacggtctccgtggcgctggggctggcctacgcggcgtggaacgttggcatcctgcacggcaacgtcagcctgctggcggcggcctcctacttcacgccggtgctctcctctgcgctggcggcgatcctgctgagtgcgaccctgtcgtggtccttctggcagggggccgggatggtatgtctcggctccctgctctgctggtacgccacccgccgttag

SEQ ID NO: 137539 - DNA, 774 bp, Enterobacter cloacae
atgcgttttaccgataaagtcgtcgtcatcaccggcgcggcgcagggcattggccgccagacggcggagcaggcggctgcagaaggcgcggctctgctgctcatcgatcgctcgtcatacgtccatgagctggcggcgacgctggcgcaatccggctgtctggtgctggcgctggaggcggatctggaagcgtgggaaagtaccgagcaggcgtttgccgccggggtcgctcattttggccgtatcgacgtgctgatcaacaacgttgggggcaccatctgggcgcgcccctttgccgaatatcagccggagcagattgagaaagagatccgccgctcgctgttccccacgctatggggctgccgcgcggcgctgccatggatgctgaagcagggcaaaggcagcatcgtcaacatttcgtcggtggcgacggcgggagtgaatcgggtgccgtactcggcggcgaaaggcggcgttaacgcgctgacccgctcgattgccatggagtacagcggcagcggtattcggattaacgccgtggccccgggcgggaccgaggcgccgccgcgcctgacgccgcgtaacgaagagcagccgagcgagcaggaaaaggcgtggtatcagcaggtcgtcgatcagacggtggcgagcagtctgctgcaccggtacggcacgctggcggaacaggcgaatgcgatcctgtttctcgccagcgatgaggccagctatatcaccggcgtgacgctgccggtagccggaggcgatctcggctaa

SEQ ID NO: 137540 - DNA, 1017 bp, Enterobacter cloacae
atgaccttcaatattgctcttaattttgaggacggcattacccgctttattcaatgccatgccggagagaaagtcctggatgccgcctatcgccagaaggtgaatctgccgatggattgctcggacggggtgtgcggcacctgcaaatgccactgcgccagcggtgagtacgacctgggtgaagattatctcgacgaggcgttaagcgacgacgaagcgcaggcccgtcaggtgctgacctgtcagatggtcccgaccagcgactgcgtgatcgatgtgccggtggccgccgcgcagtgtaaaaccgcgctgaccaacaccggggcgcaggtacgacaggtgaatttactgtccgataccgccatcgaactggtggtcgccctcgatgagccgctggccttcctgccggggcagtacgtcaacattcaggtgccgggcacgcctcatgtccgcgcctactcatttagctcgcaaccgggttccctcgaagggcgttttctgatccgtaacgtgcctggcgggatgatgagccagtggttaacccagcgggcgcggcccggcgatcgtcttaccctcagcggcccgatgggcagcttctatctgcgccacggcgaacgtccgctgctgatgctggcgggcggtaccggcctggcgccgctgctctccatgctccataccctgcagacacagggcagccagcgtccggtgatgctgctgtacggtgttactcgtgactgcgatctggtgaaaaccgacgcgctggatacctttactcaacagctgacggggtatcgttggctaccggtggtggccgatgaaaacagcacttgcccgcagcgcggctttgtcaccgaccatctcgacgacgcgatgctgaacaacggcgacgtggacatctatctctgcggcccgccgccgatggttaacgcggttgccacggagttgcgcgaccgcgggatcaccccggcggggttctggtatgagaaatttatcgccagccagagcgcggcggcataa

SEQ ID NO: 137541 - DNA, 486 bp, Enterobacter cloacae
atgcttaacctcgaacaggttcgccagtttctctactatgaagcccgtctgctggacgatcgtcagtgggacgaatggctcagctgctacagcccgcaggtggtctactggatgccggcgtggggcgacgatgaccagctgacccgcgacccgcaaaaagagatttcgcttatctactaccccaaccgcgaagggctggaggatcgcgtctaccgcattaaaaccgagcgctccggggccagcacgccagagccgcggaccacccatatcatcagcaacgttgagctgatgggcgaaagcgacgagggtctggaggtgcgttacagctgggtcacctggagccatcgctatcagcacacggatgcctattttggctctacctgctgcacgctaatcgaacaggacggcagaccgcaaatcatccgcaaaactgtgcgcctgaataacgactatatccgtcaggtgattgacgtttaccacatttaa

SEQ ID NO: 137542 - DNA, 1383 bp, Enterobacter cloacae
atgcaaaaaacgctctcgacgctcaaagacaaaatcaataatgccttagttgtcgaccgtgaaaatcatatttaccgttgccaccgctctatatttaccgaccagcagttatttgattttgaaatgaaacatatcttcgaaggaaattgggtttttcttgcccatgaaagccagattgccgagccgggagattattataccctgacgctgggacggcagccggttattattacccgcgataaaaagaatgagctgcacgcgctaattaacagctgcgcccaccgcggcgccatgttatgtcgacgcaaaaccggaaataaaaattcgtttacctgtccgtttcacggctggaccttcagcaataatggcaaattattaaaggccaaagatgagagcactggcggctatccgccgagctttaaacaagacggctcccacgacctgcaaaagttgccgcgttttcagtcctatcgcggtttcttattcggtagcctcaaggccgacgtgcagccgctggaggcctatctcggggaaacctgcaagattatcgacctgatcgtcgaccaggcgccggaggggctcgaggtacttaagggttcgtcgagctatgtatatgagggcaactggaaactgggcgcggaaaacggcgccgatggctatcacgtcagcgtggtccactggaactacgcctcaaccatgtcacgccgcaactatgaagcggaagggacgcacgcggtggatgccaacggttggtcaaaaagcctcggcggcggctatggatttgataacggccatatgctgttgtggacccgggcgctcaacccggaagtgcgcccggtctatgcccaccgcgaacggctgcaggcggaatttggcgaacgccgtgccgaccagatggtcaacgaaacccgcaacctgtgcctgtaccccaatgtctacctgatggatcagttctcgacgcaaatccgcgtaatccgccccattgcggtggataaaaccgaagtcaccatctggtgctttgcgccgaaaggggaatccgaccaggccagagcgctgcgaatccgccagtacgaggatttctttaacgtcagtgggatggggacgccggacgacctcgaagagttcagcgcctgtcagcgcggctatctcggcgaaaatctgccatggagcgacctcagccgcggcgcgctgcgctgggtcgatggcgcggatgagcatgcgcaacatgccggcttttcgccgcggttaagcggggtgaaatcggaggacgaagcgctgtacatcgcccatcaccaccactggcagacgctgatgctggcggccattgaacaggaacaacagcgttacgaccagtccattacccagcgcgtggaggtggcctga

SEQ ID NO: 137543 - DNA, 927 bp, Enterobacter cloacae
atgagtaatgtattcgtacaacaaccagctattcagaaattattacgcgacagtgccggattagatgttgccggcggcgatgaacgttttaaggcgattattcatcgtctgctggaaaatatctgcacgctcatcgacgactataacgttacggaagaagagttctggcacgcggtaaactatttgcacgagctgggcgggcgtcaggaggcggcgctgctggcggcgggactgggactggagcatttcctcgatctgcgccaggacgccatcgacgcggcagcgcatcgggaaaccggcaccccgcgcaccatcgaagggccgctgtacgtggctaatgcgccgctggccgagggtcacgcccgcatggatgacggcgccgacgccggagaagtgatgtggctgcacggtgaagtcaaagacaccgaaggtcggccagtggccaacgctattgttgatatctggcacgccaacaccctcggaaattattccttcttcgacccaggccagagtgagtacaacctgcgccggcggatccgcaccggcgccgatggccgctacagcgtgcgcagcatcatgccctccggctacggctgcccgccggatggcccaacccagaaactgctggacagactgggtcgccacggcaaccgtccggcgcacattcactttttcgtctccgcgccgggtcataaacatctgaccagccagattaacctcaatggcgataaatacctgtgggacgattttgcctttgccacccgcgacggcctgattgccgatccggtaaaagtgaccgaccgcgagatcatcgcgcagcgcaatcttgagggagagcacaccgaggtttgttttgatttcaccctgtgtaaagcgctgagcgccgacgaagagcagcgcgggatccgcgtgcgcgccaaagagtaa

SEQ ID NO: 137544 - DNA, 291 bp, Enterobacter cloacae
atgttatttaaagtggagatgaccgtcaatattccgcctggctttcccgccaacgaggcggaggaaataaaacaacgcgaaaaagcctattcgcaacaattacagcgggaaggcaaatggcggcatatctggcgcgttgccggcctttatgccaacgtcagtattttcgatgttcaagatgccgaagaattgcatcaaatattaatgggattgccgctatatccctttatggcgataaaagtggaagccctctgtcgtcatccgtcatcaattcgcgatgacgatcgctaa

SEQ ID NO: 137545 - DNA, 1119 bp, Enterobacter cloacae
atgactgccaccgtagagcaaatcgagagctggattgtggatgtcccgaccatccggccgcataaattgtcgatgaccaccatgggctgccagtcgctggtgattgtgcgccttacccgttccgacggcatctgcggcatcggcgaagccaccaccatcggcggcttgagctattgcgttgagagccccgaggccatctcgtcggcgatcacccattatctgacgccgctgttgaaagggcagtcggccgataacctgcatgcgctgaccgcccgtatgaacggcgccattaaaggcaacacctttgcgaagtccgccatcgaaaccgcgctgctcgacgcccagggcaaagccttaggtctgccggtatcagccctgctcggcggcgcgctgcaaacggcgttgccggtgctgtggaccttagccagcggcgataccgcgaaagatatcgctgaaggagaaaaactgttggccgaaggccgccaccgggcgttcaaactgaagatcggcgcgcgtgaactcgccaccgacctgcgtcatacccgcgccatcgttgaagcgttaggcgaccgcgccagcatccgtgtcgacgtcaatcaggcctgggacgccgccaccggcgcgaaaggctgccgcgaactggcggcgatgggcgtcgatcttatcgaacagccggtcagcgcccacgataatgccgccctggtgcggctaagccagcaaattgaaaccgcgatcctcgcggatgaagcggtcgcgaccgcttacgatggttatcagctggcgcagcagggctttaccggcgcttacgcgctgaaaatcgccaaagccggggggccgaacagcgtgctggcgctggcccgcgtcgcgcaggcggcagggattggcctgtacggcggcaccatgctggaaggcaccgtagggaccgtggcttctctgcacgcctggtcgacgctgccgctgcagtggggtaccgagatgttcggcccgctgttgctgaaagacgatattgtcagcgtgccgctcacctttgccgacggtcaggtggcgctgccgcaaacgccgggccttggcgtcgagctggatgaagacaaactgcatttttatacccgccagccgtag

SEQ ID NO: 137546 - DNA, 798 bp, Enterobacter cloacae
atgagcgacaatatccccaatacgctgagcgccaggcaggccgagcacgaccctaactttatgctgtctctggcccgcgggctggaggtccttaacgccttcaccccccagcgccagcggctgaccatttcccagctcagccagaaaacgcaaatctcgcgcgcggcggtacgccgctgtttgtataccctcgccgcgctgggcatggtgcacagtccggatggccgtagctatgaactgctcccccgggtgctggccgtcggccacgcctatctggcaggcacgccgctggccaaggtggcgcagacggcgctggataatcttggcaaagcgctcggcgaatcctgttcggcggccacgctcgacggggataacgtgctctatattgcccgcgcggcggtcaataatttactgagcatcgatctggggcgcggcagccgcctgccggcgtgggccacgtcgatggggcgggtgttgctgagcgcgctgccggaggaacagctggaagtgacattgtcacgggcaacacttattcgctacactccgcataccctgtgcgatttgtccggtttacgtgcagagatcgcccgggtgcgcatgcagggctatgccctcgccgaccggcagatcgaggtaggcttgtgctcgctggcggtacccgtgctgtcgcgtcacggtcaggtggtggccgccctgaatgtcggggtacctgccgcgacggtctgcgccgcggcgttaaaagagaaggccctcgctccgctacggcgcgcggcgatggatctgtcgttgcagttatag

SEQ ID NO: 137547 - DNA, 216 bp, Enterobacter cloacae
atggcgcagcaggcggcgtcatcgattggcgaggcggtgagtctgtcccaggcgctgcccgccggggtggcgcaggcgctgatggcggcggcgaagacggcttttattcaggctcatagcctggtgctggcgacggcgggtgtattgcttctgctgctggccgccgggatctggcgcagcctcgccaccgtggcgaaaccgcagtcggcgctataa

SEQ ID NO: 137548 - DNA, 930 bp, Enterobacter cloacae
atggatgaactagacaataacaaattaaaggcagaggatgacgaaagagaagtggaaagtgaggaaaatcagcgtggtgaagagatcgaagtaaatgaagatcgccttccctcgcgggcgatggcgatccatgaacatattcgccaggaaggggaaaaagagatggagcgcgatgcgctggccctgctatggtcagcgattgcggccggcctgtcgatgggggcctccctgctggcgaagggaatttttcacgtcaaactggaggggatcccgggaggttttttgctggaaaacctcggctacaccttcggctttattatcgtaattatggcccgccagcagctgttcactgaaaatacggtcaccgccgttctgccggtgatgcataatcccaccctcggtaacgtcggtttgctgatgcggctgtggtcggtggtgctggcgggcaatctcatcggtaccgcggtggccgcatgggccttcaattatatgcctatttttgatgagccaacccgtcaggcctttgtcagcatcgccgaagacgtaatgaaaaacagtccgacagagatgttcgccaatgcgattatttccggctggctggtcgccaccatggtctggatgtttcctgtcgccggcgccgccaaaatcgtggtgattattctcatgacctggcttatcgccctggcggataccacccatattgtggtgggctcggtcgagatcctttatctggtgtttaatggaaatctgccctggagcgactttatctggccgttcgccctgccgaccctggcgggaaatatctgtggcgggaccttcatcttcgcactgctgagccatgcgcagatccgtaacgatatgagcagcaagcgaaaagcggaagcccgcgcccaggcggcggagaaagggaaaaaggccgaccgggcataa

SEQ ID NO: 137549 - DNA, 762 bp, Enterobacter cloacae
atgaattatcgcctgtcggcgcttgcgcttggcgccacattgctggtgggatgtgccagttccagctctggcgatcggccgcaggggcgctcagacccgttagaagggtttaaccgcacgatgtttaacttcaactttaacgtggttgatccttacgtgcttcgccccgtcgcggtggcatggcgcgactacgtcccacagccggcgcgcaacgggttaagcaattttaccagtaacctggaagagccggcagtgatggtgaactacttcctgcagggcgacccctataaaggtatggtgcattttacccgcttcttcctgaacaccattctcggtatgggtgggcttatcgatgtggccgggatggcgaatccgcagttacagcgggttgagccacatcgtttcggcagtacgcttgggcattatggcgttggctatggcccgtatgttcagttgccgttctatggaagctttaccttgcgcgacgaaggcggcgatatggccgatggcttgtatccggtgctctcctggctgacctggccgatgtcgatcggtaaatgggcggtggaagggattgagacacgtgctcagctgctggattccgacggcctgctgcgccagtcttccgacccttacattctgatgcgtgaagcctacttccagcgtcatgactttatcgccaacggcggtaagctgaccccggcggacaacccgaatgctcaggctattcaggatgagctgaaggatatcgattcacagtga

SEQ ID NO: 137550 - DNA, 1323 bp, Enterobacter cloacae
atgagccagaaaacccgctttacccaatctgcccttgcagtggctgtcgcacttgtttccacccaggcctggtcagcaggcttccagctcaacgaattctctgcatcggggctgggtcgtgcctattccggtgaaggggcgatcgctgacgatgctggtaatgccagtcgtaacccggcattaattatgatgtttgaccgcccgaccatgtcggcgggcgccgtgtttgtcgacccgggcgttaatgtttcgggcacctctcccaccggcaagagcctgaaagcagacaatatcgccccgacggcgtgggtgcccaacttccactttgtcgcgccgattaacgaccaatttggttggggggcgtctatcacctctaactatggtctggcaacagagtataacgatgattatgcggccggcagcatgggcggtaaaaccgacctgaccaccgcgaacttcaacctgagcggcgcctaccgcctcgacagcaactggagcttcggcttaggctttgacgcggtctacgccaaggcgaagatcgagcgctatgcaggcgatctggggcagattgtcgcaggctctggcgcgctgccgccggcgctggcgggccaggtagcgaagatcccggccgacacgcagatcgcccatcttaatggcaacgcgtggggcttcggctggaacgccgggatcctctatgagctggataagaataaccgctacggtttaacctaccgttctgaggtcaagatcgacttcgacggtaactaccgcagcagcctgccggcggcctataaccagatcctcggcaacttcggcctgccggcgggcaccagcggccagacgacaaatggttcgctaacccttaacctgccggaaatgtgggagctgtccggctataaccgcgtggcgccgcagtgggcggtccactatagcctgacctacaccagctggagtcagttccaggagctgaaagccaccggcagcaacggccagacgctgttctataaagaggaaggcttcaaggacgcctatcgtcttgcgctggggaccacctattattatgacgataactggaccttccgtaccggtatcgccttcgatgacagcccggtgccggctaataaccgctctatctctattccggaccaggatcgcctgtggctgagcgcgggtaccacctacgcgttcaataaagatgcctcggttgacgtcggcgtttcatacatgcacgggcagcatgttgaaattaaggaaggcccgtataccttccgttccgaaggaaccgcctggctgtacggcgctaacttcaactaccgcttctga

SEQ ID NO: 137551 - DNA, 285 bp, Enterobacter cloacae
atgagtaaatgtagcgctgatgaaaccccggtttgctgctgtatggatgttggcacgattgttgacaacaccgactgcaccgcctcctacagccgcgtattcgccaaccgcgctgaagccgagcaaacgctcgccgcgttaagcgaaaaagcccgcaatgtcgaatctgagccgtgccaaattaacccaaccttcactgacgttgacggcggtgtgcagctggatatcgattttgttttcagctgcgaagcagaatccctgatcttccagctgggcttacgttaa

SEQ ID NO: 137552 - DNA, 1311 bp, Enterobacter cloacae
atgagtcaggcattaccgcttatcacccgtcagggcgatcgcattgccattgtcacggggctacgcacgccatttgctcgtcaggctacggcttttcatggcgttccggccattgatttaggaaaaatggtggttggcgagatgttggcgcgcagcgacattcctgccgaagtcatcgagcaactggtctttggccaggtggtgcagatgccggaagcgccgaacatcgcccgggaaattgtgctgggtaccggcatgagcgtacataccgacgcctatagcgtcagccgcgcctgcgccaccagtttccaggccgtggcgaacgtcgctgaaagcctgatggccggcaccatccgcgccggtattgccggcggcgccgactcctcctctgtcctgcccattggggtcagtaaaacgctggcccgcacgctagtggatgccaataaggcacgcacgctgagccaaaagctgaagctgttttcccgtctgcggccacgcgacctgctgccggtccccccggcggtggctgaatattcaaccggattgcggatgggcgataccgccgagcagatggcgaaaagctgggggatctctcgcgagcaacaggatgccctggcgcatcgttcgcaccagctggcagcgaaagcctgggaagagggtaaactgtccgcagaggtgatgaccgcctatgctccccctttccgcgaaccgctcgagcaggacaacaatattcgtaaaaattcaacactcgcagattatcagaagttacgtccggcctttgaccgcaaacatggcaccgtcaccgccgccaacagtacgccgctgacggacggcgcggcagcggtgatcctgatgaccgagtcgcgggctaaagagctggggctgaggccgctgggctatctgcgcagctacgcctttaccgccatcgacgtctggcaggatatgctgctggggcccgcgtggtccacgccgctggcgctggagcgcgctggcctgacgctggcggatctcacgcttatcgatatgcacgaagctttcgccgcgcagacgctggccaatctccagtgtctggcaagcgaccgctttgcccgcgaggtgctgggccgctcgcaggccaccggtgaggtagatgaaagcaagtttaacgtcctcggcggctctatcgcctacggtcaccccttcgccgccaccggcgcgcggatgatcacccagacgctgcatgagctgcggcgacggggcgggggatttggtttggtgacggcctgcgcggcaggtggtctgggtgcggcgatgatcgtggaggctgaataa

SEQ ID NO: 137553 - DNA, 2163 bp, Enterobacter cloacae
  misc_feature (1392)..(1401): n is a, c, g, or t
atggatactgtttccgcttttaagcttgaggtccgtgcggacaaaatcgcggtgatcaccattgatgccccgggtgaaaaaatgaataccctgaaagccgaatttggcagtcaggtacggggattgatacgccagttacgtgacgataagtcagtgcgcggcgtagtatttatctccgccaaagcggataactttatcgccggcgctgatatcaacatgattgcccgctgccgcagcgcgcaggaggcggaagcgctggcgcgccagggacagcagattatggctgagatccatggcctgtcgatcccggtgattgccgctatccacggcgcctgccttggcggcggtctggagctggcgctggcctgtcatggccgtatctgtagcgatgacgaaaaaacccgactcggcttgccggaggtacagcttggcctgctgccggggtccggcgggacgcagcgtttaccgcggctgatcggggtcagcaccgcgctggatatgatgctcaccggcaagcagctgcggccgcggcaggcgctgaaggccggtctggtggacgaggtggtgccgcaggcgattttactgcaggcggcggtggagttggcgctgaagggacgaccgaccagccgggaggtgcctgttcgtgaacgcgtactggcagggcccctggggcgccatctgttattccagtttgtcggtaaacaaacgcagcgcaaaacgcagggaaattacccggcggtgaagcgaatcttgcaggtcgtcgagaatggtctggcccatggctgcagcagcggatacgctgaagaggcgcgcgcatttggcgaactggcgatgagcccgcagtcgcaggcgctgcgatcgatcttctttgccagtaccgatctgaaaaaagaccctggcgccgaggcgggccccggttcgctgagaagcgttgcagtactgggcggtggcttgatgggcggggggatcgcctatgtgaccgcctgtaagggtgggctgccggtgcggattaaagatatccagccgcgtggcatcaaccacgccttaaagtacagctgggatctgctgaataaacaggttcgtcagcgtcgactgcgcccagtggagcgcgatcgtcagatggcgctgatctccggcactaccgactatcagggctttgctcatcgcgatgtggtgatcgaggcggtatttgaagacctggctctcaaacagcggatggtcagcgaagtggaacaatacggcgggccgcagaccatctttgcgtcgaatacctcatcgttgccaatcggcgatattgccgctcacgccagccgcccggggcaggtaatcggcctgcattttttcagtccggtggaaaaaatgccgctggttgaggtgatcccgcacaagggnnnnnnnnnncacaagggaaccgacccgcagactatcgccaccgtggtgcagctggctaaacggcaggggaaaacgccgattgttgtcgcagataaagcggggttctatgtgaaccgtatcctcgcgccgtatatcaatgaagcgatgcgcctgctggtggaaggcgaaccgattgaagtcattgataacgcgttggttaaattcggtttcccggtggggccgattcaactgctggatgaggtgggtatcgataccggcaccaaaattatccccgtgctggagggcgcgtttggagaacgttttagcccgcctgcaaacatcattgacgcgattttgaaggacgatcgcaaaggcagaaaaaataatcgtggtttctatctttatgagacaaaagggcgtaaaagcaaaaaacggcccgacccggcagtctatccgctgctcggcatcggccgcccgcagtcgcggctctccgcgcagcaggtggcggagcgctgtgtgatgatgatgcttaacgaagcggcgcgctgctttgatgagcagattatccggagcgcgcgcgatggcgatatcggcgccgtctttggtatagggtttccgccatttcttggcggcccgttccggtatatggatactatcggcgcgggtgaagttgccgcgatcctgcagcgcctggccgcccagttcggcccacgttttacaccctgtgacactttattacgcatggccgaacaggggaccaccttttggccagcggatgaacggctgacctaa

SEQ ID NO: 137554 - DNA, 552 bp, Enterobacter cloacae
atgaaaaagaagacatcgcttagcgaggaggatcaggcgctgttccgtcagctgatgaccggcacgcggaagatcaaacaggacactattgttcaccgcccgcagcgcaagaaaattaccgaggttgctcctaagcgtttgctgcaggaacaggtcgataacagccactatttttccgatgagtttcaaccgctactgaataccgaaggctcgacgaaatatgtccgccccgacgtcagccatttcgagctgaaaaagctgcgccgtggagattattcgccggagctgttcctcgatctgcatgggcttacccagcagcaggccaaacaggagctgggcgcgctaattgccgcctgccgccgcgagcatgtgttttgcgcctgcgtgatgcacgggcacgggaaacacatcctcaaacagcaaaccccgctgtggctggcgcaacatccgcatattatggcgtttcaccaggcaccaaaagagtacggcggtgacgccgcactgctgatattgattgaggtcgaggagtggcaaccgccggagctgccgtaa

SEQ ID NO: 137555 - DNA, 1005 bp, Enterobacter cloacae
atgctgatttatcgccgtcttcatggcacactagccgccgaatttatagcagagtgtgccctggaggatgtcgtggataaaatttttgttgatgaggcagtcaatgagctgcataccattcaggacatgctgcgctgggcggtaagccgtttcagcgctgctaatatctggtacggtcacgggactgataacccgtgggacgaggcggtacagctggtgctgccttcactgtatctgccgctggatatcccggaagacatgcgcactgcgcgcctgacctccagcgagaaacaccgcattgtagagcgggtgattcgccgcgtgaacgagcgtattcccgtcgcctatctgaccaacaaagcgtggttctgcggccatgagttttacgttgatgagcgggtgctggtgccgcgctccccgattggcgaactgatcaataaccagtttgccggactgattaaccataagccgcagcacatccttgatatgtgcaccggtagcggctgcatcgccatcgcctgcgcctatgccttcccggaggcggaagtcgatgcggtagatatctccccggacgcgctggccgtcgccgagcacaacgttgagtcccatggcctgatccatcacgttacgccgatccgttccgacctgttccgcgatctgccgaagctgcagtacgatctgatcgtcaccaatccgccgtatgtcgatgaagaggacatggccgatctgccggaagagtatgagcatgagccggtgctggggctggcctccggaagcgacggcctgaagctaacgcgccgtatcctcggcaacgcgccggattatctcagcgacgacgggattctgatttgtgaagtcggtaacagcatggtacatctgatggagcagtatccggacgtgccgtttacctggcttgagtttgataacggcggcgacggggtctttatgctgaccaaacagcagctgattgacgcccgtgcgcacttcggtatttataaagactaa

SEQ ID NO: 137556 - DNA, 1086 bp, Enterobacter cloacae
atggcaggaaatacaattggacaactctttcgcgtcactaccttcggcgaatcgcacggtctggcgctgggctgcatcgttgacggcgtgccgccgggcatcccgctgaccgaagccgacctgcagcacgacctcgatcgtcgtcgcccgggtacctcgcgttacaccacgcagcgtcgcgagccggatcaggtcaaaatcctctccggcgtcttcgaaggcgttactaccgggaccagtatcggtctgctgattgagaacaccgatcagcgttcgcaggattacggcgcgatcaaagatctgttccgtccgggccacgccgattacacctacgagcaaaagtatggtctgcgcgactatcgcggcggcggtcgttcttctgcgcgcgaaaccgcgatgcgcgtagcggccggggcgattgccaaaaaataccttgccgcgaagttcggcatcgtcattcgcggctgcctgacgcagatgggcgatattccgctggccatcaaagactgggatcaggttgagcagaaccccttcttctgtccggacccggataaaatcgacgccctggatgaactgatgcgcggcctgaaaaaagagggcgactccattggcgcgaaagtgacggtagtggctgacggcgtaccgccaggcctcggcgagccggtcttcgaccgcctggatgccgatatcgcccacgcgctgatgagcatcaacgccgtgaaaggggtggaaattggcgacggcttcgaggtggtgaagctgcgcggcagcgaaaaccgcgatgagatcaccaaagccgggttccagagcaaccacgccggcggcattcttggcggcatcagcagcggccagcagatcgttgccaacatcgcgctgaagcctacctccagtattaccgttcccggtcatacgattaaccgctttggcgaagaagtggagatgatcaccaaagggcgtcacgatccgtgcgtcggcatccgcgccgtaccgatcgctgaggcgatgctggcgatcgttctgatggatcactttatgcgtcagcgcgcgcagaatggcgacgtgacgacgacaattccacgctggtaa

SEQ ID NO: 137557 - DNA, 531 bp, Enterobacter cloacae
  misc_feature (51)..(60): n is a, c, g, or t
ttggcgacatggggatgccggcgggcgggcgctttaacggcgggcacgccnnnnnnnnnngtcgatatcttcctccagctgccgcaaacgcgctggacatcgtcccagctgttgaagccgcaggcgctggacctggtcgccagcgatggcaagcatgtggtgccgtcgctatggagcccgcaaatcagccagcttatcaagctggcggcggaagatagcgaagttacccgcatcttcgtcaacccggcgattaaacagcagctgtgcctggacgcgggcagcgaccgccagtggctgcgtaaagtccgtccctggttccagcatcgcgctcatatgcatgtccgactgcgttgcccggcgggaagtctggagtgcgaggatcaggcgccgccgccgcccggcgatggctgcggagcggagctgcagagctggttcgaaccacctaaacccgggtctaccccccctgtgaagaagacgccgccgccgctgccgccttcctgccaggcgctactggatgagcatgtgctgtaa

SEQ ID NO: 137558 - DNA, 810 bp, Enterobacter cloacae
atggatagttttatcgagttgtttgccgtatcgccgctggtgctggtggtactcttctttgtcgccatcctggccggttttattgactcactggcgggaggcgggggcttattgactgtccctgcgctgatggcggccggcatgccgccagcccaggcgctggcgaccaataagctgcaggcctgcggcgggtcgctatcggcgaccctctattttgtccgccgcaaggtggttaatctggccgatcagaagctgaatattctgatgacctttatcggctcaaccgccggagcgctgctggtgcagcacgtgcaatccgatattctgaagcagatcctgccgttgctggtgattggcatcggcctttatttcctgctgatgccgaaactgggcgaagccgaccggcagcgtcggctttacggtctgccgtttgcgctggtcgccggcggtagcgtagggttttacgatggctttttcggccccggcgccggttcgttttacgccctggcttttgtcactctggccgggtttaaccttgccaagtcgacggcccatgccaagctgctgaacgccacctcaaacgtcggcggcctgctgctgtttatcatcggtggaaaggttatctgggctaccggctttgtgatgatggccggccagtttattggcgcccgtgccgggtcccggctggtgctgagtaaagggcagtcgctgatccggccgatgatcgttatcgtctcggcggtgatgagcgcgaaacttctttatgacagccacggtgctgagattttgcagtggttgggaattcattaa

SEQ ID NO: 137559 - DNA, 549 bp, Enterobacter cloacae
atgcaacagcaacaccattatcagcagctgatagaccttttcgacagctgctttgccgaagaatttaatacccgcctgattaaaggcgacgatgagccgatctaccttccggctgacgatgaaacgccctatcaccgtatcgtgtttgcgcacggattttttgccagcgccctgcacgagatctctcactggtgtgtcgccggcaaggcgcgtcgcgaacaagtagattttggctactggtactgcccggacggccgcgatgcgatgacccaaagccagtttgaggatgtcgaggtgaaaccgcaggcctttgagtggctgttctgcgtggcggcgggatttccgtttaacgtcagctgtgacaatctggaaggggacgttgagcccgatcgcatcgccttccagcgccgggtgcatgctcgggtgatggctttacttgaacaagggatccccgaacgtccggcgcgctttattcgcgcattacaacactattatcaaacgccgccattgacggcggaacactttccgtggccggaagacctgcactaa

SEQ ID NO: 137560 - DNA, 282 bp, Enterobacter cloacae
atgatcgcggagtttgaatcacgcattctggcgctgattgacaacatggtagaccacgccagtgatgatgaactgtttgccggcggttatctgcgtggccacctgacgctggcggtggctgagctggaaggtgagggcgagcattctgctgacgcggtacacagcagagttagccagagcctggagaaagccatcagcgctggcgaactgtcgccgccggaccaaattctggtgcaggggatgtggcataacctgtatcaacaggcgaaaaatcaggcctga

SEQ ID NO: 137561 - DNA, 891 bp, Enterobacter cloacae
atgctggcgctgaatttacccccggacatcgcctgcgcggtgacggcggaacaggttgccgggctgaccggcgtcgataccggctgcggcggcatcacctatccggccggcggctggctgtgcccgcagcagctcaccgccgagctgctggcgctggcggccacgcgcggactgcacgtgcactatggttatcccgtcgaaacgctcagcgcggagggcgatggctggctgctcaatcagcagcgctatcatcaggcggtggttctggcgaacggccaccgcatcactggttttgcgcaaaccgcccaactgccggtctacccggttggcggccaggtcagccatattcccaccaccccgcggcttgccgccctgcgccaggtgctgtgctacgacggctacctgacgccacagaatccgcaaaatcagcagcactgcattggcgccagctaccaccgcgggaaaaccgacaccaccttcagcgaagaagatcagcagcacaaccggcaacggctgatcgactgcttcccgggcgcggagtggccgcaggacgtggatatcagcgccaacgacgctcgctgcggcgtgcgctgcgccacccgcgatcatctaccgatggtcggcaacgtgccggactacgcggcaacattgacgcaatacgccagcctccacgcacagccggatatcgccgatagcgcgccggcctatcgtaacctgtttatgcttggcgcgctcgggtcgcgcggactttgcaccgcgccgttaagcgctgagctgctggcggcgcaaatgagcgcggaaccgctgccgctggatagcgacaccctggcggcgctgaatccgaatcggctgtgggtgagaaaactgctgaagggaaaagcggtgaaataa

SEQ ID NO: 137562 - DNA, 360 bp, Enterobacter cloacae
atgcagatcgcttccgcgggcgccgtcgcgatcgccaaagatgcgctgcgtccacgggccatcgctgcccagcggccggtagtaaatggtcagatggtcgacgaaagtggggcccagctgcagccaacgcggctccccggcaaaccacgtgcccggcagctcgctgcgcagccaccaggtttttcgcgaataaccaaaggaggggatctgccgggcggtggcgagctggtctgcgggcagggcggcaaagcgatcgagggtcatctggccactgtcgtcggcgtaccactggaccgtaatatcaatccccacctggcgcgtcgccgcctgcgcctgcggggcgaccagcagcaagagtaa

SEQ ID NO: 137563 - DNA, 1335 bp, Enterobacter cloacae
  misc_feature (1265)..(1274): n is a, c, g, or t
atgtttattggttttgactacggcaccgccaactgttcggtggccgtgatgcgggaaaataccccccagctgttaacgctggaaaacggcagcgccctgctgccctccatgctctgcgcgccgacgcgcgaagcggtcagcgagtggctctatcgccatcatgatgtccccacccacagcgacgaaaaccaggcgctgctgcgtcgggccatcgccgccaaccgcgacgaagacatcgaggtgctgcgcaacagcgtgcagttcggtctcgcctccctgcagcagtatgttgaagatccagaagaggtctacttcgttaaatcgcccaaatccttcctcggcgccagcgggctgaagccgcagcaggtggccctgtttgaagacctggtctgcgccatgatgctgcatattaagttgcaggccgaaagccagctgcccgagcagatcgacaaggcggtgattggccggccgattaacttccagggcctcggcggcgatgaggcgaacgcccaggcgcaggggatccttgagcgggccgcccaccgcgccggtttccgcgatgtggtctttcagtttgaaccggtggccgccgggctcgatttcgaagcgaccctcagtgaagaaaagcgggtgctggtcgtcgatatcggcggcggaaccaccgactgctccctgctgctgatgggcccgcagtggcgggagcgcgccgaccgccagcagagcctgctcggccacagcggctgccgcatcggcggtaacgatctcgacattgccctggccttcaaatgcctgatgccccttctcggcatgggcggcgaaacggaaaaaggcaccgcgctgccgatcctcccgtggtggaacgcggtggcgatcaacgacgtgccggcgcagagcgatttctacagcactgccaacggccgcctgctgaacgatctgctgcgcagcgcccgggatgccgacaaggtggctctactgctgaaggtctggcgccagcgtcttagctatcgtctggtgcgcagcgccgaagagagcaaaatcgctctctccagcgccgccagcgtcgaaaccgcgctgccgtttattcaggacgatctggccaccgccatcgcccagcagggtctggaagccgcgctggatcagcccctgactcgcattatggaacaggtgcggctcgcgctcgacagcagccagaccaccccggatgtgatctatcttaccggcggcagcgcccgttcgccgctgatcaaaaaggcgctggccgctcnnnnnnnnnncgatgattttggctcggtgaccgccgggctggcccgctgggcgcaggtggttttccgctag

SEQ ID NO: 137564 - DNA, 849 bp, Enterobacter cloacae
atggtgctgttaccctggaccccgccctatgactgggcgtggatggttggttttctgcaggcgcgcgcggttgccggcgtcgagcgttttcacgatgggggctacagccgcagctttggcgtggaaggccaccgcgggctgattcatctggcgccggacgaagaggcgcagggcctgcgggtgaccctttcccccgggctgcagccggtggcggagatctgctatgcgcgaattggccagctgtttgatttagcctgcgacccgcggcaggtcgctcgcacgctgggcgacctggcgcaggcgcggccggggctgcgcctgccgggggcgctggatgccttcgagcaggcggtgcgcgcggtgctgggccagctggtgagcgtggcgatggccgcccggctcaccgccaaagtggcggctggctggggcgaaccgctggcggaggcgcctggatatgttttgttcccgacgccagaggtcctgtcccaggccgatccgcaggcgctgaaggcgctggggatgccgctgcgacgcgcggaggcgctgatccacctcgcccgggcggcgctcagcggcgagctgcccctgacggcgccggcggatattgacgccgggttgcgtcaactgcagaccctgcctgggattggccgctggacggcaaactactttgccctgcgcggctggcaggcgaaagatatctttttgccggatgattacctgattaaacagcgctttccaggaatgaccccggccgccatcgcccgctatgcccgccgctggcagccgatgcgatcctacgcgctgttgcatatctggtataccgatgactgggcgccggcggcggaatag

SEQ ID NO: 137565 - DNA, 642 bp, Enterobacter cloacae
atgactgatatgtcccatcagtgcgtcattgtaggcatcgccggcgcatcggcttctggcaaaagtcttatcgccagtactctctatcgcgaattgcgtgaacaagttggcgacgaacatattggcgtcattccggaagacagctattacaaagatcaaagtcatctgtcgatggaagagcgcgtcaaaaccaactatgaccacccgagctcaatggaccacagtctgttgttccagcatttgcagatgctgaaaagcggccagccgattgaactgccggtctatagctacgtcgagcatacccgcacgccgaacaccattcacgtcgagccgaagaaggtgattatccttgaagggatcctgctgctgaccgatgcgcgcctgcgtaacgagctcaacttctctattttcgttgacacccctctcgatatttgcctgatgcgccgtattaagcgcgacgttaacgagcgcggccgctccatggactcggtgatggcccagtatcagaaaaccgtgcgcccgatgttcctgcagtttattgaaccgtcgaagcagtatgccgacatcatcgtgccgcgcggcggcaaaaaccgcatcgctattgatattctgaaggccaaaatcagtcagttctttgaataa

SEQ ID NO: 137566 - DNA, 582 bp, Enterobacter cloacae
atgcgtctgtgtgaccgagatatcgaagcctggttggatgaagggcgactcgccatcaatccgcgtccgcccgttgagcgtattaatggcgcgacggttgatgtacggctgggtaataaattccgcaccttccgtggccacacggcgccgtttatcgatttaagcggcccgaaggccgaggtcagcgccgcgctggaccgcgtgatgagcgaagagatcgtcctgccggaaggggaggcctttttcctgcatccgggcgaactggcgctggcggtgacctacgagtctgtcaccctgcctgccgacctggtaggctggctggacggacgctcctcgctggcgcgcctggggctgatggtgcacgttaccgcgcaccgtatcgatccaggctggtccggctgcatcgtgcttgagttctacaactccggcaagttgccgctggcgctgcgcccggggatgcccatcggcgcgctgagctttgaaccgttatcgggcccggcggcccggccgtataaccgccgtgaagacgccaaatatcgcgaccagcagggcgcggtggcgagccgaatcgacaaggattga

SEQ ID NO: 137567 - DNA, 1848 bp, Enterobacter cloacae
atgagacgaatactgacaacgctgatgatcctgctggcggtcattgtcgccgggcttacctcgttggtattgctggtcaatcccaacgattttcgcgcctatatggtgcatgaggtggcagagcgcagcggttatcagcttgaccttgatggcccgctgcgctggcacgtctggccgcagctcagcattctcagcggacggatgacgctgaccgcccgaggcgccgaagagccggtgatccgcgccgacaatatgcgcctcgacgtggcgctgctgccgctgctctcgcatcagctgcaggttaagcaggtgatgctcaagggcgcggtgatccagctgaccgcgaaaaccgaggcggttcgcgacagctcagcgccggtggtgccgcatgacaacaccctgccgctggccccggaggatcgcggatggtcctacgatgtgcgtcagctgcaggtggccgacagcgtgctcttcttccagcacgagaacggcgagcaggtgaccgtgcgcgatatccgtctgcagatggagcaggatgagaatcaccgggccaccgtggatttctccggccgggtgaaccgcgaccagcgcgacctggcgctgaacttctccgccaccgtgcagggcggcgattatccgcactccttaaaagccgactttacccagcttagctggcagctgcgcggcgccgagctcccaccggacggcattaatggtcaggggagtctgcaggccagctggcaggaagatgacaagaccctgcgttttgacaacctgaatctgatggctaaccgcagcaccgttaccggcagcggcagcgtggtgctgggggatcgcccggactggtcgctggatttgcacgccaccactctcgatctcgatagtctgttggcgcaaaggtcgccggcgacggacagtagcgccagtcagcagggccagagtcagacgcgaccgctgcgcccggtgatcgccgacagcgatgagcgcgaagattaccagagcctgcgcggcttcaacggccgaatggccctgagcgccgaccagctgcagtggcgcggtctgaacttcacccaggtgcagagcgaaatcagcaaccagcaggggctgctgacggtcagcaaaatgcagggcaatcttgacggcgggcagctctctctccctggcacccttgatgcccgcggcgacacgccgctggcgacgttccagccggcgctgcagaatgtggagatcggttcgctgatcaaggccttcaactattccttaaacctgaccggcaagctgtcgctgagcggcgaattttccggaacgcgcattgacgccgatgatttccgtcgccactggcagggacaggctcagctccagatggccgatacccgcaccgaagggctgaacttccagcagctggtgcagcaggccgtggagcgcagcaccaacgtgcgggcgcaggaaaattacgacaatgccacccgcctggattccgtgagcagccggctgatgctggataacgggctggtgacgctgaaccgcctgcaggggcagtccgacgtgatggcgatgaccggcgaaggacagctcgatctgcagaaagagaactgcgatatgcgcttcaacgtgcgcgtgctcggcggctggaaaggggagggcaagcttatcgaccgcctgaaacagaccgctatcccgctgcgcatctacggcgagtggcagtcgctgagctacagtctgcaggtcgaccagatcctgcgcaaacagctgcaggatgaagcgaagcagcgcctcaacgactgggttgagcgtaataaaggcagcaaagacggcaacgatgccaaaaagctgcttgataagctgtaa

SEQ ID NO: 137568 - DNA, 1584 bp, Enterobacter cloacae
atggaatggattgccgatccgtcaatctgggcaggtctcgtcacgctggtggttatcgaactggtgttgggtatcgataacctggtctttatcgctatcctcgccgagaaactccctcccgcccagcgcgaccgcgcgcggatcactggcctgatgctggcgatggtcatgcgtcttctgctgctggcctctatctcctggctggtcaccctgaccaaaccgctgattgtttttcacgacttcagctttagcgcccgcgatttaattatgctgtttggcggcctgtttctgctgtttaaagcgaccgtcgagcttaatgagcggctggaggggaaagacagcgataaccccacccagcgcaaaggggcgaaattctgggccgtcgtggcgcagatcgtggtgctcgacgccatcttctcgcttgactcggtgatcaccgccgtcggcatggtcgatcacctggcggtgatgatggccgccgtggttatcgccatcagcctgatgctgatggccagcaaggcgctgacgcgcttcgttaacagccacccgaccatcgtgatcctctgtctgagcttcctgctgatgatcggctttagtctgattgctgaaggcttcagctttattattccgaaaggctatctatatgcggccattggcttctcggtcatgattgaagcccttaaccagctggcgcagtttaaccgccgtcgcttcctctccgccaatatgacgctgcgtcagcgcactaccgaagcggtgatgaatctgctgagcgggcagaaagaaaaagctgaactggatgctgacacggcgtcgctggtcgccgatcaggatcaacatccactgtttaatccgcaggaacgactgatgattgagcgggtgctgaaccttaatcagcgcagcgtcagcagtattatgacgtcgcgccatgatatcgagcgcatcaacctcagcgcgccggaggaagagatccgcagcctggtggagaaaaatcagcatacccgtctggtggtcaccggcgggaaagataatgaagatctgctgggggtggtgcatgttattgacctgctccagcagtccctgcgcaaggagccgctggatctgcaggcgctggtgcgtcaaccgctggtcttcccggagggcctgccgctcctctcggcgctcgagcagttccgccaggcccgcacccattttgcctttgtggtcgatgagtttggctccgtcgaggggattgtgaccctcagcgacgtgatggagaccatcgccggcaatctgcccaatgaggtggaggagatcgatgcccggcacgatattcagcatcatcaggacggttcatggacggtcaatggccatatgccgctggaggacctggtgcagtacgttccgctgccgctggatgataaacgtgagtatcacaccgttgccggtctgttgatggagtatttgcagcatgtgccgcaggtgggggagaccattgagattgacggttatacgctgcgcacgctgcaggtcgacagccatcgggtgcagaaggtgcagatcgtcccgccggtaaagcaggatgagctggattatgaggtgtaa

SEQ ID NO: 137569 - DNA, 897 bp, Enterobacter cloacae
atgaatatggcgaatttgaaagcggttattccggtcgcaggactaggcatgcatatgctgccggccacaaaggcaattccaaaggagatgctgccgatcgttgataagccaatgattcagtatatcgttgacgaaatcgtcgccgccgggatcaaagagattgttctggtgacgcactcctcgaagaatgcagtggaaaaccacttcgacacctcctacgagctggaagccctgctggaacagcgcgtgaagcgccagctgctggcggaagtgcaggccatttgcccgccaggcgtgaccatcatgaacgtgcgtcaggcgcagccgctgggcctgggccactccatcctctgcgcccgcccggtagtcggcgacaacccgtttgtggtggtcctgccggatatcatccttgacggcggcaccgctgacccgctgcgctataacctcgccgctatgatcgcccgctttaacgagaccggccgcagccaggtgctggcgaaacgcatgctgggcgatctctccgaatactccgtcatccagaccaaagagccgatggtggctgaaggccaggtagcgcgtatcgtcgagtttattgaaaaaccggacgaaccgcagaccctggactccgatctgatggcggtggggcgctacgtgctgtcggcggatatctgggccgaactggaacgtaccgagccgggcgcatggggccgtatccaactgaccgacgccattgccgaactggcgaagaagcagtccgtcgacgcgatgctgatgaccggcgaaagctacgactgcgggaagaaaatgggctacatgcaggccttcgtcacctacgggatgcgtaacctgaaagaaggcgccaaattccgcgaaagtattaaaaaactgctggcctga

SEQ ID NO: 137570 - DNA, 630 bp, Enterobacter cloacae
atgaactggcaactcatctcattttttggcgatagcaccgttttgctgcccagcgcagcggcgctgtttattgtcctgatgctgcgtaaaacgtcgcggttgctggcgtggcagtggagtttgctgttcggcatcaccggcgctatcgtctgcgcctctaaactggcctttatgggctggggtctgggtattcgcgagctggattacaccggcttcagcggccactccgcgctctccgcggccttctggcctatcttcctgtggctgctcagcgcccgtttctccgtcggtctgcgtaaagcggccgttattaccggctatgttctggccgccgtggtgggctattcgcggctggtcatccatgcgcattccgtctcggaagtgattgccggcctgctgctgggcgctgctggcagcgctttgttcctggtgttgcaaaaacgtacccctgatccggaaagcgtgcatatttcatggggcggtgttgcatgcctggtgatggttccgcttatccttttacatagcggcagcaaagcgccgactcagtccctgctgggacaaatcgccaccgcggtggggccgctggataaaccctttacgcgtaccgatctccacaagcaggcctggtaa

SEQ ID NO: 137571 - DNA, 1434 bp, Enterobacter cloacae
atgataaaaattgcgcgcattgccgtgacgttgggtttgctttcctcactgggagcccaggcttacgcggccgggttagtggtaaatgacaacgacttacgtaacgacctggcctggctttccgatcgcggggtcatccatctgagcctgtcgacctggccgctgagccaggaagagattgctcgggcgctaaagaaggccaagccgtcttattcttctgagcaagtagttctggcccgtatcaaccagcgactgtctgccttaaaagcggatttccgggtcaccggctacacttcaaccgatcagccgggcacaccgcaggggtttggccagacgcagccggcggataactcgttaggcctggcgttcaacaacagcggcgagtggtgggatgtccatctccagggcaatgttgaggggggagagcggattagcaacgggtcgcgcttcaatgccaacggcgcctatggcgcggtgaagttctggaaccagtggctctcctttggccagataccacagtggtgggggcctggctatgaaggtagtttgatccgcggggatgcgatgcggccgatgaccggcttcctgatgcagcgagccgagcaggcggcgccagagacctggtggttacgctgggtggggccatggcagtaccagatctccgccagccagatgaatcaatataccgctgtgccacacacgaaaattatcggtggccgtttcaccttcacgccgttccagtcactggaattaggcgcatcacgtattatgcagtggggtggggaagggcgtccgcaatctttgagtagtttctgggacgggttcaccggacaggataatacagggacagataacgaaccggggaaccaactggccgggtttgacttcaagtttaaactggaaccgacccttggttggccggtgagtttttacggacagatgatcggcgaggatgaggctggttttcttccttcagcaaatacattccttggtggggtggaagggcaccacggctggggtaaggatgcggtaaactggtacgttgaggcccacgatacaagatctaatatgagccgtactgactacatttacacgcatcatatttacaaggatggttactaccagcagggatatccgttgggggatgcgatgggcggggatggtcaactcattgccggtaagattgaacttattacagaagataaccagcgctggagtacacgcctggtttacgccaaagttaacccggagaatcagtcgattaataaagcattccctcatgctgataccttgaaaggagtacagcttggctggagcggggatgtttatcagtcggtccgcttgaatacatcactgtggtacaccaacgcgaacaacagcgacagcgacgacgttggggccagcgcagggatagaaataccatttagtttataa

SEQ ID NO: 137572 - DNA, 204 bp, Enterobacter cloacae
gtgttagccattacttccctgcaggcttatggagagaaaaaaactgaccgcgtcctgcagcgctaccaccctttctcccctattttcagcattcagccttataaactaaatggtatttctatccctgcgctggccccaacgtcgtcgctgtcgctgttgttcgcgttggtgtaccacagtgatgtattcaagcggaccgactga

SEQ ID NO: 137573 - DNA, 882 bp, Enterobacter cloacae
gtgcagtaccggggccagctgtacgtcccggtgttaaaaaactacaccgagcaaaccttcggcggcgcgttcgccaccgccgccgactatcaggatccctggctgcagcagcagctggcgactcacggctgggcgctatggccgccagtacgcttcggcgcgacgacaattaattttgccagcacggttccctttccatcgccgccctcagccagcaactggctcggcaccgacgccaacggcggcgatgtgctggcgcggatcctttatgggacacgcatctcggtgctcttcggtctgctgctgacgctgttctccagcgtgctgggggtgctggccggagcgatacagggttactacggcggtaaaatcgacctgtgggggcagcgctttatcgaagtctggtccggcatgccaacgctgttcctgatcatcctgctctccagcgtcgtgcagccgggcttctggtggctgttggcaatcaccgttctctttggctggatgacgctggtgggcgtggtgcgcgcggaatttctccgcacccgcaactacgactatgttcgggcggcgcaggcgttaggggttagcgaccggcagatcatcctgcggcatatgttgcccaacgcgatggtggcgaccctcaccttcctgccctttatcctgtgcagctccattaccaccctgacgtcgctggattttctcggcttcggcctgccgctcggctcgccctccctcggcgagctgctgctgcagggcaaaaacaacctgcaggcgccctggctgggcattgccgcatttctctccgtcgccgtgctgctgacgctactgatttttatcggtgaagcggttcgcgacgcctttgacccgagtaaggcggtgtaa

SEQ ID NO: 137574 - DNA, 1590 bp, Enterobacter cloacae
atgacccacccgctattagctatcgacaatctctctattgcctttcgccagcacggcgagacgcagaccgtggtgcataatctgtcgctcgaggtggcggtcggcgaaacgctggccctggtgggcgaatccggctccggtaagagcatctccgccctgtcggtgctacggttgctccctaccccgccggccagctaccccagcggtgacatccgttttcatggccagtcgctgctgcatgcggatgaggcgaccctgcgcggcgtgcgcggcaaccggatcgcgatgatctttcaggaaccgatggtatcgctcaatcctctgcacaccctggaaaaacagctctacgaggtgctgtcgttacaccggggaatgcgcaaacaggcggcgcgcggggagatcctcgactgcctggagcgcgtcgggatccgtcaggcgccgcggcggctggcggactatccgcatcagctctccggcggcgagcgccagcgggtgatgatcgccatggcgctgctgacgcgcccggagctgctgatcgccgacgagccgactaccgccctggacgtatcggtgcaggcgcaaattctgcaactgctgcgcgagctgaagcaggagctgaacatggggctgctgtttatcactcataacctgagcatcgtccgccagctggctgaccgggtggcggtaatgcagaacggccgctgcgtggaacacaatgactgtcgggcgctgttcagcgcgccagcgcatccctacacccaacgcctgctggatagcgagccggacggggagccggtgccgctggccgccgatgccccggtgctgctgcaggcggacgatttaaaggtggcgtttcccgttcgcaaagggatcctgcgtcgggtggtcgatcatcatcgggtggtcaacagcctcagctttcatctgcgcgccggcgagacgctgggcctggtgggggaatcgggttccggtaaaagtaccaccggcctggccctgctgcgcctgatcccgtccgggggcaagataaccttcgccggccagccgattcaggggcgtaaccgccgacagctgctaccgctgcgccgacagatgcaggtggtttttcaggatccgaactcgtcgctcaatccgcgcctcacggcgcagcagatcattgaggaaggcttgcgcgtccaccagccgacgctgacggcggccgaacgcgaacaggcggtgatccttgccatgcaggaggtcggcctcgacccggccagccgccagcgctatccggcggcgttctccggtggccagcgacagcgtatcgccatcgccagagcgttgatcgtcaaaccgcagctgatcgtcctcgatgaaccgacctcatcgctggacaaaaccgttcaggcgcagatcctgaagctgctgaaagccttacagcgaaagcatcagctggcctatatttttatcagccatgatttaggcgtggtgcgggcgctgtgtcaccaggtgatggtgctgcgtcagggagaggtggtcgaacagggcgagtgcaagtccgtcttcagcgcaccccggcatgagtatacccgccagctgctggcgctaagctga

SEQ ID NO: 137575 - DNA, 345 bp, Enterobacter cloacae
gtgaatacacaacaactctctatcgtacaccgtctgccgcagagctatcgctggctggccggttttgcgggttccagagttgaaccgattccgcaaaacggcgcgcagaacgagaacagtctcgttgccctgaaattgctgagcccggacggtgagaaagcctggccggtgatgcataagctcagccaggcgttaagcgacatcgaagtcgactgttccgtgctggagtgcgaaggcgaaccctgcctgttcgttaacctgcaggatgagtttgccgccacctgtcgtctgaaaaactttggcgtggccatcgccgagcccttctccggcaataaccctttctga

SEQ ID NO: 137576 - DNA, 1197 bp, Enterobacter cloacae
gtgacgctgaagcagaattcttcactggggattgtgtttatccttggcctgctggccatgctgatgccgctgtctattgatatgtatcttccggccctgccggtgattgccgcccagtataacgtcccggacggcagcgcgcagatgacgctcagcacctatatcctcggctttgcgctgggtcagctgctgtacggcccgatggcggacagccttggccgcaagccggtgatcctcggcgggacgctggtcttcgcggcggcggcggtagcctgcgccctgtcgcaaaccgtcgatatgctgattgtcatgcgtttcttccacggactggcagccgcggcggccagcgtggtgattaacgccctgatgcgcgacatctatccgaaagatgagttttcgcgcatgatgtcgtttgtcatgctggtcacgaccattgcgccgctggtggcgccgatggtcggcggggcggtgttggtctggttcagctggcatgccatcttttggatcctcgccctggtggccctgctggcctcgctgatgatcggcctgtttatccgcgaaacgctgccggctgaaaggcgtcagccgttccatctgcgcaccacgctgggtaactttgccactctgttccgccacaagcgggtactgagctatatgctggcgagcggctttagcttcgcgggcatgttctctttccttagcgccggtccctttgtctacatcaatataaaccacgtcgcgcctcagcactttggctactattttgcgctgaacatcgtttttctgtttctgatgaccatgttcaacagccggtttgtgcggcgggtaggggcgttgcgtatgttccgcgccgggctgtggatccagtttgccatggcggtgtggatggtggtctgcgcgctgctggatgtcggcttctggtcactagtgatcggcgtagcggcctttgtcggctgcgtatccatggtgtcgtctaacgccatggcggtgatcctcgatgagtttccgcatatggcgggcactgcttcgtcgctggcggggactttccgtttcggtatcggggcgattatcggcgcgctgctgtcgatggcgacgtttaccaccgcctggccgatgctgatctctattgccttctgcgcaacctgctctattttcttctcgctttacgcatcccggcggcgaaaaatcgcacgctag

SEQ ID NO: 137577 - DNA, 720 bp, Enterobacter cloacae
atgcgacttgataagtttatcgctcagcagctgggcgtcagccgggctattgccgggcgtgaaattcgcggcagccgcgttaccgtggacggcgacattgtgaaagatgcctcttttaagctccagccggagcacgaggtggagtatgacggaaatacgctgacccagcagaatggcccgcgttattttatgctcaacaagccgcaagggtacgtctgttccaccgacgatcccgatcatccgactatcctttatttcctcgacgagccggtggcgcataagctgcacgccgccggacggctggatatcgacaccaccgggctggtgctgatgaccgatgacggccagtggtcgcatcgcattacctcgccgcgccaccactgtgaaaaaacctatctggtggcgctggaaagcccgctggcggaagggaccgcggagctgttcgccaaaggcgttcagctgcataacgaaaaagatctcaccaaaccggcgttgctggaagttatcactccgaccgaagtgcgcctcaccatcagcgaaggccgctaccatcaggtgaaacgcatgttcgccgccgtgggcaaccacgtggttggcctgcatcgggaacgcatcggcgacatcctgctggatgaatcgctggcgccgggtgaatatcgtccgctgacggaagcggaaatcgccagcgtgggcgccccgcagccacggagtaaaacgtga

SEQ ID NO: 137578 - DNA, 1758 bp, Enterobacter cloacae
atgacttttacattacgtccttaccaacaagaagccgtcgatgccaccctcgcctggttccgtcgccataccgagccggcggcgattgtcctgcccaccggcgcgggcaaaagtctggtgatcgccgagcttgccaggctggcgcgcggccgcgtgctggtgctggcccatgtcaaagagctggtggcgcagaaccatgccaaatactgcgcccttggcctcgaggcggatatcttcgccgccggtctgcagcgaaaagagagccacggcaaagtggtgttcggcagcgtgcagtcggtggcacgcaatctcgaccagtttcgcagcgaattttcgctactcatcgtcgatgaatgccaccgcatcagcgatgatgacgacagccagtatcagcagatcatcggtcacctgcggcaggtcaatccgcagatccggctgctcggcctgacggccacgccgttccgccttggcaagggctggatctatcagttccattatcatgggatggtgcgcggcgatgaaaaggccctgttccgcgactgcatctatgagctaccgctgcgctatatgattaaacacggctatctgacgccgccggagcgcctcgatatgccggtggtgcagtacgatttcagtcgcctgcaggcgcaaagcaacggcctgttcagcgaagccgatcttaaccatgagctgaaaaaacaacagcgtatcacgccgcatatcgtcagccagatcgtggagttcgccgaaaaccgcaaaggggtgatgatctttgccgccaccgtggaacacgcccgggaagtgaccggcctgctgccggtaggccaggcggcgctgatcaccggcgaaacgcctgggccggagcgggatcgcatcatcgaggcctttaaagcgcaggcgtatcgctatctggtgaacgtcgcggtgctgaccaccggctttgacgccccgcacgtcgacctgatcgccatcctccgccccaccgagtcggtgagtctttaccaacagatcgttggccgcggtctgcgcctggcgccggggaaaaccgactgtctgatcctagactacgccggcaatccgcatgacctgtacgccccggaagtggggacgccgaagggcaaaagcgacaacgtgccggtgcaggtcttctgcccggcctgcggcttcgccaataccttctggggcaaaaccaccgccgacggcaccttgattgaacactttggccgccgctgccaggggtggttcgaagatgacgacggccaccgcgaacagtgcgacttccgctttcgctttaaaaactgcccgcagtgtaatgcggaaaacgacatcgccgcccgccgctgccgggagtgcgacactatactggttgacccggacgatatgctgaaggcggcgctgaaactgaaggacgcgctggtgctgcgctgcagcggcatggccctgcagcacggcggcgacgagaagggcccgtggctgaaaatcacctactacgatgaagacggggcggatgtcagtgagcgcttccgtctgcagacccccgcccagcgcaccgccttcgaacaactgtttattcgcccgcatacccgcacccccggggtgccgctgcgctggataacgccggctgatatcgtgacccagcaggcgctgctgcgccatccggactttgtcgtcgcccgcatgaaggggcagtactggcaggtgcgggaaaaagtgttcgattatcaggggcgttttcgtcgcgccaacgagctgcgttaa

SEQ ID NO: 137579 - DNA, 285 bp, Enterobacter cloacae
atgtttactatcaacgcagaagtacgtaaagagcagggtaagggtgcgagccgccgcctgcgcgcagctaacaagttcccggcaatcatctacggtggcgaagctgctccggttgctatcgaactggaccacgacaaagtatggaacatgcaggacaaagctgagttttacagcgaagttctgaccgtcgttgttgatggcaaagaagaaaaagtcaaagttcaggctgttcagcgccacgcgttcaagccgaaactgactcacatcgacttcgttcgcgcgtaa

SEQ ID NO: 137580 - DNA, 888 bp, Enterobacter cloacae
atgaaaaccctacagtattcattcgcacagattgaagccttcgcgacgattgctgagaccggcagcctgtcgcaggcggccattcgtttagctaaagaccggaccacgctgcgcgatctgctggactatctggaagatgcgctgggctaccggctgttcagccgtgaaggacgtagcctgacgctaactgccgagggcgagcagctgtttcgccaggcgtatctgctgttgcgtcaggcgcagtctttcgagtcttttgcgcaaacgctgccgcaaaccgccgggcaggcgctgcgtctggtgtacgatcccttcgtgccgcgtgaatttctctgtgcgctggccgataacctggcccgacggcagatccgcctgagctgctggagcgcctcgcgtcgcgaagccgagcaggcgctgagcgatggcgtggcggagatggcgatatgtcaggctaacaaccgcacgctggggagcgaaatggagtggcgggcgctcggcaccgtggatctgcgtttctacgcggcggacagcctgttccacgacgctccgcggccgctgacgctattgaatctttcgttgacgccgcagttagtgatgcacaggcgcagtgacgatcaaatcgcccgccggctgcagatttccggccatacgctgtatatgaatgaaattaccctgttgcgccatgcgctggagcaggggaggggctgggggtttttaccggaccatttgcggccaggcgagtggcagggagtcagtgaaatcgcgacggaggtcggcagtcaggggctgaacgtcactatggtgatgctctggctgcccggaatgaataagcatcggatgcttagcgacatcgtgcacgaggcgccggagctttggctgcgcagataa

SEQ ID NO: 137581 - DNA, 1287 bp, Enterobacter cloacae
atgataagaaaaccactggccctggcgttaatattggcggcgctgccggcggcggcaatggcgcaacactgcggcagcctgacgctggatgtctgcccaacgccttacgatcaaacgctacccgcggccaaagacatgctcagctgggatcagacttcacgcgtgattggctttcgcaatgactatcgcaactatgccggcgatgtcttccgccacggcgcctcgacgccgctggagcgcgctgaaaaacaactgaccgatgcccgctatacgctcaacggccacacctggaatttgcaggattacctgaagcgcgagaacgtcagcggtatgctggtgctgaaagatggaaaagtcgcctggaaatatctcgccgaaggtaataccgacaccaccctgtggacctcgcgctcggtaggcaaatcggtggtctcgacgctggtcggtatcgccattcaacagggtaaaatccactcccttgatgacctgattaccgtttatgaacccgaactgaaaggcaccgcctgggacggcgtaacgctgaagcagttgattcaacacaccagcggggtggaatggaatgaagactacaccgacccgcagtcgcatttcgcccgcctgacccagtgtgaagcgcaccccggcgcctatgcctgcgtgcgtaagatcgtcaccggcctggcgcgtcaacacccggcgggcgagcagtggtcctactcttccggcggcgcctggctgcttggggatatcctggagcgcgccaccggcatgtcgctggccgcctggcttgaacaggctctatggcagccggccgggatggcccacgacggtgtgtggcatgcttatcagcaagggaagcacgacgtcggcgcccacggctttaacgccacccttgaagactggggccgctttggtgaattcgtcgcccgtgacggtcggttaagcaatggcaaacagctggtgccgactggctggttcgatcaagccgccagctggaccaaggcgctaaactcggtctcggcagcgcatccggagggtatttacggctatcagtggtggaataacgcgattccggcgaatgcgcaaaacgtccagccgacgccgcaggaagggcttaaagggtcgctgtgggcgctggggatctacggccaggtgatcatggtgaaccgcgcggaacacctggtgatcgtccagtggtcgacctggccgcaggcggaaccttccttcaacgctcagccgttggaagcggcgctgatgtacagcgccattgcccgcgagctgcgttaa

SEQ ID NO: 137582 - DNA, 597 bp, Enterobacter cloacae
atgcaaacacacgcaccgcacgtccgccacgttcgcgagacgctgctctcggataactggtacacgttgaaaaaatataccttcgaactgctgcgtcgggacggtcgctggcaggagcagagccgcgaggcttatgaccggggcaacggcgcagtcattttactctacaaccgggaaaagcggacggtggtcctgacccgtcagttccgttttccggtatttactcatggccacgacggatatctcattgaggcggccgccgggctgttggataacgcctcgccggaggcgcggatcgttgccgaagcggaagaggagaccggctttcgcgtgacccgtgtcgaacccgtcttcaccgtctttatgagccccggctccgtcaccgaaaaactctacttttttatcgccgaatatcaggccgatgaccgtcggggcgacggcggcggactggcggcggaaggtgaggatattgaagtactggagtggccgctgacgcgggcgctgcaggctattcgcgatggcgagatcatggatgctaaaaccattatcctgctgcaacacctggcgctgaatgccgacacgctcctcgccggctga

SEQ ID NO: 137583 - DNA, 762 bp, Enterobacter cloacae
atgctcgccagtcagagaaaacagcagatcctccagatcctcaccgaggaaaaacaggtgatgtccggggagctaagccagcggtttaacgtctccgaggactccattcgccgcgatctgcgcgagctggcggcggagggaaaactgcagcgggtccatggcggggcattgccgatatccgccgccattgcgccaattgaaacgcgcaaaagcgtgcagatcgcctccaagcaggcggtcgcccgcgccgccgccgccctgatccagccgggacaggtggtgattgtcgatggcggcaccaccaccgcggcgatgatcggctttttacccgccgacctcagctgcacggtggtcacccacagccctggcatcgccgtggcgctggtggaccacccgcgaatcgaggtgatcctgctcggcggcagagtatttaaacattcggttgtcgccgtcggcgccgagacgctggcgggaatggcgcggatcaacgccgatctgttctttatgggggtgaccggcgtccacccgcgggcgggtttcaccaccggtgattacgaagaggcaggcatcaagcgcgcgctgacggccagggcggcagaaaccgtggtaatggcctcccgggaaaagctcaacgccgcgtcggcctttgccatcggcgagctgagcctcgccagtacgctgattgtcgatggagaacccgacgccgcgctgcgccaacagttggtgcagagcggcgtggagatcgtccccgttcagcggtag

SEQ ID NO: 137584 - DNA, 1008 bp, Enterobacter cloacae
atgagtctggatatcgaccagattgccctgcatcagttaatcaaacgtgatgaacaaaatctggagctggtgctgcgcgagtcactgctggagccgaacgcgacggtcgtcgagatgatggctgaactgcaccgggtctatagcgccaaaagcaaagcctatggcttgttcaatgaagagagcgaactggcccaggcgctgcgcctgcagcgtcagggggaagaagagtttctggcgtttagccgcgcggcgaccggtcgcctgcgcgatgagctggcgaaatacccgttcgccgaaggaggcattgtcctcttctgccagtatcgttaccttgcggtcgagtatctgctggtggcggtactcaataacctgagcagtatgcgcgtcaacgaagagctggatatccgctcgacccattatctggatattaaccatgccgatatcgtcgcgcgcatcgatctcaccgaatgggaaaccaacccggagtcgacccgctatctgaccttcctgaaagggcgggtagggcgcaaagtggccgatttctttatggatttcctcggcgccagcgaagggcttaacgccaaagcgcagaaccgcggcctgctgcaggcggtggatgacttcgccgccgatgcccagcttgataaatccgagcgacagaacgtgcgccagcaggtctacgcctactgcaacgaacagctgcaggctggggaagagattgagctggagtcgctgtccaaagagctcgccggcgtcagcgaaaagagcttccaggaattcaccgctgagcagggctatgagctggaagagagcttcccggcggatcgcagcaccttacgtcagctgaccaagtttgccggcagcggcggcggattgaccattaacttcgacgccatgctgctgggcgaacgcgtattctgggatcccgccactgataccctgaccattaagggtaccccgccgaacctgcgcgaccagctgcagcgccggacgtcaggcggcaattaa

SEQ ID NO: 137585 - DNA, 228 bp, Enterobacter cloacae
atgccgcaaatttcccgctatagcgatcaacaggtcgaacagttgctcagcgagctgacgaacgtcctggaatcacacaaagccccggtggacctttcactgatggtgttaggcaatatggtgaccaacctgatcaacagtagcgtcgcgccggcgcagcgtcaggccatcgcccgttctttcgcgcaggctttgcaatcttcgattaacgacgatccagcgcattaa

SEQ ID NO: 137586 - DNA, 1761 bp, Enterobacter cloacae
atggtgactctacgtcagccctaccgagaaaaagtctcccagatggttagctgggggcactggttcgccctgttcaacatgttgttggccatggtgctcggcagccgctacctttttgtcgccgactggccgacgacgcttgccggacgactgttttcgtacgtcagtctcgtcgggcatttcagctttctggtgtttaccagctatgtgctgatcctctttccgttgacctttatcgtggtctcgcagcgcctgatgcgcttcctgtcggtgatccttgccaccgccgggatgacgctgctgctgatagacagcgaggtttttacccgcttccatctgcacttaaacccggtcgtctgggagctggtcatcaaccctgaccagaatgagatggcgcgcgactggcagctgatgtttatcagcgtcccggtcatcttcttgattgaaatgctcttcgccacctggagctggcaaaagctgcgcagcctgacgcgccgccgccattacgcccgcccggtcgcctggttcttctttttgtcgttcgtcagcagccacctggtctatatctgggcggacgccaatttctatcgcccgatcactatgcagcgggcgaatctgccgctctcctatccgatgaccgcccgtcgtttccttgagaaacatggcctgctcgacgcccaggattatcagcgtcgtctggtggagcaaggggcgccggaggcggtatcggtccagtatccgcttagcaacctgcgctaccgtgacctcggcgcgggctacaacgtgctgctgatcaccgtcgacaacctgaactactcgcggtttgaaaagaccatgccggcgctggcggcatttgccaaagaaaacgttaactttacccagcatatgagctcgggcaataccgccgacagcggcctgtttggcttgttctacggtatttcgcctggctatatggacggtgtcctctcggcgcgtattcccgccgcgctgattactgccctcaaccagcaaggctaccagctgggcctcttctcctccgatgggtttagcagcccgctgtatcgccaggcgctgctctccgatttctcgctgccgagcgcgaagacccagagcgacgagcagacggccaatcagtggatcggctggctggaccgttacgcgcaggatgagaatcgctggttctcgtggatctcgctcaatggcaccaccctcgacgacacgcagcagcagggctttgtccgccgctacagcaaggcggctggcgacgttgatgcccagatcgatcgggtgctgactgcgctgcgcgaagccggcaaactcgataatacggtggtaattattaccggcggccacggcaagccgctgaatgcgaaacacgacgcgttcgactggtcgcgcgagcagctgcaggtgccgctggttattcactggccgggcacgccggcgcaggagattgccaccctgaccgataacaaagatgtgatgactacgctgatgcagcgcctgcttcacgtttcgacgccggccaatgagtactcgcagggagaagatctgttcagcgccgcgcggcgtcgtaactgggtcaccgcggccaacggcgatacgctggccatcaccaccccgaccatcaccgtggtcctcaaccataacggcacctataccacctggagccgcgacggcgagaaaattaaagatcagaaaccgcagctcagtctgttgctgcaggtcctgactgacgaaaaacgctttatcgctaactga

SEQ ID NO: 137587 - DNA, 1176 bp, Enterobacter cloacae
atgacaattcacgtaacagatgtcgccatcgtgggcggcggcatggtcggcggcgccctggcgttagggctggcgcaacagggatttaccgtgacggtgcttgagaaagtggcgccaccggcgttcgatccggcatccgccccggatgtgcggatctcggcgatcagcgcggcttcggttggcctgctgaagagtctcggcgtctgggatgccatacgggcgatgcgcgtccatgcttatcgccgtctggagacctgggagtgggagagcgcgcacgtcgccttcgacgccgcggagctcaagctgccggagctgggctatatggtcgagaacaaggttctgcaatggggcctgtggcaagcgctggcggcgcatgaggcggttaccctgcgcgtcggtagcgaactgaaaacgatgcagcgcggcgagacgcagacggcgttgcatttgcgcgagggggagacgatccacgcccggctggttatcggcgccgacggcgctaactcccaggtgcgggagatggccggcatcggcgtgcacgcctggcaatatcagcagtcctgtatgctgatcagcgtcgaatgcgccgacgatcccggcgacagcacctggcagcagtttactcccagcggcccacgcgccttcctgccgctgttcgaccactgggcctcgctggtctggtacgacgccccggcgcggatccgtcagctgcagagcatgaccatggcgcagctccagcaggagatcgccagtcactttccggcgcggctgggacgggtgacgccgcaggcggccggcgccttcccgctcacccggcgtcatgcgctgcagtatgttcagcccggcctggcgctggtgggcgatgcggcgcacaccattcatccactggcggggcagggggttaatcttggctatcgtgatgtcgatgccctgctggagatcctggcggaagcgcgcggccgcggcgaagactgggccagcctgccggtgctgaagcgctaccaggcgcggcggcgagcggataattttatcatgcagtcggggatggacctcttttatgccggtttcagcaatgacctggcgccggtgcggatgctgcgtaatattggcctgatggcggctgaacgcgccggggtgctgaagcgtcaggcgctgaagtatgccttaggcttgtaa

SEQ ID NO: 137588 - DNA, 1425 bp, Enterobacter cloacae
atgacaaaaaaactccatattaaaacctggggctgtcagatgaacgagtatgattcatcaaagatggccgatctgctggatgcgacacatgggtatcaactgaccgaagtggcggaagaagcagatgtgctgttgctcaatacctgctcaattcgtgagaaggcccaggaaaaagttttccatcagcttggccgctggaagctgctgaaagagaagaacccggacctgattattggcgtcggcggctgcgtggcttcccaggaaggcgaccatattcgccagcgcgcgcactatgtcgatattattttcgggccgcaaaccctgcaccgcctgccggagatgattaactccgtgcgcggcaaccgcagtccggtagttgatatcagcttcccggaaattgaaaaattcgatcgcctgccagagccgcgcgccgaagggccgaccgcctttgtctcgattatggaaggttgcaataaatactgcacctactgcgtggtgccgtatacccgcggagaagaagttagccgtccgtgcgacgatatcctgtttgaaatcgcccagctggcggcgcagggcgtgcgtgaggtcaatctgctggggcagaacgttaacgcctggcgcggtgagaattacgacggcaccaccggcagctttgccgacctgctgcgcctggtcgccgccatcgacggcatcgaccgcattcgcttcaccaccagccacccgatcgaatttaccgacgatatcatcgacgtttatcgcgatacgccggagctggtgagcttcctgcacctgccggtgcagagtggctccgaccgtgtgctgaacctgatgggacgcacccataccgcgctggagtataaagcgattattcgcaagctgcgtgaagcgcgcccggatattcagataagctccgactttatcgtcggcttcccgggcgaaaccacggaagatttcgaaaagaccatgaagctcatcgccgacgtcaatttcgatatgagctacagctttatcttctccgctcgcccgggcaccccggcggccgatatggtcgacgacgtgccggaggcggacaaaaaacagcgtctgtatatcctgcaggaacgcattaaccagcaggcgatggcctggagccgtcgcatgctcggcacggtacagcgcatcctggtggaaggcacctcgcgtaagaacatcatggagctctccggacgtacggagaataaccgggtggtcaacttcgaaggtaccccggacctcgtcggtaagtttgtcgatgtcgaaatcgtcgatgtatataccaactcgctgcgcggtaaaatcgtgcgcaccgaagcggagatgggtctgcgtatcgctgaatcacccgaatcagtgattgcccgcacccgtaaagagaacgatcttggcgtgggaatttaccagccatga

SEQ ID NO: 137589 - DNA, 1047 bp, Enterobacter cloacae
ttgaacatagacactcgtgagattaccctggagccagcggataacgcacgcctgttagccctgtgcggcccgtttgacgacaacattaaacagctggagcgtcggttaggcattgagatcaaccgccgtgacaatcactttaagctgaccggtcgcgccctgtgcgtgcacgctgccgccgatattctgcgcagcctgtatgtcgacacagcgccaatgcgcggtcagattcaggatattgaaccagagcagatccacctggcgatcaaggaagcgcgcgtactggagcagagcgccgaaagcgtgcctgagtacggtaaagccgtcaatatcaagaccaagcgcggggtaatcaaaccgcgtacgccgaaccaggcgcagtacatcgccaatatcctcgatcacgacatcactttcggcgtgggtccggcgggtacgggtaaaacctatctggcggtggcggcggcggtcgatgcgctggagcgccaggagatccgccgtattctgctgacccgtccggccgtcgaggcaggcgaaaagctcggcttcctgcccggcgatctgagccagaaggtcgacccgtatctgcgcccgctgtatgacgcgctgtttgagatgctcggctttgagaaagtggagaagctgattgagcgtaacgtcatcgaagtggccccgctggcctatatgcgcggacggacgctgaatgacgcctttatcattcttgatgaaagccagaacaccaccatcgaacagatgaagatgttcctgacccgcatcggctttaactccaaggcggtgatcaccggcgacatcacgcagattgacctgccacgcagcaccaaatccggtctgcgccatgccatcgaagtactggcggaagtcgatgagatcagctttaacttcttccatagcgaagacgtggtgcgccatccggtggtcgcccgcatcgtgaacgcctatgaggcatgggaagccgcagaccagaaacgtaaagcagagctggccgccgagcgcaaacgcgaagcccaggaacaggagcaaaaatga

SEQ ID NO: 137590 - DNA, 474 bp, Enterobacter cloacae
atgagtcaggtgatcctcgatttacagctggcctgcgaagagaccagcggcctgccggacgaagcccttttccaacgctgggtcgacgccgtcattccgccgtttcaggaggagtcagagttaacgattcgtctggtcgacgttgcagaaagccatgagctgaacctgacctatcgcggcaaggataagccgaccaacgtcctctccttcccgtttgaagcgccgccgggaattgaaatgccgctgctcggcgatctgatcatctgccgtcaggtggtagagcaggaagccagcgagcaaggtaagccgctggaggcgcactgggcgcatatggtggtgcacggtagcctgcatctgctgggctacgatcatatcgaagacgacgaagcggaagagatggaaggccttgaaacagagataatgcttgctctgggctatgaggacccgtacatttccgagaagattgcggaatag

SEQ ID NO: 137591 - DNA, 948 bp, Enterobacter cloacae
atgccgtccggcgctgagtttacgcgcgacgagcgacagttaaatcaacatgagaacccaaacgacgccatgagcgacgacaattcacacagtagtgacacagtaaacagcaaaaagggatttttctccctgttactcagccagctttttcacggggaaccgaaaaaccgcgatgaactgctggcgctgatccgtgattccgggcaaaacgaccttatcgatgaagatacgcgtgacatgctcgaaggggtaatggatatcgccgaccagcgggtccgcgatattatgatcccccgttcacaaatgataaccctgaaacgcaaccagacgctggacgagtgcctggatgtcatcatcgaatccgcccactcgcgtttcccggtcatcagtgaagataaagatcacatcgaagggattctgatggccaaggatctgctgccgtttatgcgcagcgacgccgaagccttcagcatggaaaaagtgttacggccggcggttgtcgtcccggaaagcaagcgggtcgaccgcatgctgaaagagtttcgctcacagcgctatcatatggcgatcgttattgacgaattcggcggcgtctctggcctggtgaccatcgaggatatccttgagctcatcgtcggggaaattgaagacgagtacgacgaagaagaagatatcgatttccgccagctgagccgccacacctggacggtgcgcgccctggcctccatcgaagacttcaacgacgccttcgacacgcactttagcgatgaagaagtggataccattggcgggctggtgatgcaggccttcggccatctgccggcccgcggcgaatctatcgacattgatggttaccaattcaaggtagcaatggcagatagtcgtcgtatcattcaggtgcatgtaaagctgcccgatgacgctccccagccgaagctggaagagtaa

SEQ ID NO: 137592 - DNA, 1539 bp, Enterobacter cloacae
atggtatttgcctctcttcttgaacgccagcgcgtacgtctgttgctggcgctgttgtttggagccagcggaacgctggctttttcaccttatgacttctggccagcggctatcgtttcgctgatcggtctgcaggcgttaaccctcaaccgacgcccgctgcaaagcgccgggatcggctatttctggggactcgggttgttcggcacgggtatcaactgggtctatgtcagcatcgcgcagtttggcggaatgcccggcccggttaacgtcttcctcgtcgttctgctggcggcctatctctcgctctacaccggcctgtttgccggcctgctcgcccgtctgtggcctaaaactaactggatacggatggctatcgctgcccctgtcgtctggcaaatcaccgagttcctgcgcggctgggtgctgaccggctttccgtggctacagttcggctacagccagattgacggcccgctgaaaggcctcgcgccggtgatgggcgtcgaggcgattaacttcctgctgatggtagtcagcggcctgctggccctggccctcgtccagcgcaactggaagccgctggcgattgccgcgctgctgttcgccctgccgttcccgctgcgctatatccagtggtatcagctgctgccggcgcgcgcgacccaggtctcgctggtgcaaggcgatatcccacaggccatgaaatgggacgaaaagcagctggtcaataccctgaaaacctacctggcgctgacccagccgcatatcggccactcgcagctgattatctggcctgaatcggcgatcccggatctggagatcaaccagcagcagttcctcagcatgatggacgatctgctgcgcgcaaaagacagctcgctgatcaccggcattgtcgatgcgcgtctcaacaagcagaaccgttacgatacctacaacaccatcattactcttggcaaagataatccgtaccgctacgactcgaccaaccgctacaacaagaaccatctggtgccgttcggcgagtttgtaccgctggagtcgattctgcgtccgctggcgccgttctttgacctgccgatgtcctccttcagccgcggcccctacgtgcagccgcagctgatggcgcataacctgaagctgaccgcggccatctgctacgagataatcctcggtgaacaggtgcgggataacttccggccggacaccgacttcctgctgaccatctccaacgacgcctggttcggcaagtccatcggcccgtggcaacacttccagatggcgcgaatgcgcgccctggagctggcccgcccgctgctgcgcagcaccaacaacggcattactgcggtgatcggcccgcgcggcgagatccagaagatgatcccgcagtttacccgcgaggtgttgaccaccaccgtgacccccaccagcggcttaaccccttacgcccgcaccggcaactggccgctatgggcgctgacggcgctgtttggtttcgccgcgctgctgatgagcctgcgccagcgtcgccgataa

SEQ ID NO: 137593 - DNA, 912 bp, Enterobacter cloacae
atgcaattacgtaaactggccacggcaatgctggtaatgggaatgaccgctggtctggcgcaggcggaagatgctgccccggcggctggccagaacaccctggataagatcgccaaaaacggggttatcgttgtcggccatcgtgaatcttcggtcccgttctcttactacgataaccagcagaaggttgtgggctactctcaggattattccaacgccatcgtcgatgccatcaagaaaaaactgaacaaacccgatctgcaggtcaaactgatcccggtcacctcgcagaaccgtatcccgttgctgcagaatggcacctttgatttcgagtgcggctcaaccaccaacaaccttgagcgccagaaacaggcggccttctccgataccatcttcgtggtcggtacccgtctgctggtgaagaaaggcggtccgatcaaagatttcccggacctgaaggataaagcggtcgtcgtcacctccggaaccacctcagagatcctgctgcataagctgaacgatgagaaaaaaatgaatatgcgcattatcagcgccaaagatcatggcgactctttccgcaccctggagagcggacgcgccgtggcctttatgatggatgatgccctgctggctggcgaacgcgccaaggcgaagaaaccggataactgggaaatcgtcggcaccccgcagtcgaaggaagcctatggctgcatgctgcggaaggacgatccgacgttcaaggcgctggttgatgaaaccgtcgcccaggctcagacctctggcgaagcggagaagtggtttgacaaatggttcaaaaacccgattccgccaaaaaatcttaacctcaacttcgagctgtcggacgacatgaaagcgctgttcaaatcacctaacgacaaagcactgaactaa

SEQ ID NO: 137594 - DNA, 741 bp, Enterobacter cloacae
atgtcaatagactggaactgggggatattcctgcaacaggcccccttcggcaacactacctacctgggctggctgtggagcggttttcaaatcaccgtcgccctctccatctcggcctggatcatcgcttttctcgtcggctcactgttcggcattttacgcacggtacccaatcgcttcctctcgggcattggcacctgctatgtcgaactgtttcgcaacgtgccgctgatcgtgcagttctttacctggtacctggtggtgccggagttcctgccggaaaatatcggcatgtggtttaaatcggagctggacccaaacattcaattctttgtctcctccatgctgtgcctggggctgtttaccgccgctcgcgtctgcgagcaggtacgcgccgccatccagtcgctgccgcgcgggcagaagaacgccggcctggcgatgggcctgaccctgccgcaaacctaccgctacgtgctgctgccgaacgcctaccgcgttatcgtgccgccgatgacctcggagatgatgaacctggtgaaaaactcggccatcgcctccaccatcggtctggccgatatggccgcgcaggcgggcaaactgctggactactccgctcatgcctgggagtcttttaccgccatcaccctggcctatgttttcatcaacgcggtgattatgctgattatgtatgtggtcgagcgtaaggttcgcctgcctggcaatatgggaggcaaataa

SEQ ID NO: 137595 - DNA, 1671 bp, Enterobacter cloacae
atgttaattcgatctcgcacgctcaccgggctgctgtttatcacgctggcgggcacctcagccgccggggccgcgccattggcctcttctactcaccagacggagcaggataaagcccgccaggaggcgctggcgccgcagcaacaggattttcagtcttcacaacagcgcgtggcgccgcaggggatcccttttcctgaggaaacgcattgcaaattgatcaaccgggtcgatatcgactccgataaccaggcgctcacccggaaattactggcgaaaaccgcacggcaggcgcagggacgctgtctgggtagcgaaggcattcgcctgctggcctataccttgcaaaatgagctgatcgcgcaaggctacatcacctcgctgattgatgtgccctcccagtcgctggagcacggcatactcaggttcacgctgcactatggcaaagtgggcgctatcgactatgccgacggctcggacaccacccgcctgtggaattccctacccacctcttccggtactatcctgcgcttaagcgaccttgagcaagggatggccaacctgcagcgtctgcccggcgccaccgcgcacatgaaactgttgccgggccagcacgagggagaaagcgatatccagatcgcccgcagcctggcgaaaaaatggcagcttggcgcctggcttgacgacgccggcagcaaagccagcggacgctaccaggccggcggggccctctatctctatgacctgaccaccctcaacgatatcctgtacctttccggcgggggcgatattgaattcaatcagcataacgacggcaaccacaacggcagcctgtattactccattccctttggctactggacactaagcgcctacggggcatacagccagtatcgtcagcagtttaacggcaactggtcgacgatggattataagagtaaaaatcgctactacagcgccacgctgagtcgtctgctctcccacacccggcagcaaaaaaccaccgctgacctgcggatcgccaagagcacctcgcattattacttcggcggcagtgagctactggtgatgcgcaagcagaacccctcatgggaattcaccctcaaccaccagcactactttaacaaaaagattgttgatgccagcatcggcatccagcgcagcctgccgtggctcagctcgacagcaacgccggaagagcaggccgggctgtatagcccgctgtcgcggattgtgcatggtaatctgcaggcaatgatgaaatttgacgccaccggcgacaaatttacctgggctccccgcctcagcgcccagttcagcccggacaaactcgcttccgataataaattcaatattggtagtcgctggagcgtgcgcggttttgacggtgaaaacagcctgtccggcaatcagggatggtactggcgcaacgattttatctgggatctggccacccacgagcggcaattctatttgggcgcggatataggccgtcttatcggcgccgatctatatcaaaaaggcaaagtgctctccggcgccgtcagcgggctgcgcggtcagctatggtcaacgcagtacgatctgtttattagtaccccgctgagtaaaccggataagtttcatagcgacgccctgaatatgggcttttcattacagtggaggtattaa

SEQ ID NO: 137596 - DNA, 321 bp, Enterobacter cloacae
atgctaccgtcattggtgatgcccgtgacggtggaaacctgcatcagcgtgccgttggagataatagaacccttattacgtacgccaaagccgatgttattgccgaccatgctgatgctgttggcctcaatgccgccaaggctgctgacgtcgatgctgtactgcgggttaaccgtcatctggatcagggtggcctttttaccggcggaggtcaccgagccagagctgttatccatggtgaagttgcccgcgctgaccagggcgttgttggcctgcactttaccgttaatcttaatcgcgtcggcgagcagaaccgcgtag

SEQ ID NO: 137597 - DNA, 708 bp, Enterobacter cloacae
atgaaagcccttcgccccgatgaagaccgtctgacgcctatccattccgtctatgttgaccagtgggactgggagcgcgtgatgggggatgaagagcgtcacgtcggcaccctgaaggcaaccgtcgaggcgatctacgccgggatcaaagccaccgagctggcggtcagccaggagtttggcctgacgccgttcctgccggaacagatccattttgttcacagccaggagctgctgagccgctatccggagcttgatgccaaaggtcgtgagcgggctattgccaaagagctgggcgccgtcttcttaattggtatcggcggcaaactagctgatggcaagcgccacgacgtgcgtgcgccggattatgatgactggagtactgaggtttctgaaggttttgccggcctgaacggcgatatcctggtgtggaacccggtgctggaggatgcgttcgagatctcctcgatggggatccgcgttgacgccgaggcgctaaagcgccagctggcgctgaccggcgatgaagatcgcctgaaactggagtggcaccaggcgctgctgcgcggcgagatgccgcagactatcggcggcggcattggccagtctcgtttgacgatgctgttgctgcagcttgaccatatcggtcaggtgcagtgcggcgtatggccggcgcaggttcgcgaaagcgtttccgcgctgctgtaa

SEQ ID NO: 137598 - DNA, 1449 bp, Enterobacter cloacae
atgacgctcgatatgctgaatgtcatgctggcagtcagcgaagagggaatgatcgaggagatgctgctggcgctgttggcctctcctcagctggcggtgttctttgaaaaatttccccgcctgaaaaacatcatcgcggcggatattccgcgctggcgggaagccgttcgcgcccgcttaaaagaagttaacatcccgccggatctggacgccgaagtgcaaacctatcagcaggctcagctgctctctacctcgcagtttatcgtccagctcccgcaaattctcggcaaactgcaccagctccagtccccttttgccgcccaggcgcagaagctggtggatgacaatgccacctttaccccggcgctgcatacgctgtttttacagcgctggcgcctgagcctagtggtgcaagccaccagccttaaccagcagctgctggacgaggagcgcgaccagttgctcagtgaggtccaggaacgaatgacgctcagcggtcagctcgatccggtgctggcggaaaatgataccgccgccggacgcctgtgggatatgagcgccggcgaactcaaacgaggcgactaccagcttatcgtgcgctatggcgattttcttaaccagcaaccggagctgctgcagctggcggaacagctggggcgttcaagggaagcgaaatccgtgccgaagaaagatgcgccgatggaaaccttccgcagcctggtacgcgagccggcaacggtgcctgaacaggtcgacggcctccagcagagcgacgacattctacgcctgctgccgccggagctggcgacgcttggcatcacggagctggagtttgaattttatcgcaagctggtggagaaacagctgctcacctaccggctacacggcgatgcctggcgcgagaaaattaccgaacgcccggtaacgcggcaggattttgatgagcaaccgcgcgggccgttcattgtctgcgtcgatacgtcaggatcgatgggcggttttaacgaacagtgcgctaaggccttttgtctggccctgatgcgcatcgcgctggccgataaccgtcgctgcttcattatgctgttctccagcgaagtggtgcattacgagttgaccagcgagagcggactggagcaggcgatccgtttcctgagccagcgttttcgcggcggcaccgatctggccagctgttttcgcgccattattgaacgtttgcaaaacccgcagtgggtggatgcggatgccgtggtgatctccgactttattgcccaacggttgccggatgaggtgattgctcaagtgggggagttacagcgtaagcatcagcaccgttttcacgcggtggcgatgtcggttcacggcaaacccggcatcatgcgcatcttcgatcatatctggcgctttgacaccgggcttcgtagccgcctgctgcgacgctggcggcgctaa

SEQ ID NO: 137599 - DNA, 1500 bp, Enterobacter cloacae
atggctcaaacacatttactggctgaaagaatttcccggctcagcgcggcactcgaaaaaggactctttgaacgcagccacgcgatacgcctctgcctgctggcggcgctcagcggcgagagcgtttttttgcttggtccaccggggatcgccaaaagcctgattgcccgccgcctcaaattcgccttccagcaggcgcgcgcttttgaatacctgatgacccgcttctccaccccggaagaggtatttgggccactgtccattcaggcgctgaaagatgaaggccgttacgaacgtttaaccgccggctacctgccggaagcggaaatcgtgtttctcgatgaaatatggaaagcaggtccggctatcctcaacaccctactgacggcgattaacgaacgtcacttccgcaatggcgcgcatgaagagaaaatcccaatgcgcctgctggtggccgcgtcgaacgaactcccggaagccgacagcagcctggaagcgctgtatgaccgaatgctgatccgtctatggcttgataaagtgcaggataaaggtaatttccgttcgatgctggtcagccagcaggatgaaaacagcaatccagtgcccagcgcgctgcaggtgagcgacgaggaatttacccaatggcagcagcagatcggcaatattaaactgccggacgcggtgtttgagctgatattccagctccgccagcagctggacgccctgccaaatgccccctacgtctcggatcgccgctggaaaaaggctattcgcctgctgcaggccagcgccttcttcagcggccgcgacagcatcgcgccgattgaccttatcctgctgaaagattgtctgtggcacaacgtcgaaagtatgaacctgatgtcgcagcagctggaaacgctcatgacctgtcacgcctggcaacagcaggcgatgctgacgcggttgggggcgattgtgcagcgacgcattcagatccaacaacagcaaagcgacaaaacggcgctgaaggtcacccgtcttggcgggatgtttagccgcaaaccgcactatgaactgccggcggagatccagggggccaccctgacgctgctgctgcagcagccgctcaaacttcacgatatggaagtgatccacattacttttgaacgcgaggcgttagccaactggctggaaaagggcggcgagatccgcggtaagctcaacgggatcggctttgcccaactgctcaatatggatgtcgacaccagccagcatctggtcgtccgcgatgtgagcctgcagggctcacgcctcgcgctgcccggcagcgcagcgcaggagaatatgccggcggaaattcgccagcagctggaagcgctggatgatgagtggcaccagcaacacaaccgcttcagcgagcagcaaaagtgcctgtttatcccggtcgaatggctgggaagaatcgaagccagcctgcaggacgtcggcgcgcagattaaacaggcgaagcagccatga

SEQ ID NO: 137600 - DNA, 1869 bp, Enterobacter cloacae
atgagcactgataataaacaatcgttgccggcgttaacgctggcggccatcggcgtggtgtacggcgatatcggtaccagtccactgtataccctgcgcgaatgcctgtcaggtcagtttggctttggcgtagagcgcgatgccgtttttggctttttgtcgctgattttctggctgttaatctttaccgtatcgattaaatacatcaccttcgtgatgcgggcggataacgccggggaaggcgggatcttaacgctgatgtcgctggccggacgtaatacttcggccagaatgacctccgtgctggtgatcctcggccttatcggcggcagtttcttctatggcgaagtggtgattaccccggcgatttcggtaatgtcggcgatagaggggttagaaattatcgccccgcagctcgatacctggattgtccctatctccattatcgtgctcaccctgctgtttgtgatccagaagcacgggactggcatggtcggcaagctgtttgcgccgattatgctgatctggttcctgttgctggcggtgctgggcgcgcgaagcatttacgctaatccggaagttctgcaggcgctgaacccctactgggctgtgcacttcttcctgcaatacaagaccgtttcctttattgcgcttggcgcggtggtgctgtcgattaccggggtggaagcgctgtacgccgatatgggccacttcggcaaactgccgatccgcgttgcctggttctccgtcgtgctgccctcgttggtgctgaactattttggccagggcgcgctgctgctgaagcacccggaagcgattaaaaacccgttcttcctgctggcgcctgagtgggcgctgatcccgatgctgattatcgccacgctggcgacggttatcgcctcccaggcagtgatttccggggtcttctccctgacccgtcaggcagtgcgtctgggctatctgtcgccgatgcgcattatccatacctcggaaatggagtccgggcagatttacattccgttcattaactggctgctgtacgtttctgtggtcatcgttatcgtcagctttgagcattcgtctaacctggcggcggcgtatggtatcgccgtaacgggcaccatggtgctgacctccattctgtcggcgaccgtggcgcgcaaaaactggcactggaacaagctgtttgtcggtctgatgctggtggccttcctgtgcattgatattccgctgttctcggcgaacctcgataagattgtctccggcggctggctaccgttgtccctggggatggtcatgtttacggtgatgacgacctggaagagcgagcgtttccgcctgctgcgccggatgcacgagcatggcaactcgctggaagcgatgatctcttcgctggagaagtcaccgccagtgcgtgtgccgggtactgcggtgtatatgtcccgcgccctgaacgtgatcccgtttgccctgctgcataacctgaagcacaacaaggtgctgcatgagcgagtgatcctcctgaccctgcgtaccgaagatgcgccttacgtgcataacgttcgccgggtgcagattgagcagctgtcaccgtccttctggcgggtggtggccagctacggctggcgggaaacgcctaacgttgaagaggtgttccaccgctgtggcctggaaggactcagctgccggatgatggagacctcgttctttatgtcgcatgagtcgctgattatcggcaaacggccatggtatcttcgcctgcgcggcaagctttatctgctgctgcagcgtaacgccctgcgggcgccggatcagtttgagatcccgccaaaccgggttatcgagctcggtacccaggtcgaaatctga

SEQ ID NO: 137601 - DNA, 420 bp, Enterobacter cloacae
atgaaaaaaggcaccgtacttaacgctgatatttccgcggtcatttcccgcctgggccacaccgatacgctggtggtctgcgatgccggattaccggttccccgcagcagcacgcgcattgatatggcgctgactcagggcgtaccttcatttatgcaggtgctggaagtggtgacgacggaaatgcaggttgaagcggctgtcatcgcggaagagattaaaacccataatccgcagctccacgcgacgttgctcactcacctcgagcagctgcagcagcaccagggaaataccattgaaattcgttacaccagccatgagctgttcaaaaaacaaaccgcagacagtcaggcggtaattcgcagcggggagtgttccccgtttgcgaatatcattctctgtgccggcgtcacgttctga

SEQ ID NO: 137602 - DNA, 1506 bp, Enterobacter cloacae
atggaagccttattgcaactgaaagggatcgacaaagcgttccctggcgtcaaggcgctctccggcgcggcgctgaatgtctatgccggccgggtgatggcgctggtaggggaaaatggcgccggcaagtccactatgatgaaggtgttgaccgggatctacacccgtgatgccggctctttgctgtggttaggcaaagagacgacctttaacggcccaaaatcctcccaggaagctgggatcggcattatccatcaggaactgaacctgatccctcagttgacgatcgccgagaacatcttccttggccgcgagttcgttaaccgttttggcaaaatcgactggaagcagatgtatgccgaagccgacaagctgttggcaaagctgaatctccgctttaccagccagaaactggtgggcgatctatcgattggcgatcagcaaatggtggagatcgccaaagtgctgagcttcgaatcgaaagtcatcattatggatgaaccgaccgatgcgctgaccgataccgaaaccgaatcgctgttccgcgtcatccgagaactgaagtcgcaggggcgcggtatcgtctatatctcccaccgtatgaaagagatcttcgagatttgcgacgacgtgacggtctttcgtgacgggcagtttatcgccgagcgcgaggtctcgtcgctggatgaggaccgacttatcgagatgatggtcggccgtaagctggaagaccaatatccacacctcgataaggcgcccggcgcggtgcgcctgaaggtcgacaacctctgcggcccgggggtggataacgtgacctttaccctgcgccagggggagatcctcggcgttgccgggctgatgggcgccgggcggaccgaactgatgaaagtgctgtacggcgcgctgccgcgcagcagcggttccgtgacgctcgatggccgcgaagtggtgacccgttcgccgcaggatggtctggcgaacggcattgtctatatctccgaagaccgtaagcgcgatggtctggttctcgggatgtcggtaaaagaaaacatgtccctgacggcgctgcgctatttcagccgggcgggcggtagtcttaagcataaagatgaacagcaggcggtaagtgatttcatccgcctgtttaacgtgaaaacgccgtccatggagcaggcgatcggtctgctctccggcggcaaccagcaaaaggtcgccatcgcccgcgggctgatgacccggccgaaggtgctgatcctcgatgaaccgacccgcggcgtcgacgtcggggcgaagaaagagatctaccagctcatcaaccagttcaaagccgacggcctgagcatcattctggtctcctccgagatgccggaagtgttgggcatgagcgatcgcatcatagtgatgcatgaagggcatctcggcggtgaattcacacgcgagcaggccacccaggaagtattgatggctgccgctgtgggcaagcttaaccgtgtgaatcaggagtaa

SEQ ID NO: 137603 - DNA, 966 bp, Enterobacter cloacae
atgacaacccaggctgtttctggtcgccgctatttcacaaaagcgtggctgatggagcaaaaatcgctgattgccctgctggtgctgatcgcggtggtatcgaccatgagccccaacttttttaccgtcaataacctgttcaatattctgcagcaaacctccgttaacgccattatggcggtagggatgacgctggtcatactgacctcggggatcgatctgtccgtcggctccctgctggcgctcaccggtgcggtggcagcgtcgatcgttggcattgaggttaatgcgctggtggcggtcgcggctgccctcgcattaggtgcggcgatcggcgcagtcaccggggtgattgtagcgagaggccgcgtgcaggccttcatcgccaccctggtgatgatgctgctgctgcgcggcgtaaccatggtgtacaccaacggcagcccgatcaataccggctttagcgataatgccgatctgtttggctggtttggcatcgggcgtccgctggggatcccgacgccggtatggatcatggcgattgtcttcctggcggcctggtacatgctgcaccatactcgcctgggccgttatatttatgccctgggcggtaatgaagcggcgacgcgtctgtccgggattagcgtcaataaagttaaaattatcgtttacgccttgtgcggaatgctggcttcgctggccgggatcatcgaagtggcgcgtctctcctccgcgcagccgacagcggggacgggctatgagctggacgccattgcggcggtggtgctcggcggcaccagcctcgctggtggcaaaggacgcattgtcggcacgctgattggtgcgctgatccttggcttcctgaataatggtcttaatcttttaggcgtttcttcctattaccagatgatcgttaaagcggtggtgattttgctggcggtactggtagataacaaaaagcagtaa

SEQ ID NO: 137604 - DNA, 891 bp, Enterobacter cloacae
atgaatatgaaaaaactggcgaccctggtctctgctgttgcgctaagtgcgaccgttagcgcgaacgcgatggccaaagacaccatcgctctggttatctctaccctcaacaacccgttcttcgtgtcgctgaaagacggcgcgcaaaaagaagctgacaagctgggctacaacctggtggtgctggattcccagaacaacccggcgaaagagctggcgaacgtccaggatttaacggtgcgcggcaccaagctgctgctgatcaaccccaccgactctgatgccgtcggcaacgccgtgaagatggcgaaccaggcgaaaatcccggtcatcactctcgaccgtcaggcgacaaaaggcgatgttgtgagccatatcgcctctgacaacgtgcagggtgggaaaatggctggcgattacatcgcgaaaaaagtgggtgaaagtgcaaaagtcattgagctgcagggcattgccggaacttctgcggctcgcgagcgtggcgaaggctttaaacaggccgtggcggcgcacaaattcaacgtcctggccagccagccggccgatttcgaccgcaccaaaggcctaaacgtgatgcagaacctgctgaccgcacatcctgacgtccaggcagtgttcgcgcaaaatgatgaaatggcgctgggcgccctgcgcgcgctgcagaccgcaggcaagtccgatgtgatggtggttggatttgacggcactccggatggcgaaaaagcagtaaacagtggcaaactggcggcgaccgtcgcacagttgccggagcagatcggcgcgaaaggcgttgcgactgctgataaggtactgaagggcgaaaaagtggaagctaactacccggttgagctgaagctggtcgttaagcagtaa

SEQ ID NO: 137605 - DNA, 933 bp, Enterobacter cloacae
atgatgaaaactgcaggcaaacttgtcgtccttggcagtatcaatgccgatcacattcttaaccttgacgctttcccgacgccgggcgaaaccgtcaccggccaccattatcaggtggcgttcggtggaaaaggggccaaccaggcggtggccgccgggcgcagcggagcggatatcgcgtttatcgcctgcaccggcgatgacgatatcggtgaacgcatccgtcgtcagctggcgagcgataaaatcgacgtggcgcccgtgcgcgcggttgccggggaagcgaccggggtggcgttaattttcgttaacgccgaaggtgagaatgtcatcggtattcatgccggcgccaatgcggcgctttccgtctcccaggttgaggcggaaaaagagcgtatcgccagcgcacaggcgttgttgatgcagctggagtcgccgctggagagcgtcatagcggcggcgaaaatcgcccatcaccatcacaccaccgtggtgctgaaccccgcgccagcgcgtgaactaccggatgaactgctggcgctggtggatattattacccctaacgaaaccgaagcggaaaagctgaccggtattcgcgttgagagtgacgaagatgcggcaaaagccgccaacgtgctgcatgccaaaggcattggtacggtgatgatcaccctcggcagccgcggcgtctggctcagtgccgaaggcgaaagccgccggatcccagggtttcgcgtacaggccattgatactatcgcggccggtgatacctttaacggcgcgctggtgaccgcgctgctggaagggaccgccctgccggaggcgattcgctttgcgcatgccgcagcggcgatcgccgtaacccgcaaaggcgctcagccgtccgtgccttggcgcacagagatcgatgaatttttagcgcaacaggggtaa

SEQ ID NO: 137606 - DNA, 984 bp, Enterobacter cloacae
atgaaagatgtggcccgcatcgcgggcgtttccacatcgacggtgtcacacgtcatcaataaggaccgctttgtcagcgaggcgattaccgccaaagttgacgctgcgatcaaaagcctcaactacgccccctctgcgctggcgcgtagcctcaagctcaatcaaacccgtaccatcggcatgctgatcaccgccagtaccaatccgttttattcggagctggtgcggggcgtggagcgtagctgctttgagcggggttatagcctcgtgctctgcaataccgaaggtgatgagcagcgaatgaatcgtaatctggagacgctaatgcaaaaacgcgtcgatggattactcctgctgtgcacggagacccatcagccctccccggaaatcatgcagcgctatccgtcggtaccgacggttatgatggactgggccccctttgatggcgatagcgatctgattcaggataactcgctgctcggcggcgatatggcgacccagtatctgattgaccaggggcattcacgcattgcctgtattgccggcccgctggataaaaccccagcgcgcctgcgtcttgaaggctatcatgccgcgatggcgcgctgcggcctgccggttgccgaaggatatgtggtgaccagtgattttgagtttggcggcgggtttagcgcgatgcagcagctgctggcgttgccgcagcgtccgcaggcggtgtttgtcggtaacgatgcgatggcggttggcgcttatcaggcgttataccaggccgggctgcagattccgcaggatatggcgctggtgggctacgatgatattgagctggcacgttatatgacgccgccattgaccaccattcaccagccaaaggatgagctgggggaactggccatcgacgtactgatccatcgcatggccgatccgcagcaaaaacagcagcgcgttcagttaacgccggagctggtggtgcgcggttccgcttag

SEQ ID NO: 137607 - DNA, 1398 bp, Enterobacter cloacae
atgagcggaaaaaaagggcgcagcatggctggcctgccgtggatcgcggcgatggccttctttatgcaggcgctggatgccaccattcttaacaccgccctcccggctatcgcccacagtcttaatcgttctcccttagcgatgcagtcggccattatcagctatacgctgacggtggcgatgctgatcccggtcagcggctggctggccgatcgcttcggcacgcgccgggtctttatcatcgccgttagcctgttcaccctcggttccctcgcctgcgccctctccagttccttaacggaactggtcatttttcgcgtaattcaggggatcggtggggcgatgatgatgccggtggcgaggctggccctgctgcgtgcctacccccgcagcgaactgttgccggtcctgaactttgtcaccatgccgggattggtggggccgattctgggcccggtactcggcggggtatttgttacctgggccagctggcattggattttcctgataaacattccgatcggcgtaattggcattctgtacgcccgtaaatacatgccaaatttcacaacgccgcgccgacgcttcgatataggcggttttctgttatttggcttaagtctggtgttattttccagcggtattgaactgtttggggaaaaaatcgtggcgacatggcaggcgctggccgtgattgccgtcagtctgttactgctcgtggcctatgtgcgtcacgcgcgtcgccatccgacgccgcttatctcgctctctttatttaagacccatacgttctcggtcggcattgccggcaacctcgccacgcggttgggtaccggctgcgtaccgtttctgatgccgctgatgctacaggttggtttcggctatccggccattatcgccggctgtatgatcgcccccaccgctatcggctcgattattgcgaaatccaccgttacccaggtgctgcgctggtttggctatcgtaagaccctggtggggatcaccgtgtttattggccttatgatcgcccagttctcgctgcagtcgccagagatgccgctgtggatgcttcttctgccgctgttcgtgctggggatggcgatgtccacgcagtttaccgccatgaataccattaccctggccgatctgaccgatgataatgccagcagcggcaacagcctgctggccgtcacccagcagctttcaattagtctcggggtggccatcagcgctgcggtgctacgcttctatgaaggttttgataatgcaagcacggtacagcagtttcactacacctttataaccatgggcgtgataaccattatatcggcgctgatgtttatgctgttaagagcgaaggatggccgcaacctgattagcgagcggcataaacgctaa

SEQ ID NO: 137608 - DNA, 702 bp, Enterobacter cloacae
atgtctttaagcgcacagcaactggcggcacaaaagaacatctcctgggtactggccgaaaagctcgcccaaaaaatactgactggcgaatatcagccggaaagcattcttcccggcgaaatggagttgggggagcagttcggcgtcagccgtaccgccgtccgcgaagcggtgaagacgcttactgcaaaaggcatgctgctgccccgccctcgcattggcacccgggtgatgccgcgcagcagctggaatttccttgataaggaactgctctcctggtggctaacagaagataacttcgaagaggtggtaagccactttctcgtcatgcgcagcagcctggagccacaggcctgctttctcgccgccgccaacggcaccgccgggcaaaaagcgcagctcaatacattaatggaagagatgattgctctgaaacgccattttcagcgcgaacgctggatagaagtcgatatggcctggcatgaacatatctatgaaatgagcggtaatcctttcctcagctctttcgcctcgctgtttcattcggtctaccacacctacttcacgtcgattacgcaaaatgaagtggtgaagctcgatctccaccaggcgattgtcgatgccattcttaacagtgatgcgccgggggcgttgctcgcctgccaggcattgttgaacgccccacaccacgtaaatcaataa

SEQ ID NO: 137609 - DNA, 1974 bp, Enterobacter cloacae; identical to SEQ ID NO: 74966

SEQ ID NO: 137610 - DNA, 738 bp, Enterobacter cloacae; identical to SEQ ID NO: 74967

SEQ ID NO: 137611 - DNA, 858 bp, Enterobacter cloacae; identical to SEQ ID NO: 74968

SEQ ID NO: 137612 - DNA, 951 bp, Enterobacter cloacae; identical to SEQ ID NO: 74969

SEQ ID NO: 137613 - DNA, 1251 bp, Enterobacter cloacae; identical to SEQ ID NO: 91713

SEQ ID NO: 137614 - DNA, 1185 bp, Enterobacter cloacae; identical to SEQ ID NO: 74972

SEQ ID NO: 137615 - DNA, 336 bp, Enterobacter cloacae; identical to SEQ ID NO: 74973

SEQ ID NO: 137616 - DNA, 1023 bp, Enterobacter cloacae; identical to SEQ ID NO: 74974

SEQ ID NO: 137617 - DNA, 1347 bp, Enterobacter cloacae; identical to SEQ ID NO: 74975

SEQ ID NO: 137618 - DNA, 903 bp, Enterobacter cloacae
atgaggcggcagacgctatcaaaatatgttgccagccaccggaggttcaccttgattaagcaaagcagaagcgatatcccccgacgcgagagcggtcgtcacgtctggccggtgaaggaggatgatacccaaagcaacgatatcgatttttataaaacggcgttcagagaacagtccaggcgatgggggctttccgagatcattcttagtaatactggtgatggagaaatatcactctatcagtctgttaatcagggggcagatgttcctcacgtactgattgcggcagggtttcatggagaagaacccgcgggatgttgggggatgctggattttttgcgcgagggctcccctgaattgtttgataacgtagccgtgagttttttaccgcttgtaaacctctctggtctgcgcactggtagccgccttaatagtcttggacagaatccaaaccgaggctttaccaaaggtgcagaagtcgagccttctattgaaggaaaagtactgctcaactatgaaacgcttctgaaaaacgcagcaagtcatggtgtgctctgttgccatgaagatattcttcgtcataaggcgtatctctacactttcgaacatgctactcgcttgggtcatttcagcgtggcattacgtgatgaacttgaacgctttttcccggtcatggaaaaagagcgagttgatggttgtgaatgtgaggatggcattatttttaaccatttcgattcgtcatttgaatcatggttgttttcttcctgttccgacgtcgcagcgtgcactgaaacgccgggattgcaaccctttgcaaaacgagcagaagcaaaccgttatttaatcggcgcgtttatctcatcgatactggagcgcaacagcatcgggagcgggatgtcatga

SEQ ID NO: 137619 - DNA, 1953 bp, Enterobacter cloacae; identical to SEQ ID NO: 74977

SEQ ID NO: 137620 - DNA, 1920 bp, Enterobacter cloacae
atgggcccggaaaataccctgatcctgatcgacggcaagccggtcaccagccgcaactccgtgcgccttggctggcgcggcgagcgcgacacccgcggcgataccagctgggtgccgccggagatgatcgaacgtatcgaagtgattcgcggcccggccgccgcccgctacggcaacggcgccgccggcggcgtggtgaatatcatcaccaaaaaaaccggcgatgagtggcacggctcatggaacacctatatgaacgccccggagcacaaggatgaaggctccaccaaacgcactaacttcagcctcagcggcccgctgggcggcgatttcagcttccgcctgttcggtaatctcgacaaaacgcaggccgacgcctgggatatcaaccagggccatcagtccgaacgtaccgggatctatgccgacaccctgccggccgggcgcgaaggggtgaaaaacaaaaacatcgatggtctggtgcgctgggaattcgctccgatgcagtcgctggagtttgaggccggctacagccgccagggcaacctctacgctggcgacacccagaacaccaacaccaacgacctggtaaaagagaactacggtaaagagaccaaccgtctgtatcgcaacacctactcggttacctggaacggcgcctgggacaacggggtgaccaccagcaactgggcgcagtacgaacgcacccgcaactcgcgcaaaggcgaaggcctggccggcggcaccgaggggatctttaacagcaaccagttcacggatatcgatctggcggatgtgatgctgcacagcgaagtcagcattcccttcgactatctggttaatcagaacctgacgctgggcagcgagtggaatcaacagcggatgaaggataacgcgtccaacacccaggcgctgtcgggaggcgaaattccgggctacgacagcaccggccgcagcccgtactcgcaggcggaaatcttctcgctgttcgccgagaacaacatggagctgaccgacaccaccatgctgactccggcgctgcgtttcgatcatcacagcattgtcggcaataactggagcccgtccctcaacctgtcgcagggcctgtgggatgacttcacgctgaagatgggcatcgcccgcgcctataaagcgccgagtctgtatcagaccaacccgaactacattctctacagtaaaggccagggctgctacgccagtaaagacggctgctatctgcagggtaacgacgacttaaaagccgagaccagcatcaacaaagagattggcctcgagtttaaacgcgacggctggctggcgggcgtcacctggttccgcaacgactaccgcaacaagattgaagcgggctatgccccggtctatcaaaacaataaaggtaccgatctctaccagtgggaaaacgtgccgaaagcggtggtggaaggtctggaggggacgttgaacgttccggtgagcgagaccgtcaactggaccaacaacatcacctatatgctgcagagtaagaacaaaaagaccggcgatcgtctgtcgattatcccggaatacacgctgaactccaccctgagctggcaggttcgcgatgacgtttcgctgcagtcgaccttcacctggtacggcaagcaggagccgaagaagtacaactacaagggtcaaccggtcaccggcagcgagaagaacgaggttagcccctacagcatcctcggcctgagcgcgacctgggacgtcaccaaatacgtcagtctgaccggcggcgtggataacgtcttcgataagcgccactggcgcgcgggcaacgcccagaccaccgggggcgccaccggcacgatgtacggcgccggcgccgagacctacaatgaatcgggccgcacctggtacctgagcgtcaacacccacttctga

SEQ ID NO: 137621 - DNA, 624 bp, Enterobacter cloacae
atgcgccaccatcgcaccgttttgcctctggccggctataccatccagcagatcgacttcgacccggcgactttccagcctgaagatctgttctggctgccttatcacgccagcctgaccgggtggggccgcaagcggcaggcggagcacctggccggacgcatcgccgcggcatacgccctgcgcgaggtgggggagaaacggcttcccgccatcggcgatcggcgccagccgctgtggcccacgccctggttcggcagcataagtcattgcggccagcgcgcgctggcggtgatcgccgatcggccggtgggcgtcgatatcgagcgccggtttaccccacagctggccgcggagctggagagcagcattatcagcccggcggaaaaaacggcgctgctgcacagcggcctgcccttcccgctggcgctgacgctggcgttttcggcaaaagagagtgggtttaaggcctgcgataccgacgtacaggcgggcgtcggttttaacgattttacgctggctgcaataaaggaaggaaatctgcgtcttcggctctccaccgtggagtatcggctgcaatggattcaggcaggggaatacatcatcacgctctgcgcgccgtaa

SEQ ID NO: 137622 - DNA, 936 bp, Enterobacter cloacae
atgagtaatgcagaacacctggctaacgtcatggtcgaagcctttatcgccgccgtggagcgcggcgtcgatctggtgccggtggtagccgactccacgtcaacggccaaaatcgcgccgtttattaaacagttccccggccggctggtgaacgtcggcatcgccgagcagagcatggtcggcaccgccgccggtctggcgctgggcggaaaagtggcggtgacctgtaacgccgcgccgtttcttatctcgcgggccaatgagcaaatcaaagtggatgtctgttacaacaacaccaacgtcaagctgttcggccttaacgccggagccagctacggcccgctggccagcacccaccattcaattgatgacctggcggtgatgcgcggcttcggcaatatccagatcttcgccccctccacgccgcgcgaatgtcggcagatcatagactatgcccttgcttatcagggcccggtctatattcgtctcgatggcaaggcgctgccggagctgcttgacgagtcgtatcgctttgttcccggcgccgtgttgaccctgcgcgaaggcgaggacgtcgcgctggtggccaccggttcgacggtgcatgaggtggtggaggcggcgcagcagcttgccgacctcggtatccaggcgaaagtggtcagcgtgccgtcgatccgaccctgcgataccgcggcgctgctggcggcactccggccgtgcggctcggtgatcaccgtcgaagagcataacgtcaacggcgggctgggcagcctggtggcggaagtattgactgaggctggggtgggtatcccgctcaaacgtctggggatcccggatggtgagtatgcggcggcggcagatcgcggctggctgcgtaaacaccacggtttcgatgccgcttccgtcgcggagctggcgcagaaaatgcgctga

SEQ ID NO: 137623 - DNA, 390 bp, Enterobacter cloacae
ttgatcaccggcgacggcgaactggcggaaggcagtaactgggaagccgccctggcggctgcacattacggcctggataatctggtcattattaatgataagaacaacctccagctggccgggccgacgcgcgaaatcatgaataccgatccgctggccgataaatggcgcgccttcggtatggaagtcagcgaatgccaggggaacgacatggcctcggtggtctcggtcatcgaggggttgaagcaggaaggtaaacccaacgttattattgccaacaccacgaaaggtgccggtatttcctttatccaggggcgcccggagtggcaccaccgggtgccgaaaggcgaagaaattgcactggcactggaggaactgaaagatgagtaa

SEQ ID NO: 137624 - DNA, 507 bp, Enterobacter cloacae
  misc_feature (430)..(439): n is a, c, g, or t
atgaatccctacagatatgatattcagacgctggagcgtaaagcccgcgcggtgcggcgccatattgtgcgcttaaacgccaatagtccggccggcggccacaccggggctgacctttcgcaggtcgaactgttaaccgcgctctatttccgcgtccttaacgtcgcgccggaccggctcgacgacccgcagcgcgatatctacatccagtcgaaaggccacgccgtgggctgctactactgcgtcctggcggaagccggcttcttcccggtcgagtggctggagacctaccagcatgccaattcccatctccccggccacccggtgcggcaaaaaacgccgggcatcgagctcaacaccggcgcgctgggccacggtttgcctgttgcggtggggctggcgctggccgcgaagaaaagcaacagcaccnnnnnnnnnnaagaaaagcaacagcccccgccgcatttttttgatcaccggcgacggcgaactggcggaaggcagtaa

SEQ ID NO: 137625 - DNA, 951 bp, Enterobacter cloacae
atggctaagcaggatgaacaacggctattggttaagattgccacgctttactatctggaaggacgaaagcagtctgatatcgcccaacttctctcgctgtctcagtcatttgtctcccgcgccattacccgctgccagaaagaaggcgtcgtcaagatcagcgtcgttcagccgtccaacatctttctgaagctcgaaaaagggcttgaggatcgctacggccttaagcaggcggtggtggtggataccgaggaagaggccagcgatcataccatcaagcgggcgattggctccgccgccgcccactatctggaaacccggctgcggccaaaagatctgattggcgtctcctcgtggagctcaaccattcgcgcgatggttgatgaagttcatgcgcaaaacctgaaagccagcggcgtgatccaactgctcggcggcgtcgggccaaacggtaacgtgcaagcgacgattcttacccagaccctcgcccagcgcctgaattgcgacgcctggctgctgccgtcacagagcatcgaaggatccatggaggagcgcaaccggctgctggccagcaaagacgtcgctgacgtggtgtcgcgctttgatgaagtggatatcgccatcgtcggcatcggcattctcgaaccctctcaactgctgaaaacctccggtaactactatcacgaagatatgctgcaggtgctggcggcgcgcggcgcggtgggtgatatctgcctgcactactacgacaaaaacggccatccggtgttacgcgatgatgaagatccggtgatcggtatggcgctggagaaggtcaaaaaatgcccgaacgtggtcgcgctggccggcggtaccgacaaagtcgcggccatcaaaggcgccctcaccggcggctacattgatgttttaatcaccgattaccctaccgctcgcatgctggttagcgactaa

SEQ ID NO: 137626 - DNA, 1521 bp, Enterobacter cloacae
atgcaggcgacagcaaaagagttcatcattgccctggatgaaggcaccaccaacgccaaagcggtggtgctggatagccggggcaaagttatcgtcaaattctcgcagccgctggcgatccaaacgccgcgcgacggctgggtggagcaatcgggcgaagcgctggttaccgcctcactgacggtgatcgccagcgcggtggcccacgttggcgcggaaaacgtcgccgcgctggctatcagcaaccagcgggaaaccgccattggctggtatcgcgacagcggcgaaccgattaacgcggccattacctggcaatgcacccgcagcgccgcgttctgcgacacgctgcgtcacgatcgtcaggaacagcacattaagcgtgccaccggcctgccaatcgccccgctgttctcggcctccaaaatgcgctggctgctggatgcgactgtcgatggccacctgcgcgccgaacgcggtgagatttgcctcggcaccatcgacagctggctgctgtggaatctgactgctggagaagccttctgctgcgactactccaatgcctcccgcacccagctgctgaacctgcaccgcggcgagtgggacgacgagatgctggcgctgttcggcattccgcgcgcggcgttgccggaaattaaaccgtcgagcggcctcttcggccataccaaaggactggccgccattccggacggtattccgatcatgtcgatgatcggcgactcccacgccgcgctgttcggccacgcgctcggcgaggcaggctgcgtcaaagccacctacggcaccggctcttcggtcatggccccggtcaaatcggcgcagtgcgatatcgacgcgctggcgaccaccgtcgcctggcacgatggcgaccagctggtgtggggcctggaagggaatattccccacaccggcgatgctgtcgcctggatggcggacagcaccggactgagcgaactctctgccgccgagctggcccatgagctgaataccctccccgcctccgtcgactcaaccctcggggtctacttcgtgccggcgctgaccggtcttggcgcgccctggtgggatgacagcgcccgcggcgtgatttgcggcctgagtcgcggggtgaaacgcgcgcatctgatccgtgcggcgctggagtccatcacctatcagatagccgacgtggtggtggcgatgcgtcagcatgaggagttcaccctgacggcgttgatggtggacggcgggccgaccaacaatgactggctgatgcaataccaggccgatctgctcggctgcccggtgatgcgcagcgacgtgccggagctgtccgccatcggcgcggcgttgctggcacgcaaagcgctccatccgggatcgaccgccgatctgcaggccttcttaaccgaacatagcacctttcagcccgacatggcccgccaccagcgcttacaaacgcgctggcaggagtggcgccatgcggtcgaccgaacattatggaaaccggactcgccagcctga

SEQ ID NO: 137627 - DNA, 936 bp, Enterobacter cloacae
atgaaattacgtataacccttttaaccgctgcgaccctgaccgccttctcctttgccgcgcacgccgcggagaaaggcaccattatgatcatggtcaactcgctggataacccgtattacgcctcggaagccaaaggcgccagcgaaaaagcgcaagctctcggctacaaaaccaccgtgctgtcccatggcgaagatgtcaaaaagcagaatgagcttatcgacaccgcgattggtaaaaaagtgcagggcattattctcgataacgctgactccaccgccagcgtcgccgccgttgaaaaagccaaaaaagcgggcattccggtggtcttaattaaccgcgaaattccggttgatgatgtggcactggaacaaattacccacaataacttccaggccggctctgaggtcgccaacgtcttcgtcgagaaaatggcggagaaaggcaaatacgccgagctgacctgcaacctcgccgataataactgcgtcacccgttctaaatctttccatcaggtcattgaccaatatccggatatggtcagcgtggcgaaacaggatgccaaaggcaccctgatcgacggcaaacgcatcatggacagcatcctgcaggcgcaccccgacgtgaaaggcgtcatctgtggcaacgggccggtagcccttggcgcgattgcggcgctgaaagcggccaaccgtagcgatgtgatcgtcgtcggcatcgacggcagcaacgatgagcgcgacgccgtgaaagccggcaccctgcaggcaaccgtgatgctgcaggcgcaggccatcgccgctcagggcgtcaccgatctggataactacctgcaaaaaggcgagaagccggcgaagcagcgcgtgatgttccgcggcattctgattactcaggataacgccgataaagtccaggatttcaacattaagtcctga

SEQ ID NO: 137628 - DNA, 621 bp, Enterobacter cloacae
atgtttaagaaaacctgtctgacgctggccgtactggcgctagggggctgtcgcatcgtctcgcagcaggagctggcagacctgaaatccccgcccaacccgcatatggcgaatatggataaaacctggcagcagagcatcgtaccgcaggtggtgacgaaagcgcgtccggcggcggaactgatgagcgcgctcaaggcggcaaaagacattgatagcgcctgtaaaaccctcggctaccgtgcgcaggatgaaaacccctgcatcttctacgtcaaggtttcaggtaccgtcagcaaactcgataccgcctcgcgcagcggcaaaatgaccttgaccgacgccagcgtcgggaaggtgacggtgcagattggccctaccctgcgcggcacccagctgcgcgacggctacagcggcgccagctatcaggactttaatgaccaggtgctgttcggcgagtacagcaagaatatcaacagtcaggcggtcaaaatgattcagacagccaacgtcaaaaccggcgacagcgtggaggtgtacggcgtcttctcggcctgggatattccacaaactctcccggaaattaccccggcgaaaatcattcatgcagggggacaataa

SEQ ID NO: 137629 - DNA, 1545 bp, Enterobacter cloacae
atggcgccgcacgatctcgtcgctccccagcccgttgagtccgaagtgattatcgaaacccgcggcctgtcgcgcgtctatcccggcgtaaccgccctggataatgtcaattaccgggtctatcgaaataaggtcaacgtgctaatcggagaaaatggtgcgggtaaatccaccatgatgaaaatgcttgccggtgtggaaacgccctcctccgggcaaattatcctcgatggtgaagcagtttcattacagtcgacgcatcaggcagaaaaactgggcatcagtattatttttcaggaactgaatttatttcccaatatgaatgtgatggacaacatcttcatggcgaatgaattctttcagaaaggacgcattaacgaaaaataccagtacgcgctggccaaatcgctgctggaacggctggagctggatgtcgatccttacgctccgctgggtgaactcggtatcggccaccagcagttagtcgagattgcccgcgccctgtcgaaagacacccgcgtgctgatcatggacgagcccacctcggcgctgagccagtctgaggtcaaagtgctgttcaaggtgatcgcgcagcttaagcggcgcggcgtgaccatcatctatatctcgcatcgcctcgaagagctgatggagattggcgacaacatcaccattttccgcgacggtcgctttatcagcgagcgtcacgtcagcgacgccagcgtaccgtggatcatcgagcagatggtcggtgataagaaaaaacactttgattatcaaccggcgccaaaaggcgacgcagtgcttgacgtcaaagggctgaccgcgctgcatcccagcggcggttacaagctcaatgacgtcaccttcaccctcagcaaaggcgaagtgatcggtatttacggcctgctgggcgccgggcgcaccgagctgtttaaaggcctggtcggcttgatgccctgccagcgcggcgaggtgcatcttaacggcgaaagcatcggcaaatctcgctttcaacagcgcctgaaaaaggggctggcgctggtgccggaggaccgtcagggcgaaggcgtggtgcagatgatgtcgattcaggccaacatgacgctctctgatttcagcctgcaggggttccgccgcgcctggcgctggttgaacccgcaaaaagaagagacctgcgtgaaagagatgatccagcagctggcgatcaaggtcagcgacgccacattgcccatcacctcgctgagcggcggcaatcaacaaaaagtggtgctgggtaaagcgctgatgacccagccgcaggtggtgttcctcgacgaaccgacgcgcggcatcgacgtcggcgcgaaaaccgacgtctatcacctgatcggcaaaatggctcagcaggggctggcggtgatgttctcatcttcggaactggatgaggtgatggccctggccgaccgcatcctggtgatggccgatggccgcattaccgccgatttaccgcgccatgcggtgacccgcgaacagttaatcgcggcttcaacacctcaagattaa

SEQ ID NO: 137630 - DNA, 1068 bp, Enterobacter cloacae
atgaaccagaaatatatgatttatatgtacctgctgaaggcccgcacctttatcgccctcctgctggtgatcgcgttcttcagcgtgatggtacccaacttcctgaccgcctctaacctgctgatcatgacccagcacgtggcgatcaccggcctgctggccatcggcatgacgctggtcattctcaccggcggcattgatttgtccgtcggcgcggtggcggggatctgcggcatggtcgcgggcgcgctgctgaccaacggcctgccgctgtggaacggcgatatcctcttctttaatgtcccggaggtgatcctctgcgtggcgatcttcggtgtgctggtcggtctggtcaacggcgcggtgatcacccgcttcggcgtggcgccgtttatctgcaccttaggcatgatgtacgtcgcccgcggctccgcgctgctgtttaacgacgggagcacctacccgaatctcaacggcatggaagcgctgggcaacaccggtttcgccaccctcggatccggcaccctgctcggcgtctatctgccgatctggctgatgatcggcttcctcgtgctgggctactggctgaccactaaaacgccgcttggccgctacatctacgccatcggcggcaatgagtctgccgcccgcctcgccggcgtgccgatcgtgaaagcgaaaatattcgtctatgccttctccggcctgtgcgcggcgtttgtcggcctgatcgtcgcatcacagctgcaaaccgcgcacccgatgaccggcaacatgtttgagatggacgccatcggcgccaccgtgctcggcggtaccgcgctggccggcggccgcggccgggtgaccgggtcaattatcggcgccttcgtcatcgtcttccttgccgacggcatggtgatgatgggcgtcagcgacttctggcagatggtgattaaaggcgtggtgattgtcaccgctgtggtcgtcgaccagttccagcagaagctgcagagcaaggtcatcctgatgcgccgccacgaggaaaaactggccgccatcccccccaacggcgccacctccagctaa

SEQ ID NO: 137631 - DNA, 798 bp, Enterobacter cloacae
atgcaacgagatttccagaacaaaacggtggtgatcaccggcgcctgccgcggcatcggcgcaggcattgccgagcgctttgcccgcgacggcgcgaatctggtgatggtctccaacgccgagcgcgttcacgagaccgccgaaaccctgcgtcagcgctatcaggcggatattttatcgctgcaggtcgatgtcaccgatgaagcccaggttcaggggctatatgagcaggccgccgcgcgcttcggcaccatcgacgtctccattcagaacgccggggtgatcaccatcgattactacgaccggatgccaaaagccgatttcgaaaaagtgctggcggtcaacaccaccggcgtgtggctgtgctgccgcgaggcggccaaatatatggtgaaacagaatcacggcagcctgatcaacacctcttccggccaggggcgacaggggtttatctacacgccgcactacgccgccagcaaaatgggcgtgatcggcattacccaaagcctggcgcacgagctggcaccgtggaatatcaccgtcaacgccttctgccccggcatcattgagagcgagatgtgggattacaacgaccgcgtgtggggcgaaattctcagcaccgagcagaagcgctacggcaagggcgaactgatggcggaatgggtcgaagggatcccaatgaaacgcgccggtaagccggaagacgtggccgggctggtggccttcctcgcctccgacgacgcgcgctatctcaccgggcagaccatcaatatcgatggcggtttgattatgtcgtaa

SEQ ID NO: 137632 - DNA, 786 bp, Enterobacter cloacae
atgatcggtaaagactttgcacaacacctatttagcctgcgggatcgcgtcgccttcgtcaccggcgccggcagcggtatcggccagaccatcgcctgcagcctcgccagcgcgggtgcacgggtagtctgttttgatcttcgcgacgacggcgggctggcggaaacggtcagccatattgaatccatcggcggtcaggcttgttcttttaccggcgatgtccgccagattgccgacctgcgcgccgccgttgcgctggccaaaaaccgctttggccgcctcgacatcgccgtcaacgccgccgggatcgccaacgccaatccggccctggagatggagagcgagcagtggcagcgggtgatcgatgtcaatctcaccggcgtatggaactcctgcaaagcggaagcggaactgatgctggagtccggcggcgggtcgattatcaatatcgcctcgatgtcggggattattgttaaccgcggcctcgaccaggcgcattacaactgctccaaagccggcgtgatccatctgtcgaaaagcctggcgatggagtgggtgggcaaagggatccgcgtcaattccatcagtccgggatataccgccacgccgatgaatacccgtccggagatggtgcaccagacccgcgagtttgaaagccagacgccgatgcagcggatggcgaaggtggaagagatggccggcccggcgctgttcctcgccagcgacgccgcctcgttctgcaccggcgtagacctggtggtcgacggcgggtttgtctgctggtga

SEQ ID NO: 137633 - DNA, 627 bp, Enterobacter cloacae
gtggcgcaaaacgccaccggctatgccggactgctggcggatgctgacggcgtggtggtggaaaccctcgctgagccggggcaggtggtcagcgccgggcaggtggtgatccgcctggcgcgggcggggcagcgcgaagcgcgggtgcaactgccggagacgctgcgcccggcggtcggcagcgaggcgctggcgacacgctatggcagcgaatctcagccggtcacggcgaccctgcgcctgctttcggacgcggctgacgccaccacccgcacctttgaagcgcgctatgtactgaacggcgcgctggcgaatgccccgctggggtctaccgtgaccctgcgcatcggcaacgaccaggcgccaggccaggtgctggcggtgcccctggcgtcggtctacgatccgggtaacggccctggcgtctggcgcattgcctctcgtccggccaccgtctcctggcaaccggtaactgtgctcggcctggatgatgaaaccgcgcgggtgaccggcccgctgaagcccggcgagccgatcgtcgccctgggcgcccatcttctgcaccagggcgaggcggtgcgtctggcggaacgacgcgagcataatgccgccgggagccagccatga

SEQ ID NO: 137634 - DNA, 3093 bp, Enterobacter cloacae
atgagcgccgggcgttttaatctctccgcgctggccgtccgcgagcggtcggtgaccctgtttttgattatccttatctccgtcgccgggctggtggcgttcttcggactcgggcgagcggaagatccgccctttacggtcaagcaaatgacggtcattaccgtctggcccggcgccaccgcgcaggagatgcaggatcaggtcgccgagccgctggaaaaacggctccaggagttaaagtggtacgatcggacggagacctatacccgccctggcatggcgttgatcaccctgtcgctgcaggatcagaccccgccttccgaggtgccggagcagttttatcaggcgcgcaaaaagctcggcgacgaggcgaaaaatctgcctgccggcgtctccggcccgatgatgaatgacgaattcgccgacgtcacctttgcgatctttgccctgaaggcgcgtggagagccgccgcggcagctggtgcgtgacgccgaagccttacgccagcagctgctgcatgtacccggggtgaaaaaagtgaatatcctcggcgaacaggcggagcgcatttatctctcgttttctcatgaccgtctcgccactctgggtctctcgccggaggcgatttttgccgcgctgaacagccagaatgtgctgaccgccgccggggctatcgagacccggggcgggcagatctttatccgcctcgacggggcgttcgaccgcctgcagcagatccgcgacacgccgattattgccgggggcagaacgctgaaactggccgatgtcgccacggttgagcggggatatgaagatcccgccaccttcctgatccgccatcagggcgaaccggcgctgctgctgggcgtggtgatgcgcgagggctggaatggtctggcgctgggaaaagcgctggatgccgaaacggccagcatcaatcagaacctgccgctcggcatgtcgttgaccaaggtgaccgatcagtcggtgaatatcagcgccgcggtcgatgagttcatgatcaaattctttgtcgccctgctggtggtgatggcggtgtgctttgtcagcatggggtggcgcgtgggcgtggtggtcgcggcggcggtgcctttaaccctcgccgtggtgtttgtggtgatggcggcgaccggcaaaaacttcgaccgcatcactctcggctcgctgatcctcgccctggggctgctggtggatgatgccatcattgccatcgaaatgatggtggtcaaaatggaagaggggtatgaccgcctcaaagcctcggcctatgcctggagccataccgccgcgcccatgctggccggtaccctggtgacggccgtgggctttatgcccaatggatttgcgcagtccaccgccggggagtacgccagcaatgtgttctggatcgtcggtatcgcgctgattgcctcctggattgtggcggtgatttttaccccctggctgggggtgcacctgttgccggacagaaagcccgtggcggccggccacgccgcgctgtatgacaccccgcgctatcagcgcttccgtcggctgctgacccgggttattgctcataaatggcgcgtggccgccggagtggtggcgctgtttatcgtggcgatcctgggcatgagcgtggtgaacaagcagtttttccccacctccgatcgtccggaagtgctggttgaagtgcagctgccttacgggtcgtcgattagccagaccagcgccgcggcggcgaaaattgagcactggctgcagcggcagccggaggcgaagattgtcaccagctatatcggccagggcgcgccgcgcttttacctggcgatggctccggaattgcccgatccctccttcgccaaactggtggtgttgaccgacgggcagggtgcccgcgaggcgctcaagcggcggctgcgggaggcggtggccaatggcctggcgccggaggcgcgggtgcgcgtcactcagctggtgtttggcccttattcgccttatccggtcgcctggcgggtgatggggcccgatccgcacgctctgctcgacatcgccgagcgggttaaatcggtgctgcaggccagtccgctgatgcgcaccgtcaataccgactggggttcgcgggtaccggtgatgcatttcagcctcaatcaggaccggctgcaggcgagcggactcagctcccagtccgtcgcccagcagctgcagttcctgctgtcagggatcccgatcaccaccgtccgggaagatattcgcgccgtgcaggtgatcggccgcgcggcgggcgacatccgtctggatccggcgaaaatcgccgacttcaccctggtgggcagcggcgggcagcgggttcccttgtcacagattggcgacgtgtcgatcaggatggagtacccgctgcttcgccgtcgcgaccgcacgccgaccatcaccgtccgcggagatgttgcggagaacctgcagccgccggatgtctccatcgcgctgatgaagccgctgcagcccattatcgactcgctgccgcctggctatcgcatcgagacggcggggtcgattgaggaatccggcaaggccactcgggcgatggtgccgttatttccgataatgatcgccctcacgctgctgatcattatcctgcaggtgcgttcgctgtcggcgatggtcatggttttcctgaccgcgccgctggggctgattggcgtggtcccgacgctgctgctgttcaatcagccgtttggcatcaatgccctggtgggcctgatcgccctgtcggggatcctgatgcgcaatacgctgatcctgattggccaaatccatcataaccaacaggcggggctcgatccgttccacgcggtggtggaggcgacggtgcagcgcgcccgcccggttctgctgaccgcgctggcggcgatcctggcgttcattccgctcactcattcggtcttttggggaacgctcgcctatacgctgattggcgggacgctggggggaaccatcatgacccttatcttcctgccggccatgtacgcgatctggttccgcatccgtccggagaacacggtacagcagacagagttgcaccttcagaggtaa

SEQ ID NO: 137635 - DNA, 1185 bp, Enterobacter cloacae
atgattgtttcagcccccagcgattatcgcgaagccgctcgtcgtcgtctgccccgcttccttttcgattatattgacggtggcgcggtggcggaaaacaccatgaacgccaacgccgccgagcttgcctcggtagctcttcgccagcgcgtactgtgcggggccggcgaaccgacgctggcgaccacgatccttgatgccccatgggcgatgcccgtggcgctggggcccgtcggcgccaccgggatgtacgcccgccgtggcgaagtccaggcggcccgcgccgcctcccgcgccgggatcccgtacaccttatccaccgtgtcggtctgctcgattgaagaggtggcgagccacgccagcggcgcgctctggtcccagctgtacgtactcaaagatcgcggctatatgcgtaacgcgctggagcgcgcctgggccgctggcatgaaaaccctggtatttaccgtcgatatgccaatccccggctcgcggtatcgcgataaccgctcagggatgtccgggccgcacgccaccctgcgacaatatctccaggcttgcacccatccgcgctgggcgatgaacgtcgggctggcgggcagacccctgtcgtttggtaatatcgaagcctacaccggccacaaaatgaccatggacgactatatggggttcatcagcaacaacttcgacccgtccatcgcctggcacgatctggagtggatccgcgacagctggcaaggaaaattaatcatcaaagggatcctcgatgccgacgatgcgcgcaatgccgtgcggctgggcgccgatggtattgtggtgtcaaatcatggcggcagacagctcgatggcgccatccccaccgcccgggcgctgcccagggtggtggatgcggtcggcgacgatctgacagtgcttgccgattccggggtgcgctccggcgtggacgttatacgtctgctggccctcggcgcgaaaggcgtgctgctcggtcgggcctatatttatgccctggccgcggcgggcgaagcgggcgtggcgcatctgctgcgcttatttgccgaggatatgaaggttaccatgaccctcaccggcgcgacctcgccatcggccatcagcctcgattgccttgatcgcctcgaacaggatcaacaccgcactcatgcggtgccggtatccttacccgcctga

SEQ ID NO: 137636 - DNA, 633 bp, Enterobacter cloacae
atgagcgaaacccctcgtcagaaaggtcggccaaaagatccattgaaaacgcaggcgatacttcaggccgcccgtaagctgtttctggaacagggcctggaggtgacaacggccgaaatcgcccgcgtagccggggtggcgaaagccaccctgtatgccaatttcagcgataaagaacatctgatagaggcggtcttacgccaggaatcggatctcaccatcagcgaccatgatttcgcccagcgccatcatctgccgctgatcgaggtgctgacggcgtttggctatcgctttgtccgctttatcaaccagcgggaactgaccggctgggaccgactgatcgcctcggctgccgtgcgtcaccccgatctccccggccgcttttacgccgccgggccggggcgcgcgcagcagatgctggaagcgatcatcgccgaggcgatcgaagccggtactttacgagcctgcgatccgcaggaggctgccgacgaactggccggtttatggctgggaatgaccagcctggcgataaaacttggcgcaagacctccgctgtccgacgacgaaatcaaacagcgggttgagcgcgccctggacgtctttctgcgcgcgtattccctggcgccgggctga

SEQ ID NO: 137637 - DNA, 396 bp, Enterobacter cloacae
atgcctaattcgaccttatttttcatcaccctttgtctctctcgcgtcctggtgaccttcttcttctggatggcaggcatctacggcgtctttcatttcgcggagatcgttcaggagatggtgaccgtcggcctgccgtggccggtcttgttcgcagcgggcacgattttttgccagctggcgggttcggcgctgatcgtttttaatcctgccggctacggctggattggatcggtgatgctgattgtgtttacattactcactattccgctgggacacgccttctgggccttcagtgaaccccggcgcactgaggaattccatattgcgcttgaacacattaccgtggtcggaggattaattatgagcgcgctgtttgcaggctatcggcgatga

SEQ ID NO: 137638 - DNA, 198 bp, Enterobacter cloacae
atgaaagataaagatgaacaaacggcattgattggcatggccatcggcgcggcggtcattagcttagtggctacacaaaagcagattaatcaggggagtatcgtggatgaactggtgaggctgggcagacagaagggggacggggtagaggatgaggtctttgtccaggccgcccggctggtgagtaaaggcacctag

SEQ ID NO: 137639 - DNA, 378 bp, Enterobacter cloacae
atggaagtacaagcaggaacttttaatcccgccgatttcagctggcagggactgaccatgacgccggccgctgccgcgcatatccgcgatctgatgcgcaagcagccggataagaaagggctgcggctgggcattaaaaccagcggctgcgctggttttggctatgtgctcgaaatgattgccgagccggcgcccgacgatctgctctttgaatctgacggggcgaagctgtttgcgccgctgcaggcgatgccgttcatcgacggcaccgagctggattatgtccgggaaggtttaaatgaaatctttaaatttcataacccgaaagcgcagcatgagtgcggctgcggcgaaagttttggggtgcaggcggagtaa

SEQ ID NO: 137640 - DNA, 1488 bp, Enterobacter cloacae
atgtcgcgtaatactgaagcaactgacgatgtcaaaacctggaccggcggcccgctcaactacaaagagggcttttttactcgcctgcaaaccgatgagctggccaaaggcattaatgaagaagtcgttcgggctatctcggctcgccgcaatgagccgcagtggatgttggagtttcgtctgaatgcctaccgggcgtggctggaaatggaggagccgcactggctgaaagcgcattacgataagctgaattatcaggattacagctactattccgcgccctcctgcggcaactgcgatgagacctgcgcctctgagcctggcgcggtgcagcagaccggggccaatacatttctgaccagcgaggtggaagaagcctttaaccagctgggcgtgccggtacgcgaagggcgcgaggtggcggtggacgcgatatttgactcggtgtcggtggcgaccacctaccgagaaaagctggccgagcaggggatcatcttctgttctttcggcgaggcgatccacgaccatccggaactggtgaaaaagtatctgggcaccgtagtgccggggaatgacaacttctttgccgcgctgaacgccgcagtggcttcggacggcacctttatctatgtgccgaagggcgtccgctgcccgatggagctgtcgacctatttccgcatcaacgccgaaaagaccgggcagtttgaacgcaccattctggtggccgatgaaggcagctacgtcagctatattgaaggctgctcggcgccggtgcgcgacagctatcagctgcatgccgcggtcgttgaagtcatcatccataaagacgcggaagtgaaatactccacggtgcagaactggttccccggcgataacaacaccggcgggatcctcaacttcgccaccaagcgcgccctgtgcgaaggggagaacagcaaaatgtcatggacccagtcggaaaccggctcggccatcacctggaaataccccagctgcatcctgcgcggcgataactcgatcggcgaattcttttcggtggcgctgaccagcggccatcagcaggcggacaccggcaccaaaatgatccatatcggcaagaacacccgctcgaccatcatctcgaaagggatctccgccggacacagtcagaacagctatcgcgggctggtcaaaatcatgccgaccgccaccaacgcccgcaactatacccagtgcgattcgatgctgatcggcccggactgcggggcgcataccttcccgtatgttgaatgccgcaacaacagcgcccagctggagcacgaggcgaccacctcgcggattggcgaagatcaattgttctactgcctgcagcgcgggatcagcgaagacgatgccatctcgatgatcgtcaacggtttctgtaaagacgtcttctccgagctgccgctggagttcgctgtagaggcgcaaaaattgctggccattagccttgaacatagcgtcggctga

SEQ ID NO: 137641 - DNA, 747 bp, Enterobacter cloacae
atgttaagtattcaagatttacacgtcgccgtcgaagataaagcgatcctgcgcgggctgaaccttgaggtgcgcccgggagaggtccacgccattatggggccgaacggctcaggcaaaagtacgctttcggccaccctggccgggcgtgaagattatgaggtgactggcggtcgcgtcgaatttaagggcaaaaacctgctcgaactcgctgcggaagatcgcgccggggaaggtatctttatggccttccagtatccggtagagatccccggcgtcagcaaccagttcttcctgcagactgcgctgaatgccgtgcgcaactatcgtggccaggaggcgctggatcgtttcgatttccaggacttaatggaagaaaagatcaagctgctgcagatgccggaagatctcctgacccgctcggtgaacgttggcttctccggcggtgagaaaaagcgcaacgatattttgcaaatggcggtgcttgagccggagctgtgcattctcgatgaatcggattcggggttggatatcgatgccctgaaaatcgtctcgcagggagtgaatgccctgcgcgacggcaaacgcgcctttatcattgtcacccactatcagcgcatccttgactatatcaagccggactatgtccatgtgctgtatcagggacggattgtgaagtcgggcgatttctctctggtcaaacagctggaggagcagggctatggctggcttaccgaacagcagtaa

SEQ ID NO: 137642 - DNA, 1275 bp, Enterobacter cloacae
atggctggcttaccgaacagcagtaacgcgctgcagcagtggcaccatctgtttgaagcgcagggcggcccgcgtaccccggaggccagtcagcatctgcagcagctgctgcgccttgggctgccgacgcgcaagcacgaggactggaaatacactccgctggatgccctacttaacggtcgctttgtcgccgatgagggagcctctctcagtgctgaacagcgtgatgcgctggcgctgccgctggacgcctggcggctggtgtttatcgatggccgctatcatcctcagctgagcgacgatcttgccgccagcggcgtggaggtcagtgtcgataatcagcgccagcatctgccgcatgccctgcagccggaggtgtttctccatctgaccgaaagcctggcccagacggtgacccgcattcgcgtgccgcgcaaccgccgcctggataaacctctgctgctgatgcatatcaccagtggcctgaccggcgatgcgctgaataccgcccactatcgccatcacctggcgctggagagcggggcggaggcgacgattgtcgagcattacctgagcctcaatgagcagccgcatttcaccggcgggcgattgaccatgacggtggccgataacgcgcacctccagcatatcaagctggcatttgagaatgcccgcagctatcacttcgcccataacgacctgctgctgggccgcgacgcctcggccttcagcagcagtttcctgcttggtggccaggtgctgcgtcaccagaccagcacccgcctgggcggcgaaaacagcaacctgcgcctcaattcgctggcgatgccggtgaaaaatgaggtctgcgatagccgcacctggctcgaccatcaggtcggctactgcaccagccgccagctgcacaaaaccatcgtcagcgataaggggcgggcggtgtttaacgggctgatcaacgtcgcgccgctcgcgctgaaaaccgacggtcagatgaccaacaataatctgctgctcgggcggctggcggaggtcgacaccaaaccgcagctggaaatttacgccgatgacgtgaaatgcagccacggggcgacggtggggcgcattgacgaagagcagctgttctatctgcgctcgcgcggtatcgaacagcaagcggcgcagcagatgatcctctacgccttcgccgccgagctcaccgaggctatccgcagcgacgcgctcagagagcaggtgctggcgcgtattggacagcgtttgccgggaggcactgtatga

SEQ ID NO: 137643 - DNA, 1221 bp, Enterobacter cloacae
atgacattttcagtagaacaggttcgcgccgattttccggtactgaaccgggaggtcaacggtcagccgctggtctatctcgacagcgccgccagcgcccagaagccggaggcagtgatcggcgccgaagcggaattctatcgccacggctacgcggcggtgcaccgcggcatccataccctcagcgcggaagccaccgcgcggatggaagccgtgcgtcagcaggcggccaccttccttaacgccggatcggcggaggaagtggtgttcgtccgcggcaccaccgagggtatcaacctggtggccaacagctggggaaacgccaacgtcggcgccggggataacatcatcatcagcgaaatggagcaccacgccaatattgtgccgtggcagatgctctgcgcccgcgtcggggctgagctgcgggtgatccccctgaacccggacggtacgctgcaactggatgttgtcccgggactgtttgacccgcgcacccgcctgctggcgataaccgaggtctccaacgtgctggggacggaaaacccgctggcggcgctgattgctcttgcgcatcagcatggcgcgaaagtgctggtggatggcgcccaggcggtgatgcaccacccggtggacgtccaggcgctgggctgcgatttttatgttttctccgcccacaagctgtacgggccgaccgggatcggcgtgctctacgcccggtccgagctgctgcagacgatggcgccttgggaagggggcgggtcgatgatcgccaccgtcagcctgacggagggcaccacctggaatcaggcgccgtggcgctttgaggccggcacgccgaataccggggggatcatcggcctcggcgcggcgctgacctacgtcagccagctgggactgacgcagattgccgagtatgagcagacgctgatgcgctacgcgctcgatgccctgcgcgcggtaccggatctgatcctttacggcccggcgcagcgtaaaggggtaattgctttcaacctcggtcagcatcacgcctatgacgtcggcagcttcctcgataactacgggatcgccgtgcggaccggacaccactgcgcgatgccgttgatggcccggtatcaggtaccggctatgtgtcgggcatcgctggcgatgtacaataccacggaagaggtggaccgcctggtggccggcctccagcggatccgcaaactgttagggtaa

SEQ ID NO: 137644 - DNA, 417 bp, Enterobacter cloacae
atggcggcactaccggacaaagacaaactgttgcgtaactttagccgttgcgccaactgggaagagaagtatctctatatcatcgagcttggccagcgtctggcgccgctaagcccggaagaacatagcgtgcagaacattattcagggctgtcaaagccaggtctggatcgtgatggaccaggatcccacaggcgtgatcaccctgcgcggcgatagcgatgcggcgatcgtcaagggtctgatagcggtggtgtttatcctctatgaccggatgaccgctcaggacatcaccgagttcgacgtgcgcccgtggtttgaaaaaatggcgctcacccagcatctcaccccctcccgctcgcaaggcctcgaagccatgatccgcgcgatacgcgcgaaagcggcaaatattagctag

SEQ ID NO: 137645 - DNA, 987 bp, Enterobacter cloacae
atgaaacgcaaaacgatgatcaccttagcccttctcagcgcccttggcgcctccacggccgccagggccgttgattacccgcttcctcccgccaacagtcggctgattggtcagaatcagtactggacggtccaggagggagatcgcaacctgcaggcgattgcgcgccatttcgataccgcggcgatgctgatcctcgaagccaacgatacgattgcgccggtgcagccgaagcccggcactcaggtccttatcccttctcagatgctgctgcccgacgtgccgagggagggcattgtcgtcaacctcgccgaactgcggctgtattacttcccgccgggagagaatcaggtgcaggtctatccgctgggcattggccagttaggtctggaaacgccggagatgaccacccgcgtggggcagaagatccctaaccctacctggacgcctaccgccggcatccgcgcgcgctcgctggagaaaggggtgacgctgccagcggtggtcccggccggaccgaacaatcccctgggccgctatgcgctgcgtctggcctacggtaacggtgaatatctcatccacggaactaacgccccagacagcgttggtctgcgcgtcagctcgggctgtatgcggatgaacgctgatgacatcaaagcgctgttcagccaggtgaaaaccgggacgccggtacggattatcaatcagccggtgaagtttgccgtcgagccggatggtaaacgctatgtcgaagtccacaggccgctttcgcagaccgaaggggaaaacacccggaccatcgcttacacgctgccagcggcgtttcacgccttcgcagaggataaagcagtggatgacctgcagttgaaaaaagcgatgtcgagaagggcggggtatccggtggtggtgtcggcgggggcaggtagcgcggcgacgtcgctgtcggcgcagaatagttcgtctgacaacggtctgcttacccaatag

SEQ ID NO: 137646 - DNA, 645 bp, Enterobacter cloacae
atggcaattaaattagaaatcaaaaatctttataagatatttggcgagcatccacaccgtgctttcaaatatattgagaaaggactcaacaaagcgcaaatactggaaaaaacggggctgtcgcttggcgtcaaagacgccagtctggccattgaagaaggcgagatattcgtcatcatggggctctccggctcggggaaatccaccatggttcgccttctcaatcgcctgattgaacccacccgcggccaggtgctgattgacggggtcgatatcgccaaaatgtcggatgccgagctgcgcgaggtgcgtcgcaagaaaattgcgatggtttttcagtcctttgcgctgatgccgcacatgagcgtgctcgataacacggcgtttggcatggcgcttgccggcgttcccgccgccgaacgagagcaaaaagcccgggaggcgctgcgtcaggtggggctggagaattatgcccacgcctggccggatgaactctccggcggcatgcgccagcgcgtcggtttagctcgcgccctggcgattaatcccgatattctgttaatggatgaagccttctctgcgctcgatccgctcattcgtaccgaaatgcaggatgagctcatcaaattacaggcgaagcactga

SEQ ID NO: 137647 - DNA, 963 bp, Enterobacter cloacae
atgacccatttaacgcacgtcagcgcaatcaactggaaccgcattgatgacgataaagatcttgaggtctggaaccgtctcaccagcaacttctggctgccggagaaagtgccgctgtcgaacgacattcccgcctggcaaaccctcagcgcggcggagcagcagttgaccattcgcgtctttaccggattgaccctgcttgacaccattcagaacaccgtcggcgccccggcgctaatggcggacgccttaaccccgcatgaggaggcggtgctgtcgaacatcagttttatggaggcggttcatgcccgctcttacagctccatcttttccacgctgtgccacagcaaggaagtggatgccgccttcgcctggagcgaaagctgcgatcccctgcagcgcaaggcgcagctgatgctgggttactatcaggccgacgagccgctgaagaaaaaaatcgccagcgtgttcctcgaatcctttctcttctactccggcttctggctgccgatgtacttctccagccggggaaagctgaccaacactgcggatctgatccgcctgatcattcgcgatgaagcggtgcatggctattacatcggctacaagtaccagaaaggactggagatcgtcagccccggcaagcgcgaagaattgaaaaatttcgccctcgatctgctgatggatctttacgacaacgaactggcctacagccgggagctgtacggcgagagcggctggttcgacgacgtcagcgctttcctgtgctacaacgccaacaaagcgctgatgaacctcggctacgaggcgctgttcccggcggagatggcggcggtcaatccggcaatcctcgcagcgctgtcgcccaacgccgacgaaaaccatgactttttctccggtaccggctcctcctacgtgataggaaaaatggaagagaccgccgacgacgattgggacttttaa

SEQ ID NO: 137648 - DNA, 2142 bp, Enterobacter cloacae
ttggcaacgacaaccgcagaacgtataaccgccgccgtggattttcacgccctcaacgcgatgctgaatttgtacgacagcgagggccgcatcccgtttgagaaagatcgccaggcggttgaggcctttatggcgacccaggttcagcccaacgccctcaccttccccagccaggaggataagctcagctggctcgtcagcgagggctattacgatccgcaggtgctggccggctatgaccgcgggtttgtgctggcgttgttcgcccatgcccggcgcgctccgtttcgctttcagaccttcctcggcgcctggaagttctataccagctatgcgctgaagacctttgacggcaagcactacctcgaggatttcgccgaacgcagcgtgatggtggccctgacgctggcccggggcgatgaacagcaggcgcggcagctgacggaggagatactcagcggccgctttcagcccgccacaccgaccttccttaacgctggcaaacagcagcgcggggagctgatctcctgcttcctgctgcgtattgaggataatatggagtccatcggccgggcggtgaactcggcgctacagctgtcgaagcgcggcggcggggtggcctttttactctccaacctgcgcgaggccggggcgccgatcaagcgcatcgaaaaccagtcttctggggtggtgccggtgatgaagatgctggaggacgccttctcctatgccaatcagctcggcgcccgccagggggcgggtgcggtctggctgcatgttcaccatcccgatattttacgctttcttgatacccggcgtgaaaatgccgatgagaaaatccgcatcaaaaccttgtcgctgggggtggtgatccctgatatcaccttccagctggcgaaagaagatgcgcagatggcgctgttctcgccttatgacgtcgaacggctgtacggcaaacctttcgccgactgcgccatcggcgacctctatccgcagctggtggccgacgagcgggtccgcaagcgctggatccgcgcccgcgacctgttccagcgcctggcggagatccagtttgaatccggctacccgtacatcatgtttgaagacaccgtgaaccgcgccagtccggtggccgggcgggtcaccatgagcaatctgtgttcggagatcctgcaggtcagtacgccgtccgcctataatgaagacctcagctatgcgcatatcggggaagatatctcctgcaacctcggctcgctgaacatcgcccacaccatggactcgccggatttcggccgcacaatcgccaccgcggtgcgcgccctgaccgccgtgtccgacatgagccacattcagtcggttccctcggtggcggccggcaacgcggcctcccacgccatcggcctggggcagatgaatctgcacggttacctggcgcgggagggcattgcctacggcagcccggaggggctggacttcaccaatatctacttctacaccgtgacctggcacgcgctgcacacctcgatgcagctggcccgcgagcgcggccagcgcttcgccggcttcgagcagtcgcgctacgccagcggggcgtacttcgacaaatatctgcaggaggagtggcagccgaaaaccgaacgggtgcgcacgctgttcgcccgcgccggcatctctctgcccgaccgggaaagctggcgccagctgcgcgacgatgtcatgcgctatggcatctacaatcgctatctgcaggcggtgccgcccaccggctcgatctcgtacatcaaccatgccacctccagcattcacccgatcgtctcgaagattgagatccgcaaagaggggaaaaccggacgggtgtactaccccgcgccatttatgaataacgacaatctggccctctaccaggatgcgtatgagatagggccggagaagatcattgacacttacgccgaggcgacgcgccacgtcgaccaggggctgtcgctgaccctgttcttccccgataccgccaccacccgcgatatcaacaaggcgcaaatttacgcctggaagaaaggcatcaagacgctctactacatccgtctgcgccagctggcgctggaaggcactgaaattgaaggctgcgtgtcctgcgcgctgtaa

SEQ ID NO: 137649 - DNA, 333 bp, Enterobacter cloacae
atgagcctcatcgtctacttctccagccgttcggagaatacccatcgctttgtgcagcgcctggggctgccggcggtgcgcatcccgctgaacgagcgtgaacatctgcgggtagacgagccctatattctcatcgttcccagctatggcggcggcggcaccgccggcgcggtaccgcgtcaggcgatccgctttttaaacgacgtgcataaccgccagctgatccgcggagtgattgccgccggcaatcgcaactttggcgacggctgggggcgtgccggagatgtcatcgcgcaaaatgcgccgtgccctatctctaccgcttcgagctga

SEQ ID NO: 137650 - DNA, 246 bp, Enterobacter cloacae
atgcgcattattatttacactcgaaatgactgcgtgcagtgccatgccacccggcgagccatggagagccggggactggcctttgaaatggtcaacgtcgaccagcagccggatgccgccgacaccctgcgcgagcagggatttcgccagctgccggtggtgatcgccggtgagctgcgctggagcggcttccgcccggatatgatcaatcgcctgcgcccctcctttacggcggccagcgcatga

SEQ ID NO: 137651 - DNA, 432 bp, Enterobacter cloacae
atgaaccaattacgtcagccattcaatgaactgagcccggaagtctataaagggctggtacaggccagcatcgcgctggagaaaagcgagctgggcaacgccctggtagagctagtttatttacgcgtctcgcagatcaatggctgcgccttctgtcttgagaaacatagccaggcgctgcgcaaaggcggcatggcgcaaagcaaactggatgcccttgcgggctggcgggtaagcgcccactttactccggccgaacgcgcggcgctggcttgggccgagtcggtcaccgacattgccgccagccatgcggaagatgaggtttacctgccgctgcgcgaacattttaccccgcgtcagataagcgatctgaccttcgccgtcagtttgatgaacgcctttaaccgcctcgccgtggccatgcgcctgtag

SEQ ID NO: 137652 - DNA, 1374 bp, Enterobacter cloacae
  misc_feature (1123)..(1158): n is a, c, g, or t
atggaagcgattaacctcccgctttatcagcgtattgcccgccagttgaaatcggcgattgaacgtggcgaactgaccccgggcagccgtttgcccgccagccgggtgtacgctcaggagcagggcgtctcccgggcgaccatcgaaaacgcctggggagagctggtcgcccagggatggctcgagcggcgtgggcaggcggggacctttgtcagcgagcggctcagcccgcgccagctggcgccggtaccgccagtgcaaccggccgcgccgacggagccgctgccgtttcagatggggctgccggcgctggatctctttccgcgcgggcagtgggcgcgggtgatggggcgtcggctgcggacgcagtcgcggttcgatcttgcacccggcgatcccggcggcgatccgcttctgcgccaggctatcgtcgattatctacgcctgtcgcgcagtatcgactgtcagtcggatcaggtgttgatcaccggcagctatgccgcctccatgaaccttatcctgcgtaccctggcgcagccgggacagcatatgtggatggaagatccggggtatccctttatccggccggtcgtcgaggctgggcagctggcggtggatgcgattccggtggacgacgaagggatggacgtcggctggggccagcgtcatcacccgcaggcgcgatttgccctgctcacaccagcccatcagagtccgctgggggtcgcgctgtcgcttccccgacgccgccagctgctggcgtgggccgcggagcgcgacgcgtggatcattgaggacgattacgatagcgagtttcgctatcacggcaaaccgctgccgccgctgaaaagccttgatgcgccgcagagggtcatctacgcgggcaccttcagtaagtcgatgttcccggcgctgcgcaccgcctggctggtggtgccgaccccgctggtggcgcgttttcaccagaccgcggagcgccaatcctgcaccgttcccaccctgtggcagcagacgctggcggattttatccagcagggacatttttggcgtcatttgaagaaaatgcgtgccagctatagccagcgtagacagtggctggagtcggctctgcaggcgcagggcnnnnnnnnnnnnnnnnnnnnnnnnnnnnnnnnnnnngcagctgggggaattcaactggttatgtcggtcagcggcgacgatcggctgctcgcgcggcgggcggttgtggccgggctggcggtgcaggcgctgagcgactggcggattcgccacgcgggcgaggggggattattgatgagttttaccaatatacgttcgccggcgatggctgacggacttgcccgacggctgagagaggcgattgcgatttga

SEQ ID NO: 137653 - DNA, 348 bp, Enterobacter cloacae
atggctaaccatgtgaaccgcaacaattttgacgagaacgccgaagatattcataacgatgtcagccaattagcggatacgctggaagaggtgctgaaatcatggggcagtgacgccaaagaggaagcggaagcggcgcgtgtcaaagcgcagtcgctgttaaaagagactcgtgcccgccttaatggccacaaccgggtgcagcaggcggcgctggatgcgcgccaggcagcgtgcgatgcgctgggctgtgccgatacctacgtgcgcaataaaccgtggcacagtgtgggcgccgccgccgccgtcggggtatttattggcgtattgctcaatttacgtcgataa

SEQ ID NO: 137654 - DNA, 363 bp, Enterobacter cloacae
atgtatttaagacccgatgaggtggcgcgtgttcttgaaaaagccggcttcaccatggatgttgtgacgcaaaaagcgtacggctatcgccgcggcgataattatgtttatgtgaaccgcgaagcgcgcatggggcgaacagcgttagttattcatccggcgttaaaagagcgcagcaatatgctggccgaaccggcttcagatatcaaaacctgtgatcattatgaacagtttccgctgtatttagccggggatgcgcaacaacattatggtattccgcatggatttagctcacgcatggcgcttgagcgttttctgaatgggctatttggcgaagcccagccggcaatgtcgacgaattaa

SEQ ID NO: 137655 - DNA, 450 bp, Enterobacter cloacae
atgttctctgcgcactcccgcttgcggcatgcggttgcagacacctttgcgatggtggtttactgcaccgtcgtcaacatgatgatcgaaatttttctctctggtatgacgtttgagcagtcgttatcgtcgcgtctggtggcgatcccggtcaacattattattgccgtaccctatgggatttatcgcgatttcgccatgcgtcaggcccggcgcatcagcccggccaggtggatgaaaaatatggccgacgtgctggcctacgtcacctttcagtcgccggtgtatgtcgctattctgtggagcgtgggtgctgactggcaccagattgtcgccgcggtgagctcgaacctggcggtatcgatgatgatgggcgccgcctacggctacttcctcgactattgccgccgcctgttccgcgtggcgccctatcagcaggcgaaggcctga

SEQ ID NO: 137656 - DNA, 402 bp, Enterobacter cloacae
atgtcttcaatgttacacaaactgaataatatccgttcactgcgtgccctgtcccgtgaattctccattgacgtgcttgaagagatgctggaaaagctcaggatcgtcactgaagaaaaacgtacgcaacagcagcaggcagctcagcagcaggctgaatatcaggagaaagtgaatacctggcttgagctgatgcgcgccgacggtatttctcctgacgagctggtggccgatattcagccgccaaaggcgggcggcaaaaagcgtcaaccgcgcccggcgaaatatcgttataccgatcatactggcgcagagaaaacctggaccggacagggaagaatgccgaagccgattgccgaggctgtcgcccagggtaaatcgctggatagctttttaatttaa

SEQ ID NO: 137657 - DNA, 180 bp, Enterobacter cloacae
atgtttgctgtcggcgatctggtacaaccccgagcgggcggaccaaaactgaaagtggtggaagtgcaaggggagcaactggtggtggttcaggccgcacaggagcagggagagcgctattcgctgaagtcggacgaggtcacgccgtatcaggaggagggagacttcggcgtctgctaa

SEQ ID NO: 137658 - DNA, 903 bp, Enterobacter cloacae
atgaagtatatcattctgttgatcattgttattgctgtactgtatgtccattaccgcggacgggtgcgctatcgtttctggcggcagctctccgaccattccacatttaccgcgccgctgaatggatttatgtatttattttcccgcgtgccgaatacgccttatctgcggccggagatgtttcccgagctggcgatattgcagcaaaactggcaggttattcgcgacgaaggtctccaccttcagcagctggagcagattaaagcggccgataaatataacgatgccgggtttaactcatttttcaaaaccggctggaaacgcttttatctgaaatggtatgaggatgcccatccttccgccagccagctctgtccgcaaactaccgcgctgctgcgcgatatcccgtcggtgaaagcggccatgttcgccactctgccggacggtagccgtctgccgcgccatcgtgacccctacgccggctcgctacgctttcatctgggcctggcaacgccgaacgatgaccgctgctttatcgaggtggatggccagcgttacagctggcgcgatggagaaggcgtgctgtttgatgagacctatatccactatgcggaaaataccagtggtgagaatcgcctgattctgttctgcgatattgaacggccgatgcgctaccgctgggcgcagaaagttaaccactggctgggacgccatctgatgagcgccgcttcggcgcccaacgatatcggcgatcgcaccggcgggattaaccgggcgtttcgctatatttaccagatccgtattgttggtaagcggttgaaaaaatggaataagacggtctattacatcgtcaaatggctgctcttcggcggcattgcctggcttatctggagcgcgttttaa

SEQ ID NO: 137659 - DNA, 546 bp, Enterobacter cloacae
atgaccatcgccaccttaactcccgccgaggcccaggcacagattgcccagggcgccagactgattgatatccgcgatgcggatgaatatgcgcgcgaacatatccccgatgccgagctggtgccgctcgccactctgaccagcggtgcgcccctcaatgcccgggccggagagacggtcatctttcactgccaggcgggttcccggacgcagaataatgcgattcgtctggccgcggccgccgcgccggcgcaggcctgcctgctggcaggaggaattcaggcgtggaaagccgcggggttgctggtagtggaagaatcatcgcagccgctgccgctgatgcgccaggtgcaaattgccgctggcgtcctgattttactgggggtgctgctgggctataccgttaacggcggctttttcctgctcagcggcgcggtcggcgccgggctcaccttcgccggcgtaaccggcttttgcggcatggcgcgtctgctggcgaccatgccgtggaaccggcgccagggggttaaaacgcgctccagataa

SEQ ID NO: 137660 - DNA, 300 bp, Enterobacter cloacae
atgaccacacctgaagacctgcaggcccgcgccggagaagccgccgcgctgatgaaagcgatgagcaatcctcaccgattgctgatcctgtgcatgctgtgcgatgcgcccagggccagcgccggcgaactcgcccgggctacagggctgagcccctccgccacctcgcaacacctcgcgcggatgcgtgacgaggggctgatcgacagcgagcgcgacacccagcgtatccactatttcatcacccaccctgcggtacagcaggtgatcaatacgctgaaaacgctctattgcccgtga

SEQ ID NO: 137661 - DNA, 606 bp, Enterobacter cloacae
atggctaacgttctggttttaaaatccagcattaatggcgaaacatccctgaccaatcagttgattaacgaatttctcgcggcgcgccaggcggcgggacacggcgatcggctcaccgaacacgatctcagcgccatggcgctgccaacgctggatcgccccctgttcgccgccctgcgcggggcagtggatccgcagcctgctatccgcgaggcggtcgccctctccgaccagcttatcgccgagttaaaggccagcgacctgctggtgatcggcgcgccgatgtataacctcaacgtcccgaccgatctaaaaaaatggttcgacctcgtggcgcgggcgcgggaaacctttcgctacaccgagagctggccgcaggggctggtggagggcgtccgggcggtggtcgtcagcagccgcggcggtattcaccagggagaaactaccgacgccgtcacgccctatctgcgcgcggtactggggctgatggggatccaggaggtggaatttatctatgccgaagggctggacaatcgcccgcatggtcgcgacgccgggatcgccagcgcccgggcgcagattgcccggctcgccgttccggcctga

SEQ ID NO: 137662 - DNA, 909 bp, Enterobacter cloacae
gtgcgcgacgatctgaatgcgatcccggtatttgtcaccgtggtcgagagcggcaactttgccagcgcggcggcgatcctccatgtgacgcgttcggcggtgggaaaaaccattgcccggctggaagcgcgtctcggcgtggcgttattccagcgtaccacccgacggcaactgctgacggaagagggggagcaattctatctccagtgccgggaagcgctggagcgcatccgcgaggccgaagagacgctgcagcgcggcaaagatgaggtgcaggggcggctgcgggtgtcgctgccggtgctgtttggccagcgctgcgtggcaccgctgctgttccgcctcagccagcgctatccgttactgaagctcgagctccactacagcgaccggcaggtcaatctgctggaggaggggtttgatcttgcggtgcgtatcgggagcctggccgataccgggtcgctgcgggcccgtgcgctgggagagcacggcatggtgctgtgcgcggcggcggagtacctgcgccagcagccagcgccgcagactattgccgggttgaacgagcaccgtaccctcggctatctgcacaacggccagctgcaaaaatggcaactgtatgacccgcagcagggcgacgtgcgcttcagtccgcagacgtggctgatacaggatgattttgccgccatcgcggcggcagtgcagcaggggatgggcatcgcctggctgccggactggctggtggcgcaggcgcttgccgatgggacattgcagcaggtgttggcgcccagcgctcaggtgcgtttcgccatccacgcggtatggccggaggggccgtggctgccgcaaaaaacgcgggcggcgatcgatgccctgcgggaagggctacctcttaccgcaacacctggttag

SEQ ID NO: 137663 - DNA, 321 bp, Enterobacter cloacae
gtgacgctttcaaacgcgctgctggttcacctcagccagctgccgtggccgggaaacgtacgccagctgcagagcgtcctgaaggtaatgctggctctcgccgatgagggcgacacgctgacgcccgacgcgctgccggaggcgtatcgcgccgcgcctgcgccgttgccgcgcgggggattgcaggcccatgatgagcagttgattgtcgataccctggccagggtcaacggcaacgtcagtcgggcggcgcagatactgggtatcgcccgcagcacgttgtaccgccgtgccgcccgtgccggacggcctcgtcgctga

SEQ ID NO: 137664 - DNA, 939 bp, Enterobacter cloacae
atgctctggctggcctcagacggcgtcggcggcaatagtcagcccggggcgctgatcgcgctattcgtattctgcgcgctggcggcttttgaagccctggcgccggttactggcgctttccagcatttaggccaggtgatcgcctccgcgcggcggatctcgcagattaccgaccagcagccggaggtcacctttgtcgaagatgaagccagtccgccagcgcaggtggccctaacgcttcaggaggtcaccttccgctatcctcagcagccctcccctgccctggagaatatttccctgcagattgccgccggagagcacatcgccattcttggccggaccggctgcggaaaatcgacgctgttgcagttgcttacccgcgcctgggacccgtcacagggagagattctgctcaacaatcagccgctctccggcctcagcgaagccactctgcggcaggcaatgagcgtagtgccgcagcgcgtgcacctgttcagcgccaccctgcgcgacaacctgctgctggcggcgcctgaagcggatgacgctcatctcagcgctacccttgagaaggtgggtctcgaaaaactgctgcaagatggtggtcttaacggctggctgggcgaaggcgggcgtcagctctccggcggggaactgcgccgactggccattgcccgcgcgctgctccacgatgcgccgctgatgctgctcgatgaaccgacagaaggtctggatgcggccaccgaaagccagatcctgcatctgttggcagatgtcatgcgcgacaaaaccgtgctgatggtgacccatcgcctgcggggcctggcgggttttaatcagataatagtcatggacaacggccagataattgagcaaggtagtcacgcggagctgctcgctaaacagggccggtacttccagtttaaacagcgtctgtag

SEQ ID NO: 137665 - DNA, 702 bp, Enterobacter cloacae
atgcgtctggttcagctctcccggcactctatcgccttcccctctccggaaggcgccttgcgagaacctaatggcctgctggcgctcggcggcgatctgagccccgcgcggctgctgatggcctatcagcgtggtatttttccctggttttcccctggcgacccgatcctctggtggtcgcccgacccccgggcggtactttggccagagcaattccatctcagccgcagcatgaagcgctttcatcagcgttcgccctaccgggtcacgctcaaccacgcctttggcgaagtgattgagggctgcgccagcgatcgtgacgaaggcacctggataaccagcagtatcgttcgcgcctatcaccagctgcatgagctgggtcatgcccactccattgaagtctggcaggagaataccctggtgggaggaatgtacggcgtagcgcagggagcgctgttttgcggcgaatcgatgtttagccgggcggaaaatgcctccaaaaccgcgctgctggtattttgccaggactttgcgcacagcggcggtaaattaattgactgtcaggtactgaacaaccataccgcgtcattaggcgcagtggatattccccgccgcgattatctggactatctgtcggtattacgcggctaccgactgcccgagcgattttgggtgccgcgggtgctatttcctggcggataa

SEQ ID NO: 137666 - DNA, 219 bp, Enterobacter cloacae
atggccaaagaagacaatattgaaatgcagggcaccgtacttgaaacgttgcctaacactatgttccgcgtagaactggaaaacggtcacgtggtaaccgcgcatatctccggtaaaatgcgtaaaaactacatccgcattctgacgggcgacaaagtgactgttgagctgaccccgtacgacctgagcaaaggccgcattgtcttccgtagtcgctga

SEQ ID NO: 137667 - DNA, 2280 bp, Enterobacter cloacae
atgctcaatcaagaactggaactcagtttaaatatggctttcgccagagcgcgcgagcaccgtcatgagtttatgaccgtcgagcacttgctgctggctctgctaagcaacccctcggcccgtgaggccctggaagcgtgttcagtggacctggtggcattgcgtcaggaacttgaagccttcatcgaacaaaccacacccgttctgccagccacggaagaagagcgcgacacccagccgacgctaagcttccagcgtgtgctgcagcgcgccgtcttccacgtacaatcttctggccgcagcgaagtgaccggcgccaacgtgctggtggcgattttcagcgagcaggagtcgcaggccgcctacctgctgcgtaaacatgaagtgagccgtcttgatgtggtgaacttcatttctcatggtacacgcaaagacgagccgagccagtcttccgataacagcggaagccagcctggcaatgaagagcaagccggcggggaggaacgtatggaaaacttcaccaccaacctcaatcagcttgctcgcgtcggcggcattgatcctctgatcggccgtgaaaaagagctggagcgcgcgattcaggtcctgtgccgtcggcggaaaaataacccgctgctggtgggggaatccggcgtcggtaaaaccgcgatcgccgaaggccttgcctggcgtattgtgcagggcgatgtgccggaagtgatggccgactgcactatctactcgctcgacattggctctttgctggcagggaccaaatatcgtggcgattttgaaaaacgcttcaaagcgttgctcaaacagctggagcaggataccaacagcatcctgtttattgatgaaatccacaccattatcggtgcgggggcggcgtctggcggccaggtcgatgcggctaacctgatcaaaccgctgctttccagcggcaagatccgggtgatcggctccaccacttaccaggagttcagcaacatctttgaaaaagatcgtgcgctggcccgccgtttccagaagatcgatattaccgaaccgtcggtggaagagacggtccagattatcaacggcctgaagccgaagtacgaagcgcaccatgatgtgcgttataccgccaaagcggtgcgtgcggcggtagaactggcggtgaaatacattaacgatcgtcatctgccggataaggcgattgacgtcattgacgaagcgggcgcgcgggcgcgcttaatgccggtcagcaagcgtaagaaaacggttaacgtggcggatatcgaatcagtggtggcgcgcattgcgcggatccctgagaagagcgtctcccgcagcgatcgcgacacgctgaaaaacctgggcgaccgtctgaaaatgctggtctttggacaggataaagccatcgaggcgctgaccgaggctattaaaatggcgcgcgccgggctgggccatgagcacaagccggtgggatcgttcctgttcgccgggccgaccggggtcgggaaaaccgaagtgaccgtccagctggcgaaggcgttagggattgagctgctgcgctttgacatgtccgaatatatggaacgtcataccgtcagccgtttgatcggggcgcctccgggctacgtcggcttcgatcagggcgggctgctgaccgatgcggtgattaaacatccgcacgcggtattgctgcttgatgagatcgaaaaagcgcatccggacgtgttcaacctgctgctgcaggtgatggataacgggacgctgaccgataataacggccgtaaagcggacttccgcaacgtggtgctggtgatgaccaccaacgccggggtgcgggaaaccgagcgtaaatcgattggccttattcagcaggacaacagtccggatgcgatggatgagatcaaaaagatctttacgccggagttccgtaaccgcctcgacaacatcatctggttcgatcatttgtctaccacggtgatccatcaggttgtcgacaagtttatcgtcgagctgcaggtccagctggaccagaaaggcgtctccctggaagtgagtcaggaagcgcgcgactggctggcgacgaaaggctacgatcgggcgatgggggcacgtccaatgggacgcgtcattcaggacaacctgaaaaaaccgctggcgaacgaactgctgtttggctcgctggtcgacggtggtcaggtcactgtctctctggacagcgacaaaaatacgctgacttacgacttccagagcgcgccgaagcacaaaccggaagcggcccactaa

SEQ ID NO: 137668 - DNA, 318 bp, Enterobacter cloacae
atgagtaagagagattggctggacttcgagcacctggttgacgacgaagttcgtgatgcgattaaaccgccatctatgtataaagtgatattggtcaatgatgactacactccgatggagtttgttattgacgtgttacaaaaattcttttcttatgatgttgaacgtgcaacgcaactgatgctcacggttcactatgaaggtaaggcgatttgtggcgtgtttaccgcggaagtggcggagaccaaagtcgctatggtgaatcagtacgcgagggagaacgagcatccattgctgtgtacgctggaaaaagcctga

SEQ ID NO: 137669 - DNA, 222 bp, Enterobacter cloacae
atggaaatgggtactgttaagtggttcaacaatgccaaagggttcggttttatctgccctgagggcggcggcgaagacattttcgcccattactccaccatccagatggatggttacagaacgctaaaagccggacaagccgttcggtttgatgttcaccaggggccaaaaggcaaccacgccagcgtgatcgtccctgtggaagcggaaacggctgcataa

SEQ ID NO: 137670 - DNA, 1959 bp, Enterobacter cloacae
  misc_feature (1259)..(1268): n is a, c, g, or t
atgacggcgctgcttgagctgcgagatatacgtcgcagctatccttccggcgacggcagcgttgaggtcctgaaggggatcaccctcagcatccatgcgggtgagatggtggcgatcgtcggggcctccggctcgggaaaatcgacgctgatgaatatccttggctgcctcgacaaacccaccagcggcacctatcgggtagcgggaaccgatatcgcgcagctggatggcgatgcgctggcccgtctgcggcgggaacactttggctttatctttcaacgctaccatttgctgtcccatctgaccgccgcgcagaatgtcgaagtgccggcggtgtatgccggcagtgaacggcgcgcgcgcctggcgcgcgctcatgagctgctggtgcggctggggctgggcgagcgcgccgactatcaaccgtcacagttgtccggcggtcagcagcagcgggtcagtatcgcccgcgccctgatgaatggcggggaggtgatcctcgctgatgaaccgaccggcgcgctggacagccattccggcgaagaggtaatggcgatcctgcaccagctaaaagcgcaggggcatacggtcatcattgtgacccacgatccgcaggtcgccgctcaggcggagcggatcgtcgagatccgcgatggcgagatcgtccgcaacccgcccgccagccgccagggcggcggactgcgcgcccgtccgcaggcggagccttcggcgtggcgtcagtttaccagcggctttcgcgaagcgctggtgatggcctggcgagcgatggcggcgaataaaatgcgtaccctgctgaccatgcttgggattattatcggtattgcctcggtggtgtcgatcgtggtggtgggggatgccgccaagcagatggtgctggcagatattcgcgccatcggcaccaataccattgatgtatatcctggtaaggattttggcgacgacgacccgcgctatcagcaggcgctgaagtatgacgatttgctggcgatccagaagcagccgtgggtgcgctccgccacgccggcggtttcaaaaagcctgcgcctgcgcgccaacaatattgacgttgccgccagcgcggagggtgtcggtccacagtattttaatgtctacggcatgacctttagcgaaggcaataccttcaatgaactgcagctcaacagtcgggcacaggtggtagtgctcgacagcaatacccgtcggcagctgtttcccaataaagcgaaagtggtgggagnnnnnnnnnnggtgggagaggtgattctggtgggcaatatgccggccacggtgattggcgttgcggatgaaaagcagtcgatgttcggcagcagcaaaattctccgcgtctggttgccctacaccaccatggcgggaagagtaatgggccagtcgtggctgaactccatcactgtgcgcgttcatgaaggctacgacagtgaaaccgcagagaaacaactgctgcgtctgctggagctgcggcatggtaaaaaagatgtattcacctggaatatggacagcgtcttgaaaaccgccgaaaggaccacacataccttacagctgttcctgacattggtggcggtgattgccctggtggtcggcgggattggcgtaatgaatattatgctggtgtcggtgaccgaacgaacccgggagatcggcatccgcatggcggttggcgcccgggccagcgatgtgctgcagcagtttctcattgaagcggtgctggtttgcctggtcggtggcgcgctgggcgtagcattgtcgctgatgatcgcctttattttacagctgtttctccccggctgggagattggtttttctccgctggcgctgctgacggcgtttctctgttcgacgctgaccggggtgctgtttggttggctgcctgcgcgcaacgcggcgcggctcgatccggtggatgccctggcgcgagaatag

SEQ ID NO: 137671 - DNA, 1116 bp, Enterobacter cloacae
atgaaagtgaagggaaaacgcaggaccgtctggtggctgttggcgatcgttgtgctggggctggctatctggggatggcggatcctcaatgcgccgctgccgagctaccagacgctggtagttcgcaaaggggatctccagcagagcgtgctggccaccggcaaactggatgccctgcgaaaagttgacgtcggcgcccaggtcagcggacagctgaaaacgctgcacgtcaatattggcgataaggttaaaaaggatcagttgctgggggttatcgatccggagcaggcgcaaaaccagattaaagaggtggaagcgacgctcatggagctgcgcgcccagctcaatcaggcgcgcgcggagagcaaactggcgcaagtgactctggcccgtcagcagcagctggcgcagcgccagctggtctcgcggcaggaccttgataccgcggccaccgatttggcggtgaaacaggcgcagatcggcactattgaagcgcaaataaagcgtaaccaggcgacgctcgatacggcgaagaccaacctcgattacacgcggatcctggcgccgatggccggcgaagtgacgcaaattaccaccctgcagggacagacagtgatcgccgcccagcaggcgcctaacattctgacgctggcggatctcagcaccatgctggttaaagcgcaggtctctgaggcggatgtcatccacctcagaccggggcaaaaggcgtggtttaccgtgctgggcgacccgcttacccgttatgaaggtaaactgaaagacattctgccgacgccggaaaaagtgaatgacgccatcttctattatgcccgcttcgaggtaccgaacccgcaggggatcctgcgcctcgatatgactgcgcaggtgcacattcagctggctgaggtgaagaacgtgattactatcccgctgagcgccctgggcgacgcggtaggcgataaccgctaccacgttcgactgttgcgcaccggtgaggtcaaagagcgtgaggttatcattggcgcccgcaatgataccgacgtcgcagtggtgcaaggtctggaagagggcgacgaagtgatcgtcggcgagagcgcgagcggggcggcaaaatga

SEQ ID NO: 137672 - DNA, 1659 bp, Enterobacter cloacae
atgcttcttgagcgcgtagaaatcgtcggttttcgcggtatcaatcgtttgtcgttgatgctggagcaaaataacgtcctgatcggggagaacgcgtgggggaagtccagtctgcttgatgcgctgaccctgcttttgtcgccggagttcgatctttatcactttgttcgcgatgatttctggtttcccccgggcgacatccaggggcgcgaacaccatttgcatattatcctgaccttccgcgaaacggagccaggccgccatcgggtccggcgtttccgtccgcttcagcgctgctgggtgccttgcgatgacgggtatcaccgggtgttctatcgcctggagggcgagctcgccgaagatgacagcgtgatgaccctgcggagctttatcgatggtgaaggcgaagcgttggtgctggaggagattgatgagctggcccgacacctggtgcgtttgatgccggtgctgcgcctgcgcgatgcgcgctttatgcgccgcatccataacgggacggtaccgcactcgccgcagatagagatcaccgcccgtcagctggattttctctcccgcgaactggtcagccatccgcaaaatttatcggacggtcagatccgtcaggggctatcggccatggtgcaactgcttgagcattactttgccgagcaaagcagcgctcagacgcggcatcgcctgatgcggcggcgctcccatgatgaacagcgcagttggcgttatctggatattatcaaccggatgatcgacaagcccggcgggcgcagccatcgggtgatcctgctggggctgtttgccaccctcctgcaggcgaaagggacggtgcgcctcgatcgcgacgcgcgaccgctgctgttgattgaagatcccgagacccgtctgcatccgatcatgctttccgtcgcctggcacctgctgaatttgttgccgctgcagcgtgtgaccaccaccaactccggagagctgctgtccctgacgccggtagagcaggtctgccgactggtgcgtgagtcgacgcgggtatcggcgtggcggttggggccgggcggaatgaatgccgaagagagccggcgcattgcttttcacattcgcttcaatcgcgcctcatcgctcttcgcccgctgctggctgctggtggagggagagacggaaacctgggttatcaacgaactggcccggcagtgcggtcatcattttgatgctgaaggggttaaggtgatcgagttcgcccagtccggcctgaagccattgatcaaatttgcccgccggatggggatccagtggcacgtgctggtggacggcgatgaggcggggaaaaaatatgccgcgacggtacgaggtctgctcaataacgatcgcgagctggagcgcgaccatctgaccagtctgccggcgctggatatggaacactttatgtatcgtcagggatttgatgacgtttatcatcgggtggcgcagatcccggataatgtcccgatgaatatgcggcgggtgatcaccaaagccatccatcgctcatccaagccggacctggcgattgaggtggcgatggaggccggccgccgtggcgtggacgctgtgccgacgctgctgaagaaaatgttctcacgggtgctgtggctagcccgcggtcgtgccgattaa

SEQ ID NO: 137673 - DNA, 972 bp, Enterobacter cloacae
  misc_feature (631)..(640): n is a, c, g, or t
atgttcagaaaattagcagccgaatgcttcggcaccttctggcttgtatttggcggctgcggtagcgccgtgctcgccgcggctttccccgagctgggtattggttttgccggcgtcgcgctggcatttggcttaacggtattaaccatggcgtttgcggtcggccatatttccggggggcatttcaacccggcggtcaccttaggcctgtgggccggcggccgttttccggcaaaagaggtcattggctatattatcgctcaggtggtcggcggaattattgccgcggcggtgctgtacgtggttgccagcggtaaagccggctttgatgccgccgccagcggctttgcctccaacggctatggcgaacactccccgggcggcttctccatgctgtcggctatcgtcattgaaattgtcctgacctgcggctttctgctggtcattcatggcgcgaccgataaacatgcgccggcgggctttgcccccatcgccatcggcctggcgctgaccctcatccatttgatcagcattccagtcaccaatacctcggtcaacccggcgcgcagcaccgcggtggcaattttccagggcggctgggcgctgcagcagctgtggctgttctgggtcnnnnnnnnnnccggcgcgcagcaccgcggtggcaattttccagggcggctgggcgctgcagcagctgtggctgttctgggtcatgccaatcgtcggtgggatcctcggcggcgtgctgtatcgcaccctgctggaaaaacgcgattaacgcttttcaaagcccgggtctccgggctttttctttctggcgacagctttactcggcccggtgatttgggtagtgtcatgggcgctattctcatcatgcaagggctgcatcgttcatgttttcgggactctttattattctgttgccgctggtcgtcggctatttactgcctcttcgtcactcctccgcgctaa

SEQ ID NO: 137674 - DNA, 807 bp, Enterobacter cloacae
atgctcagctggattgtctatgtaatccttttttttatgggtatcagcctggcgttcctcgacaatctggccagcaacctgctggcaatattgcattacgccgcggtgagcgtggttatcattttactgtgtaatatcgccgccctgctgtggctggaaagtaaaatgccatggcgcagtcagcatcgtcaggagaaattaccctcgcgcctggccatggccctggaatcgctgcagctgtgcggtgtggtcgtgctcggttttctgctcggtctgaccagactgccttttttacagcacgcgacagaagccagcgaatatacgttgatttttctcctgttcctcgtcggtatccaattacgcaataatggaatgagtctgcgacaaatagtccttaaccgccggggaatgatcgtcgccgtggtggttacggccagttcattactcggcgggatacttaacgcctttattctcggtctgccgttaaagaccggtctggcaatggccagcggtttcggctggtattcgctctccggtattttactcaccgaatcctttggcccggtcatcggtagcgcggcgttctttaacgatctctgtcgcgagctgctggccatcatgttaattccgggccttattcgccgcagccgctccacggcgctggggctatgcggcgccacctcgatggacttcaccttaccggtactgcagcgttccggcggcgtcgaaatcgtccctgccgccatcgtgcacggttttctgcttagtttgctggtcccgatcctgatcgccttttttaccgcctga

SEQ ID NO: 137675 - DNA, 378 bp, Enterobacter cloacae
gtgagccggcagcatttcgccatgagtatagacgttgacgccggtgccttccgtctgctccagcaggttatacagatccttcagatcgtggccggagatcaggatgcacttcccttcggtggctttaacgttgacctgagtcggcgtcggatggccgtatttggtcgtttcaccggcgtcgaggatgctcatcactttgaagttcatctggccgatttccatcgaacattcgagcagcgcattcatatccgcaggccaggtgcccagccatgccatgattttatggtactgggcatagatagcgttgtcgtactggccgagcacgtgggcgtgctccatataggccgccgcacccttcagaccgtacaggcacagtag

SEQ ID NO: 137676 - DNA, 1155 bp, Enterobacter cloacae
atggcgatgagcggcatgcgcgatctgtcgattatcgccaccccaccgacgcgccgtctggcggtgaaaacctttgttcgcgagtacgacaatctggtggtgcgcgaggcgatcctgcgcgaagtgctgcgcggcggccaggtgtattacctgtataacgacgttgaaaatattcagaaagccgccgacaggctggcagagctggtaccggaagcgcgcatcgccattggtcacggccagatgcgcgagcgcgagcttgagcgggtgatgaacgatttccaccatcagcgtttcaacgtgctggtgtgtaccaccatcattgagaccgggatcgacattccaacggcgaacaccatcatcatcgaacgcgcggatcacttcggcctggcccagctgcaccagctgcgcgggcgcgtcgggcgttcacaccatcaggcctacgcctggctgctgacgccgcatccgaaggcgatgaccaacgacgcgcaaaagcgtctggaagctatcgcctcgctggaagatctgggcgctggctttgcgctggcgacccacgacctggagatccgcggcgccggtgagctgctgggtgaagaccagagcggctccatggaaaccatcggtttctcgctgtatatggagctgctggaaaatgccgtcgacgcgcttaaagccggacgtgaaccgtctctggaagatctcaccagccagcagaccgaagtggaactgcgcatgccttctctgctgccggatgattttattcctgacgtgaatacccgtctgtcgttctacaaacgcattgccagcgcgaaaagcgaaggcgagctggaagagatcaaagtcgaactgattgaccgttttgggatattgcccgatgcggcgcgcaacctgctggatattgcccgcctgcgtcagcaggcgcagaagctgggcattcgcaagcttgaaggcaatgagaaaggcggcgtcattgagtttgccgaaaataaccacgtcgatccgatgtggctgattggcctcctgcaaaaacagccgcagcatttccgtcttgatggcccgacgcgcctgaaatttactcaggatctggcggaacgtaaaacccgcatggactgggtgcgtaactttatacgtcagttagaagaaaacgccatcgcataa

SEQ ID NO: 137677 - DNA, 387 bp, Enterobacter cloacae
atgagcaaaactattgcgacggaaaatgcaccagcggcgattggcccctacgttcagggcgttgacctcggcagcatgatcatcacctctggccagatcccggtcgacccgaaaaccggcagcgtcccggaagacgtgtccgcgcaggcgcgccagtcgctgaacaacgtgaaagcgatcgttgaagccgcaggcctcaccgtcggcgatatcgtcaagaccaccgtattcgtcaaagatctcaacgatttcgctaccgttaacgccacctacgaagcgttcttcaccgagcataacgccaccttcccggcgcgctcctgcgttgaagtcgcacgtctgccgaaagacgtgaagatcgagatcgaagccatcgccgtgcgtcgctga

SEQ ID NO: 137678 - DNA, 948 bp, Enterobacter cloacae
atgcagaaccggctgaccatcaaagatatcgcgcgcttaagcggcgtagggaaatcgacggtatcccgcgtccttaacaacgagagcggggtcagcgaacggacccgcgagcgcgtcgaagcggtgatgcagcagcacggtttctcgccctcccgttccgcccgcgccatgcgcggccagagcgataaagtggtggcgattatcgtcacccgtctcgattcgctgtcggaaaaccttgccgtgcagaccatgctgcccgccttttatgagcagggttacgatccgattatgatggagagccagttctccccggcgttggtggaggagcatctcggcatgctcgcccggcgcaatattgacggcgtggtgctgttcggttttaccggcatcgacgaagcgatgctcgccccctggcgcgacaccctggtgctgatggcccgcgacgctcccggcttcgcctcggtgtgctatgacgacgagggggccatcacgctgctgatgcagcggctctacgatcgcggacaccgccacatcagttttcttggcgtaccgcacagcgacgtcaccaccggcgaacgccgccatctggcctatctcgccttctgtgaaaagcatcgtctgacgcccaccgccgccctgccggggctgggcatgaagcagggatatgacaccgtcgccagcgtgctgacggctgaaaccagcgccctggtctgcgcgacggataccctcgccctcggcgccagcaagtacctccagcagcagggtcgcgatgcgctgcagctcgccagcgtcggcagcacgccgctgatgaagtttctccacccggaaatcttgaccgtcgatccgggctatgccgagtccggacgccgggccgcccggcagttgatcgagcagatcgccggcagcgtcgatccccgccagatcgtgattcccgcagccctcaattaa

SEQ ID NO: 137679 - DNA, 1419 bp, Enterobacter cloacae
atgagcaaagtaaaccagcaggacatcgataaactgatcgaactggtgggcgggcgcggtaacatcgccaccgtcagccactgtattacccgtttgcgctttgtgctgaacgacccggccatcgccagaccaaaagagattgagcagctgcgcatggtgaagggatgcttcactaacgccggccagttccaggtggtcatcggcaccgaggtgggcgattactacaaggccctgctggcgaccaccggccagacctccgccgacaaagagcaggtcaagcaggccgcgcggcaaaatatgaagtggcatgaacagttaatctcgcacttcgccgagatcttctttcccctgctgccggccctgatcagcggcggtctgatcctcggtttccgcaacgttatcggcgacctgcccatgagcaatggccagacgctggcccagatgcacccgtcgctgaaaaccatctatgacttcctgtggctgattggcgaggcgatcttcttctatctgccggtggggatctgctggtcagcggtgaagaagatgggcggcacgccgatcctcgggatcgtccttggcgtcaccctcgtctccccgcagctgatgaacgcctatctcctcggccagcaggtgccggaggtgtggaacttcggcctgtttaccattgccaaagtcggctaccaggcgcaggtgatcccggccctgctggctggcctggccttaggctttatcgagacgcgcctcaagcgcattgtgcctgactacctctacctggtgattgtcccggtctgctcgctgatcctcgcggtgttcctcgcgcacgccattatcggtccgttcggccgcctgatcggcgacggcgtggccttcgcggtacgccatctgttaaccggcagcttcgcgccgatcggcgccgcgctgttcggcttcctctacgcgccgctggtgattaccggtgtccaccagaccaccctcgctatcgatatgcagatgatccagagcatgggcggtaccccggtgtggccgctgattgcgctgtcgaatattgcccaggcgtcggcggtggtcggcatcatcatcgccagccgcaagcagaatgaacgtgaaatctcggtaccggcggcgatctccgcctatctcggggtcaccgagccagcgatgtacggtatcaacctgaaataccgcttcccgatgctgtgcgcaatgattggctctggcctcgccggcctgctgtgcggcctgaacggcgtgctggcgaacggcatcggcgtcggcggcctgccggggatcctctccatccagcctacctactggcaggtgtacgccatggcgatggctatcgcggtggtggtgccgattatcctcaccagcgtggtgtatcagcgcaagtaccgtcagggcaccttgcagattgtctaa

SEQ ID NO: 137680 - DNA, 1656 bp, Enterobacter cloacae
atgaatcatctcccccactggtggcaaaacggcgttatttatcaaatctatccgaagagttttcaggataccaccggcagcggtaccggcgacctgcgcggcgtcacctcccgcctcgactatctgcaaaagcttggggtcgacgccatctggctgacgccgttctacgtctcaccgcaggtggataacggctacgacgtggcgaactacaccgccatcgatccctcctacggcacaatggccgactttgacgccctggtgacggaggcgaaggcccgcggcatccgcatcgtgctggatatggtgctgaaccacacgtcgaccgaacatgaatggttccgtcagtcgctgaataaggagagtccctaccgccagttctatatctggcgcgatggcgaaccggacgccctgccgaacaactggcgctctaaatttggcggtaacgcctggcagtggcacgccgacagcgggcagtattatctgcacctgttcgccattgagcaggcggatctcaactgggagaatccggcggtgcgcgccgagctgaaaaaggtctgcgaattctgggctgaccgcggcgtcgacggtctgcgcctcgacgtggtcaacctgatctcaaaagaccagacctttccctgcgatctggacggggatggccgccgcttctataccgacggcccgcgggtgcatgagttcctgcaggagatgagccgcgatgtcttcaccccgcgtaacctgatgaccgtcggcgagatgtcctccacctcgctggagcactgccagcagtacgccgcgctggacggccgcgagctgtcgatgacctttaacttccaccatttaaaagtcgattatcccggcggagagaaatggaccctagcccgcccggactatgtggcgctgaaggcgctgttccgccactggcagcagggaatgcacaatcgggcgtggaacgcgctgttctggtgtaaccacgatcagccgcgcatcgtgtcgcgctttggcgacgaaggcgagtaccgggtgacggcggcgaagatgctggcgatggtgctgcacggcatgcagggcacgccctatatctaccagggcgaagagatcggcatgaccaatccgcacttcagcagcatcagcgattaccgtgacgtcgaaagccacaatatgtttatcgaacgtgcggcgcaggggcaaagcccggacgaactgctggcgatcctcgccagcaagtcgcgcgacaacagccgaacgccgatgccgtggcacgccggcgagaacggtggcttcagcgacggtgagccgtggatcggccttggcgataattaccaggagatcaacgtcgaggcggcgctggcggaccccgattcggtgttttatacctatcagcagctgattacgctgcgtaaaaccctgccgctactgacctggggcgattacgaggatctgctgccggagcatccgtcgctgtggtgctatcgtcgtcagtggcaggggcaaacgctggtagtcgccgctaacctgagccgcgagctgcaggcctggcagcccgctgaggccccgggcgagtggaagatgatcatcagcaactattccgagaccaccccgcgcccgaccgggctgacgctgcggccgttcgaagcgatatggtggctgcagggataa

SEQ ID NO: 137681 - DNA, 1353 bp, Enterobacter cloacae
atgtcgaatacaagctggattgaacgttacgtcatgccggcggcgctgagaatcgccgggcaaaagcacgtcctgtcggtgcgcgacggcatcattctcaatatgccgtttatgttgattggctcattcttcctgattttcgcctacctgccgatccccggctatgccgacatgatgagcggcctgtttggcgaggtctggcgcgataaaatgctgtacccggtgaaagcgacctacgacattatggcgctgatttccagcttcggcatcgcctaccggctggcggagaagtatcgcactctcgatccgctgagcgctggagcgatgtcgctggtggccttcatgatgacgatcccgcagaacacgctgtttacgccggtacacggcgcggcggaggtgattaaaggggtgatcccggtgagcatggtcggcagccaggggctgtttgtcgccattgtcatttcgctgctgtcgacggagatttatcgtttggtcgccagccgcaatctcgttatccgcatgccggacggcgtgccgccggcagtggcgaaatcattcctggccctgatccccggcttctgcgtgctggcggtggtgctggcgctgcgcctggcggtcgaggcctcgccgttcggcgacatcaacagcatgatcgccactttgatcggtattccgatgcatcacgtcggcggtacgctgccgggcatgattatttcagtcattttgattggtattttgtggaccctgggcctgcacggcgacgcgatcgtactggtgtttatccagccggtatggctgtcgaatatgtcagagaacctgacggcctttcagaacggccagccgatcccgcatatcattacccagcaattttacgacctgtggattgcgcccgggggtaccggcgcgctgctggggctggtgatatttatgttgctgcgcagccgtagccagcagatgaaacagctggggaaaattgccgcgccgggagcgttgtttaacatcagcgagccgatggtgttcggcatcccgctggtgatgaacccgtacttcttcctgccgtttattttaacgccggtgctgctggtgatcgtgtcctataccgcgatggcgaccgggctggtggcgccgcccgccggaatcgcactgccgttcaccacgccgatcttcatcagcggctatctggcgaccggagggcatatctccggcacggtgctgcaggtggtgaatttagcgatttcgctggtggtctactatccgttcttccgcgcctgggatcggctaaaggcaaaagaagagcacgcctcggcgcaaccccaagcgagcgctgcgattgctgatgccgaccgcgcataa

SEQ ID NO: 137682 - DNA, 1269 bp, Enterobacter cloacae
atgcaagcactgaaaattgccgttatcggcggcggcagcagctacacgccggagcttattgaagggattatcgttcgttacgagcagcttccggtcacagagctggcgctggtagatgtcgaatccggccgggaaaaggtggagatcatcgccgcgctgacccggcggatgctgaaacataaagggctggagcaggtggcagtcagcgtccactttacgctcgatgaggccatccgcggcgccagctttgtgctgacccagctgcgtgtcggacagctggcggcgcgcgccgccgatgagcggctgggtctcaagtaccacctgctgggccaggagaccaccggcgtcggcggttttgccaaggcgctgcggacgatcccggtgatccttgaggtggcgcgcaaagtggaacagctggcgccggaagcgttcattctcaactttactaatccggcggggatcgtcaccgaggcggtcagccgctacagcacggcgaagatcatcggcctgtgcaacgtgccgatcaacatgcagcacatgatcgtcgggatgctgggcgcccaggagtccgaagtaaaactgcgctttgccgggctcaaccatatggtctgggtgcataaggtgctacaggggcgcgaggatgtcaccggcaaggtgatcgacatgctgtgcgacggtaaggcgctgtcgatgaacaacatgaaggcgattccgtgcccctatcatcgctatttttggctgacgccggcgatgctggcggaagagatcgccgcggcgaaaaccaagggcacccgcgccgaacaggtgatgaaagtcgagcaggagctgtttgcgctgtacgccgacccgcagctggaagaaaaaccggagcaactgagctttcgcggcggcgcctactactcggaggtggccgtcgagcttatcaacgcgatctacaacaacctgggcgcggagatggtggtgaatacccgcaacaacggcgcgattcatggcctggatgatgatgcggtggtggaaaccaacagcattattgatgcgcaaggggcgcggccgctggcgttcggcccgctgccgccggcgatgaatggcctgacccagcaggtgaaagccttcgagcggttgacgattgaagccgcggtacacggctgtcgcgaaagcgcactgctggcgctggtgaccaacccgctggtcggtaacgtcaccgatgcccaggcgctgctggatgaagtattaaccatcaaccgtcaatggctgacgcaatttaactga

SEQ ID NO: 137683 - DNA, 309 bp, Enterobacter cloacae
atgccacgaatcgtactctgttgtgccgcaggcatgtcgaccagcatgctggtgaacaaaatgaaagcagaagcccagcagcgtgcgctggcgctggaaatctatgcggtggcggtggcggaatttgaacgcgaattgccacacgccgacgtcattctgctcgggccgcaggttaaatatgaagccggacggctaaccgcgctggccgcgccgcagggcaaggcggtggcggtgatcgatatggctgactacggcatgatgcgcggctctgcggtgttggataaagcgctagccctgctcgaacactaa

SEQ ID NO: 137684 - DNA, 744 bp, Enterobacter cloacae
atggatatcgtaggtcagctgcaggaaggaatgcgccgctttagtgcccaggagtcgcgcgtcgccacctttattctacaaaatctaagctttaccgccagcgcctctattgacgagctggcagccagcgcgggggtcagccctgccaccattacccgcttcgcccgctcggtgggctgcgatgatattcgtgatctgcgtaaacagctggcgcaggccagcgaacggcgcgccagctggcttacgccggacagcgccgccctgcccgtcgcctggcgcgacaaacttagcagccttggcgttaccctaactcgtcagctcggccataccgcggaagcggcggtggaaaagtgtaaatcgcgcctgctgagcgcccgtgcggtacactgcttcgcccttggcgcccaggacgtgacgctggccgcgctgctccagcatcagctactgccctccggcatcgcgattaatctctgtcaggatgcagcgctgatgcggctgaccgccagcaccctcaatgacgatcatctgctgctggtgctggccactgccgaggccaaccctgtgttgcaaagcgccaccttgcaggcgcgtacgcagggagtgaccattattgctctgacgccggaacagcacgcccttggcgatatggccagcgccatcctgccgctgcccgctgacccgcagcaggctcgctatgccctgctactgctggtcgatctgcttaacgatacgttgattgcctga

SEQ ID NO: 137685 - DNA, 1152 bp, Enterobacter cloacae
atgcacctgctcgccgttctcgttttcccataccccgaggaagctgcggcagcccatcggcgttttaaacgacccggtgactttcaccacctgatcgtagttgaggatatccgggtacatgcgcttgctggcgcactccagcgccagctgtttgatgtcgtagttcgggtcaccgaacttatggttcaggccgtcgcggatcgcgaacaccagtttcgggaacaccgcggttttgcgatttttaccgaggccggcaatgcggttgcgcagaatcgactgctggatcagccgcgattcccagctggtgccaaggccgaatccgaaggtgacgaacggcgtctggccgttggcggtatgcagtgtgttaacctcatactccagcgactggaaggcgtcgtagcactctttttcggtacgggcgcgggcatagccttcggcatccgggatctgccactcttcggcgattttgcgatgctttttgaagctttcgctgacgaacggcgccagcacttcatcgatgcggttgatggtggtgccgccgtaaatatggctggcgacctgggcgatgatctgcgccgtcaccgcggtggcggtagagatagacttcggcggctcgatctccgcgttgcccatcttaaagccctgggtcagcatgcctttcaggtcgatcagcatgcagttgaacatcgggaagaagggcgagtaatcgaggtcatgatagtggatcatgccgcgttcgtgagccatcaccacatcgtggggcagcaggtgctgccgggcgtagtgcttggcgacgatcccggccagcaggtcgcgctgggtcgggatgactttactgtccttgttggcgttttcgttgagcagcgcggagttggtctgctcgacgaggccgcggatctcctgattgagacggccgcgcttctcacgctggctatcgcggtcatggcgatactcaatgtaggcgcgcgccagctgcttataggggccggacatcagctggttttccaccgcggtctggatctcgttgatgtcgacctgggcgcggccctgcatttgttggctaacgacttctgcgacggtggcgcaatagtctgcgtcatcgactcccgctgctttagctgcacgcagaattgcttcctgaatgcgctctga

SEQ ID NO: 137686 - DNA, 471 bp, Enterobacter cloacae
atggagctggcggatctgaatgcggtgctgggggaagtgatcgctgcggagagcggctatgagcgggaaatcgccaccgccctgcaggccggcgaaattccggtacgtatgcacccgctgtctatcaagcgcgcgctggcgaatatggtggtcaacgcggcccgctatggcaatggctggatcaaggtcagcagcggcagcgaagcgagccgggcctggttccaggtagaagatgatggaccggggattaaacctgagcagcgggagcacctgtttcagccgtttgtacgcggcgacagcgcccgcagcaccagcggcaccgggctggggttggcgattgttcagcgtattatcgacaatcacaacggccggctggagattggctccagcgaacgcggcgggttactgatccgcgcctggctgccggtgcaccggatgctgacgccgatgaaacccgccagggagagctga

SEQ ID NO: 137687 - DNA, 1623 bp, Enterobacter cloacae
atgcgcgttaatcatggtttaaccccgcaggatctcaaggcttatggtatcaatgacgtccaggatatcgtccacaaccccagctacgacatgttgtttcaggaagagctcgacccgaacctggaaggctacgaacgtggcgtattaaccactctgggtgctatcgccgtcgacacgggcatttttaccggtcgttctccgaaagataagtatctcgtgcgcgacgacaccacccgcgacaccgtctggtggtccgataaaggcaaaggtaaaaacgacaacaagccgctttcgcaggaaacctggcagcatctgaaagggctggtgacccagcaactgtccggtaaacgcctgtttatcgtcgacgctttctgcggcgccaatgccgatacccgtctcagcgtacgtttcattaccgaagtggcctggcaggcgcacttcgttaaaaacatgttcatccgtccgagcgatgaagagctggctgaattcgtgcccgacttcatcgtgatgaacggcgcgaaatgcaccaatccgcagtggaaagagcagggcctcaattcggaaaacttcgtcgccttcaacctcaccgagcgcattcagctgatcggcggcacctggtacggcggcgagatgaagaaagggatgttctcgatcatgaactacctgctgccgctgaagggcatcgcctccatgcactgctcagccaacgtcggcgagaaaggcgatgtcgccattttcttcggcctctcaggcaccggcaaaaccaccctctccaccgacccgaaacgccgcctgattggcgatgacgaacatggctgggatgacgacggcgtgtttaacttcgaagggggctgctacgccaagaccatcaagctctctgaagcggccgagccggatatctatcacgccatccgccgcaacgccctgctggaaaacgtggtggtacgcgccgacggcacggtcgatttcgatgacggttcaaagaccgaaaatacccgcgtctcctaccccatcgaccacatcgacaacattgttaagccggtgtctaaagcgggtcacgctaccaaagtgatcttcctgacggccgatgcgttcggcgtcctgccgccggtctcccgcctgaccgccgaccagacgcagtaccatttcctgtccgggtttaccgccaaactggccggcaccgagcgcggcgtaaccgaacccacgccaaccttctccgcctgcttcggcgccgccttcctgtcgctgcacccgacgcagtacgccgaagtgctggtcaaacgcatgcaggcggctggcgcgcaggcttatctggtcaataccggctggaacggcaccggcaagcgcatctcgattaaagatacccgcgcgatcatcgacgccatcctcaatggctcgctggacaacgcggagacctttaccctgccgatgtttaacctgcagatcccgacggcgcttccgggcgtggatacccacatcctcgatccgcgcagcacctatggttccccggagcagtggcaggaaaaagccgaccagctggcgaagctgtttattgagaattttgagaagtataccgatacgccagcgggcgccgcgctggtggcggcaggaccgcagcgctaa

SEQ ID NO: 137688 - DNA, 879 bp, Enterobacter cloacae
atgactcaacacgatcaattacatcgttatctgtttgaaaactatgccgtgcgcggcgagctggtgacggtgtcggaaaccctggaacagattctggcgaatcacacctatccccaaccggtcaaaacggtgctggcggagctgttggtcgccaccagtctgctgaccgcgacgctgaagtttgccggcgacattaccgtacagctgcagggggatggccctttacagctggcggtgatcaacggcaataaccagcagcagctgcgcggcgtcgcccgcgtgcagggcgagattgcggacgatgcggatctgaaaacgatggtcggcaacggctacctggtcattaccatctctccggaagaaggtgagcgctatcagggcgtggtcggtctggaaggcgatacgctggccgcctgcctggaagattatttccagcgttcagagcagctgccgacgcgccttatcatccgcaccggcgatcatgaaggccagccgatggcgggcgggatgctgctgcaggtgatgccggcgcaggatgcccagactgccgacttcgagcacctggcgacgcttaccgagaccattaaggcggaagagctgttcaccctgccggcaaatgatgtgctgtggcgcctgtatcatgaagaagaagtcacggtctacgacccgcagagcgtggagttcaagtgcacctgctcccgcgaacgctgcgccggcgcgctgaagacgctgccggatgaagagattgatagcatcctcgccgacgaaggcgaaattgatatgcactgcgactactgcggtaaccactatatcttcaatgccatggacatcgccgagatccgtaataacgcctctccggccgatccgcaggttcattaa

SEQ ID NO: 137689 - DNA, 402 bp, Enterobacter cloacae
atgaaagagaagcccaccgaaaccgtcagactggacaaatggctttgggccgcccgcttttacaaaacccgcgcgctggcgcgggaaatgattgaaggcggcaaggtgcattacaacggacaacgtagcaaacccggaaaaatcgtcgaactcgacgccatgctgacgctgcgccagggcaacgacgagcggacggtgcgcattatcggcattaccgaacagcgccgcccggcaagcgaagccgtcaacctgtatgaagagacggcggagagtatcgagaagcgtgaaaaaatggccctggcgcgcaaaatgaacgccctgaccatgccgcaccctgacagacgtccggacaagaaagagcgccgcgacctgatgagatttaaacacggcgagagtgaataa

SEQ ID NO: 137690 - DNA, 684 bp, Enterobacter cloacae
atgcactttgatatcgcctggcaggaggtcgataccgttctgctggatatggacggcacgctcctggacctcgccttcgacaactacttctggcaaacgctggtgcctgaaacctggggggccgcccgcggcctcaatttgcaggaggcgaaagacgccatgcgccaggagtatcacgccgtgcagcatacgctaaactggtactgtctggattactggagcgagcgcctgggtttggatatttgtgcgatgaccagcgaacaaggtccgcgcgccacgctgcgcgaggataccgtgccgttccttgatgcgctcaaggcctgcggtaagcgacgcattctgttgaccaatgcccatccccacaatctggcggtgaagctcaaacacaccggcctggacgcgcaccttgatttattactttccacccacacatttggttatccgaaagaggatcagcgtctgtggcgcgccgtggcggaggaaactggccttgaggcgcacaaaacgctgtttgtcgacgacagcgaggcgatactggatgccgcgagggagtttggcattcgttactgcctgggtattaccaatcctgactccggactggcggaaaagcagtatctgcgccatccggggctgaatgattaccgacgactgatcccttcgcttaccccgaaggagaggcgatga

SEQ ID NO: 137691 - DNA, 2130 bp, Enterobacter cloacae
atgggcacctttctgatattccttacagctctgctaatctgcgtattgctcatcggatggtggtatcgcgctcacgccagacgccgccgactccccctactgcacgcctttagcgacgctaccacgcggcagcttcctgcggatgagcgccaggctattgagaagtatgttgccgagttgagccacgcccagcaggtgccggcgtccggtgcgaccagcgcgcctgtcgctctggcgctgaacgaacagagtgataccgtctatgcggtgacacgcgccatcacccgctacgggatcaccaccgacgcgccgaataaatggcgctatttcctcgattcggttgaagttcatctgccgccgttctgggaacagcatatcaacgatgaaaacagcgtcgagctgatccccaccgacagcctgccgctggttatcacccttaacggtcatagcctgagcgactatcgccaggaagcgcaaagctacgccctggaacgcgcttcggccacccaggcctccattcgcggcgaagagagcgagcaggtagagttgcggcagatccgtcgggaaacgcctgaagaacacgctctgaatcgcccggacgggctgcgcgaagcgatcctgatcgtcgcctcctttctgttcttttatttcagcctgattgggccagctgtctttaccccctggctggtcgccgcaggtttgttgctgctcgccgccggactgtgggggatttatgccccgccgcgtcgcgccgcgctgcgcgaaatccattgcctgcggggcgtccctaagcgctggggattgtttggcgaaaacgatcaggagcagatcaataacatctcgctgggcattatcgatctaatctatccgcgccactggcaaccctggattgcccaggacctggggcagcagaccgatattgatatctatctcaaccgccacgtggcccgtcagggacgctacctgtcgcttcatgatgaagtgaaaaacttcccgctgcagtactggctacgcagcgcgattatcgccgccggcgccctggtggtggtgattatgctgtgggccagcgtaccgttgaatatgccgtttaagttcaccctgtcgtggctgaagggcgcgcaaacgattgaagccactaccgtcagccagctggaaaaagcccatgtgcgcattggcgatacgctgcgcctgaccggtaccgggatgtgtaatatccgcacgccgggcagttggtccgccaaagaggattcgccgttcctgcctttcgattgttcacagattgtgtggaacgacgcccctcctctgccgctgccggagtctgacattgtcagcaaagcgaccgccctgatgcagtccgtccagcgccagctgcacccggaaaccgacgatgattcccgcgtcagccctgccctacgctccgccattcagaaatcaggcatggtgctactggatgatttcggcgatatcgtgcagaaaactaacgatctctgctcggcaaaggatgattgcctgcggctgaagaatgcgttggtcaatcttggcaatacccgtaactgggaaacgttaaccaagcgcgccaccgccggcaagctggatggcgtgaacgtgctgctgcggccggtcagcgccgagtcgctggagaatctggtgaccacctcaaccgcgccctttgtgatacgcgaaacctcacgggccgcgcaggcgctgaacagcccggctcccggcggttttcttatcgccagcgatgagggcagcgtactggtcaatcagccgtggccggcggtgagtctgtatgattatccggcccatgagcagtggggcgaactgcggcggctggccggtatgctcatgcatacccccttccatgccgaaggtatcgttaccaacctgtttactgacgccaacggcacgcagcatatcaacctgcatcgcatccccgaccgcagcggcctgtggcgttatctgggcatcaccctgctgctgctgtcaatggtggggtgcatggcttaccacgccgtgcaggccctgcgtcgttatcaacgccatcgtcagcgtatggaagagattcagaaatattacgaaagctgccttaatccggttttgctcccctcatctgactcgcaagattaa

SEQ ID NO: 137692 - DNA, 567 bp, Enterobacter cloacae
atgacaatgagcaaatcattacaaaaacccaccattctcaatgttgaaactgtcgcccgttcgcgcctctttaatgtcgaaagcgtcgatctggagttcagcaacggtgtgcgtcgcgtttatgaacgtatgcggccttccacccgtgaagcggtgatgattgtgccgattgtggatgatcacattattttgattcgtgagtatgccgtggggacggagtcctacgagctgggcttctccaaagggctgattgatccaggtgaaaccgtggatgaagcggccaatcgcgagctgaaagaagaggttggctatggcgccaataagctgacgtttttgaagaagctcagtatggccccctcctacttctccagcaaaatgaatatcatggtggcggaagatctctatccggagtcactgccgggcgatgaacctgagccgctaccgcaggtgcgctggccgctggcgcagctgatgtcgctgctggatgaagaagattttaacgaggcccgtaacgtcagcgcgctgtttttagtgcgggaatggctgcagacccagggccgactctga

SEQ ID NO: 137693 - DNA, 2559 bp, Enterobacter cloacae
gtgaagttcgtaaagtatctattgatccttgcagtctgttgcgtactgctgggagcaggctcgatttttggcctctacaaatacatagagccgcaactccccgacgtcgcaaccctgaaggatgtgcgtttgcagatcccgatgcaggtctatagcgccgacggtgagcttattgcgcagtacggcgaaaagcgccgtatccctgtgacgttgcagcaaattccccccgagctggtgaaagcgtttatcgccaccgaagacagccgcttctatgagcaccatggcgtcgatccggtaggtattttccgcgccgccagcgtggcgatgttttcaggccacgcctcccagggcgccagcaccatcacccagcagttagcgcgtaacttctttctcagccccgagaagacgttgatgcgtaagattaaagaggcctttctggccatccgcatcgagcagttgctgaataaagatgaaatccttgagctgtatctgaacaagatctacctcggctaccgcgcctatggcgtcggcgccgcggcgcaggtctattttggtaaacctatcgaccaactgaccctgagtgagatggcggtgattgccggtctgccgaaagcgccttccacttttaacccgctctattcgatggatcgcgcgaccgcccgtcgcaacgtggtgctgtcgcgtatgctgagcgaaggatacatcacccaggcgcaatacgatgaggcgcgcagcgaacccatcgacgccagctatcacgcgccgaaaatagccttctccgccccttacctgagtgaaatggtgcgccaggagatggtgaatcgctacggcgagcaggcctacgaagatggttatcgggtctacaccaccattacccgtaaaaaccagcaggcggcccagcaggcggtacgcaataacgtgctggattacgatatgcgtcacggctaccgcggcccggccagcgtactgtggaaagtcggcgaaacgccgtgggagacgaagaagatcgtcgattcgctgaagcgtcagtctggctacggtccgcttttcccggcggtggtcacctccgcgaatgcccaggaggctgtcgcgctgttggctaacggcgactccgtttcgctgacgatggagggcgtgcgctgggcccgtcgctttatctcagatacgcagcaaggggcgaccccgcgtaaagtcaacgacgttgtgcaggccgggcagcagatctgggtacgcaaggtgggtgacagctggtggctgtcccagctcccggacgtcaactcagcgctggtctccattaacccgcaaaacggcgcgattattgcccttgtcggcgggtttgactttaaccagagcaagttcaaccgcgccacccaggcgctgcgccaggtcggctccaacattaaaccgttcctctataccgccgcgatggataaaggcttaacgctggcaagtatgctcaacgatgtgccgatctcgcgctgggatgcgggcgcaggttccgactggcggccgaagaactcgccgccgcagtatgccggtccgattcgtttacgccagggcctggggcagtcgaaaaacgtggtgatggtgcgcgctatgcgcgccatgggcgtagactacgccgccgagtatctgcagcgctttggcttcccggcgcagaacattgtccacacggaatcgttggcgctgggctcagcctcctttacgcccctgcaggtcgctcgcggttattcggtgatggccaacggcggcttcctggtcaatcctttctttatcagtaagattgagaacgatcagggcggggtcctctttgaggagcgtccgaaaattgcctgtccgcagtgtgatttaccggtaatttacggcgatacgccaaaatccaacgtgctggaaaacaaggatgtggaagatgtcgccacctccgcggaaccgcagaatggcaacgtgccgccgcagccgcagctggagcaggccaaccagtcgctggtcgcgcagagcggcgcgcaggaatacgcgccgcatgtgattaacacaccgctggccttcctgatcaagagcgcgctgaacagcaacatctttggcgagccgggctggatgggcaccggctggcgcgccggacgcgatctgcagcggcatgacatcggtgggaaaaccgggaccaccaacagctcgaaggacgcctggttctcaggctacggaccgggcgtggtgacctcggtttggatcggctttgacgatcatcgtcgcgatcttggccggaccaccgcctccggagcgattaaagatcagatctctggctatgaaggcggtgccaaaagcgcccagccggcctgggacagctttatgaagagcgtgctggaaggcgttccggaagaaccgttaactccgccgccgggtatcgtcacggtgaatatcgaccgtagcaccggtcagttggcgaacgggggcaatagccgggcggagtactttattgaaggaacccagcccacccagcaggcagtccgtgaggtgggcaccaccctgactgacggcggcggtgaaacccacgaattgttctga

SEQ ID NO: 137694 - DNA, 798 bp, Enterobacter cloacae
  misc_feature (179)..(188): n is a, c, g, or t
atggctttcagaaactggcggcttggaatgcatatccaacaggatagcattgccattgtcgcgctattgcatgaacgttcacactgggcgctgcgccgctggtggcgtatcccattgccgccggggctggtacgtcagggaatggtggcggacgtcagcgcactcggttcgcggctggnnnnnnnnnnggagctaccggcgcagcatcaggttagtatcgcctttcccgcggtgcgcacactgcaaaagcgtcttccgtatccccagttcgccctgcgggagcgggaacaggcgacgtgggtagccagcgccatgagccagcagctggcaatgcctgcctccgcgctatgtattgattatgcgcctacctcgcgggatgacggctggcaggttacggcggcgcagcggctggatatcaatgttctgcgggagctggcagggcggctgcggctgcgggtggcggccatcgtaccggatgccagtgcgctcggcgcctttttcccctggatgactgcggcagaccagggcctggcgtggcgggatgaaaagcactggctgtgggcgacccgtgaggcctggggcagcgacgcctgcgctgatgtcgggtccttaagccagctggcggggcagcttcagattccgctgcgcctgtgtattgacgcgggcgatgaggccagtcgctttgatgtctggcaagtgattcaccgtcggcagcccccgctgccagccgatggcgatcgttacgccattgcccttgggctggcgctgggaggcgggcggcatgacgcatgtcgttaa

SEQ ID NO: 137695 - DNA, 504 bp, Enterobacter cloacae
  misc_feature (450)..(459): n is a, c, g, or t
atgacgcatgtcgttaatcttcttccctggcgcgacctgcgtcgccgccagcgcctgcgctacgtcctgttgttaaccatcggcattgtgctgctgggcgggatgggcctgctggtgagccgaacggcgcgtctgcagcgcgacttcctggcgacgcttcacacgacggccgacgcgcagctgctcgcctcgcttaagcagcgcgagcaggcgatgcgtgaggcgtggcagcagcatcaacggcagcgccagcagtaccagcgcagatcggcgatcgccgcctggcaacccaggctgcaggcgctggcggcagatctgcccgcgcaggcgtggctgacgcggctggagtaccagggcgtactcctcacgctggacggcctggcccttaacctgcaggcgctaaccagcgtggaggctgcgctgactcgcgtcgcgggattcgcgccggcnnnnnnnnnncccagcgcgacgccgaggggcgttggcagttcagttttaccctga

SEQ ID NO: 137696 - DNA, 429 bp, Enterobacter cloacae
atgcggattaaccttcggggcgcctggacggggctgccgatcctgatcgcaatggggctgtcgggaggcggcgtggcgctctggcgcgatctgcgcccgccgcaggcggcggtaacccgtgatgcggcgttgcaaacgcagtggcggcggatcatggcgctgcgcatccccggcgaggaaaatcccggggcgcgcatcgacacgcagtcattttcgcccatagccattccgctctccggagcgaagcttatcgcctggcgtccgcagggaagcggcggcgagatggagctgaccctgtcctggtcaacggtacccgcgcttttttcctggctggcgcgctgcgggatgaatccgcgttcgttttcgctgggccgtgaggcgcagacgctccgcctgcgactgctgctggaggcggaagatgagcggtaa

SEQ ID NO: 137697 - DNA, 339 bp, Enterobacter cloacae
  misc_feature (319)..(328): n is a, c, g, or t
atgagcggtaaacgctggatcttcctgtggctaccgctgtcgctgctggcggccgagcgtgaccctttccagccggttgaggatccctgccgcacggcgcagctttcgcaatggcgctatggcggggcggttggggatgaggctggctggacggggtttctgcaggatgggaacggaaagtggcgacgggtacgcatggatgagcaattgcccacgggctggcgggtgagccggctgacggccggtgagctggacatcgtcacgtcttcgggatgtgaaccgccagcgtggcgctggcaacgtgaagggaaacaacatnnnnnnnnnnaaacaacatga

SEQ ID NO: 137698 - DNA, 525 bp, Enterobacter cloacae
atgctggcaggctgcatgtgggaggccaataaacgcgggctggcaataatttcgacctgctgcttgcgctccagcgcggatagctccagctcaagcaagcgaccgttgatcttgccgatgttaaaccctgcgcgggtgctggcatcgtttaccgatacatcgctgcttagggtggtgatttgcccggagcctggcgggcttccggcttccgcaagccgccacttcacccccagctcacgaaggctggtttcgctcatcgacacgatatgggcggccagctccacctggccgaccggcagatccatctcctgcgcccaggccttcaacgccggcaggtgccgggcatcatcgcggatcagcagccgattagtccgcttgtccgccatcaggtgtcccctggcgctgagcagctttccgccgcttttagccagctcctcagcgtcggcaaagtgcagggtcacgctctccgcctgcaggggcaggttctgcaggcgtttctcctgttcggcttcacgctgcgcctga

SEQ ID NO: 137699 - DNA, 1014 bp, Enterobacter cloacae
atgaccatgattgaaacggcaaaagcgccgcaagcgcagagccacagcggactactgctggacgtgaaagatcttcgcgtcacctttaaaacgccggatggcgacgtcaccgccgtcaatgatctgaacttcaccctgcaggcgggcgagacgctcggcattgtgggcgaatccggctccggtaaatcgcaaaccgccttcgccctgatgggactgctggcggccaacggtcgcatcgggggttccgccacctttaacggtcggcaaatcctcaatttgcccgagcgtgagctgaacaaactgcgcgctgaacaaatctcaatgattttccaggatccgatgacctctcttaacccctatatgcgggtgggcgagcagttaatggaagtcctgatgctgcataaagggctgagtaaagccgaagcgtttgaagagtcggtgaagatgctcgacgcggtaaaaatgccggaagcgcgtaagcgcatgaaaatgttcccgcacgagttctccgggggcatgcgtcagcgcgtgatgattgccatggcgctgctgtgccggccccggctgctgattgcggatgaaccgaccactgccctggacgttaccgtgcaggcgcagatcatgacgctgttgaatgagcttaaacgcgaattcaacacggccattatcatgatcacccacgaccttggggtggtggcaggtatctgcgataaagtgctagtgatgtacgccgggcgcaccatggagtacggtcaggcgcgcgatgtcttctatcaaccgtcgcacccatactctattgggctgttgaatgcggttccacgtctggatgcggaaggcgatgcgttgttgaccattcccggcaacccaccgaacctgctgcgattgccgaaaggctgtccattccagccgcgttgtccgcatgccatggagcagtgcagcagcgcgccgccgctggaatcgttcgcgccaggccgcctgcgcgcctgctttaaaccggtgggggatctgctatga

SEQ ID NO: 137700 - DNA, 1005 bp, Enterobacter cloacae
atgaacgccgtaactgaacaacgaaaagtcctgctcgaaattgccgacctgaaggtgcacttcgatatcaaagatggcaagcagtggttctggcagccgtcgaaaacgctgaaagcggtggatggcgtgacgctgcgcctttacgagggggaaaccctcggtgtggtaggggagtcgggctgcggcaaatcgaccttcgcccgcgccattattggtctggtgaaagcgaccgatggcaaagtggcctggctgggtaaagatctgctgggcatgaagcaggaagagtggcgcgacgtgcgcagcgatatccagatgatcttccaggatccgctggcctcgctgaacccgcgcatgaccatcggagaaattatcgccgaaccgctgcgtacctatcatccgaagatgccccgtcaggaagtgcgcgatcgcgtcaaagcgatgatgatgaaagttgggttgctgcccaacctgatcaaccgctatccgcacgagttctccggcggtcagtgtcagcgtatcggcatcgcgcgggcgctgatccttgagccaaagctgattatctgcgatgagccggtctccgcgcttgacgtgtcgattcaggcgcaggtcgtcaacctgctgcagcaactgcagcgtgagatggggctatcgctgatatttatcgctcacgatctggcggtggttaagcatatctccgatcgggttctggtaatgtatctgggccatgcggtggagctggggacctacgacgaggtgtaccataatccgctgcatccctataccaaagcgctgatgtcggcggtgccgatccccgatcctgatctcgagaaaacgaaaactatccaactgctggaaggcgaattaccctcgccgattaatccgccctcaggctgcgtattccgcacccgctgtccgcttgccggaccggagtgcgccaaaacccgcccggtgctggaaggcagtttccgccatgcggtttcctgccttaaggtagacccgttataa

SEQ ID NO: 137701 - DNA, 834 bp, Enterobacter cloacae
gtgggtatgctttctgccgctcgtctgcggctttatcatttacttttcgatcagaaccgacgttccggccgccgctttgaagggctgtgcggacttttcgccctgctcagcgtactggtaatatttatcgagtcgggactgggcacgcaatatcacctgacattagatgaatggcatattttcgtctggctggagctgctggtgaccgcggtctttaccctggaatacctgctgcgtatcgctacctggcccaatccgctccactatattttcagcttttgggggctgattgacctggcgacgattttaccgctgtatgtgatgtggctatggccggaaattagcctcaattatgtattcgcctggcgggcaatgcgggcgatccgcgcgctgcgtattctcaaactactgcgctttatgccttcgctcaacgtgttctggcgagcgattgtcagcgcgcgccatcagctgatcctgttttattcgtttatcgccattgtgatggtgattttcggctcgttaatgtatctgattgaggggccggaatacggctttaccacgcttaacgcctcggtctattgggccatcgtgaccatcaccaccgtcggctacggagacatcacgccgcacacgccgttgggtcgcatcctggcctccattcttatcctgatcggctactccattattgccataccgaccggacttatcaccacgcatatgaccagcgccctgaatcgtcgacgacagcagcgcctgtgtccgcagtgtcagcagggcgaccatgacgataacgcccgtttctgccatgcctgcggtcatgccttgccgaagtaa

SEQ ID NO: 137702 - DNA, 330 bp, Enterobacter cloacae
atggatatggatttaaacaaccgcctgaccgaagacgaaacgctcgagcaggcttacgatatcttcctcgaactggcggccgacaatctcgacccggcggacatcattctgtttaacctgcagtttgaggagcgcggcggcgccgaactgttcgacccttcggcagactgggaagagcatgtggattacgatctcaacccggatttcttcgccgaagtggtgattggtctggcggataccgacggcggggaaatcaatgatatcttcgcccgcgttctgctgtgccgcgagaaagatcataagctgtgccatattctgtggcgtgaataa

SEQ ID NO: 137703 - DNA, 1461 bp, Enterobacter cloacae
atgacaaccttttacacggtggtgaactggctggtcattctggggtactggctgttgatcgccggtgtaacattacgaattctaatgaaacgccgcgctgtcccgtccgccatggcatggttgctgatcatttatatcctgccgctggtggggatcatcgcctatctctcctttggcgagctgcatctcggcaagcgtcgggccgagcgcgccagggcgatgtggccctccacggccaaatggctaaacgacctcaaagcctgcaaacatatcttcgcggaagataacagcccggtggccgaatccctgttcaagctgtgcgaacggcgtcagggcattggcggcgtaaaaggcaaccagctacagctgctgacggaatctgacgacgtgatgcaggccctgatccgcgatattcagctggcccgtcacaacatagagatggtcttttatatctggcagcccggcggcatggccgacagcgtcgctgaatccctgatggccgccgctcgccgcggggttcactgtcggctaatgcttgactccgcgggcagcgtggcctttttccgcagcccatgggcggcaatgatgcgtaacgccggtattgaagtcgtcgaagctcttaaggttaacctgatgcgcgtattcctgcgccggatggacctgcgtcagcatcgtaaaatggtgatgatcgataactatatcgcctacactggcagcatgaatatggtcgatccgcgctactttaaacaggactcaggagtcggacagtggattgatctgatggcgcgaatggaaggcccggtggcgacctcgatgggcatcgtctactcctgcgactgggaaatagagaccggcaagcgcattctgccgccgccgccggacgtcaatatcatgccgttcgaagaggccagcggacatactattcacacgatcgcctccggaccgggctttccggaagatctgattcatcaggctctccttaccgccgcctatgcggcgaaagagcatctgatcatgaccaccccctacttcgtacccagcgacgacctgctgcatgcgatctgtaccgccgcccagcgcggcgttgacgtgagcattattttaccgcgcaagaacgattcgctgctggtaggctgggccagccgggccttcttcaccgagctgctggcggccggggtcaaaatctatcagtttgagggcggactgttgcataccaagagcgtgctggtcgatggcgagctaagtctggtggggaccgtcaacctggatatgcgcagcctgtggctcaacttcgagattaccctggtcatcgatgacgccggtttcggcagcgatctggcggcggttcaggatgattatatctcgcgctcgcgcctgctggatgcccgtctctggttaaaacgtccgctgtggcagcggatcgccgagcgactgttttacttcttcagcccgttgctgtaa

SEQ ID NO: 137704 - DNA, 207 bp, Enterobacter cloacae
atgggggctgttttcactcgtagagtcgttgcaatgaagcgtagtagaacggaagtagggcgctggcgcatgctgagacaggtgaatcgccgtaaagcgcgctggctggaagcccaatcgcgccgcaatatgcggatcctcgctatcaggaagggactggtgaaacggcagcgtcatgccctgctgtttatcttccctgacagctaa

SEQ ID NO: 137705 - DNA, 648 bp, Enterobacter cloacae
atgttttcaataagccctgtatttttttgggctaacatttatgtacctgccgattttgaggattattgtgtgaataccctgaaaaaaaccgcattgctttctgtacttgccttatatattcctgtgtcgcaagccgcggctaaggaatacagtcttgatccacagcatacctcggttgtgatctcctggaaccatttcggcttctcaaaccctaccgcctatatctctgatgtttcagggaaactggcctttgataaagagaatccggagaaatcctcggtgaacgtcacgctgccagtgaaaaccattgacactcacgtcaaggcgttaacggatgagtttttaggcaaagagtattttgatgttaaaacgtttcccgacgccactttccagagtaccaaagtggaaagcaaaggcgacaataaatatgatgtggaaggtaatttgaccattaaaggcatcaccaaaccggtggtcctgcatgccgtcctgaataagcaggatatgcacccaatggtgaaaaaagaggccattggatttgatgccaccggggtgataaaacgttcagactttaagcttgataaatatgtgccggcggtaagtgataacgtcaccatcacgttatccacggaagcttatgcaaaataa

SEQ ID NO: 137706 - DNA, 297 bp, Enterobacter cloacae
gtgctttacgttatctacgctgaagatatcgccgattctctggaaaagcggctgtcggttcgccccgcgcatctcgcgcgtttacaactcttacacgatgaaggccgactgcttaccgccgggccaatgccggccgttgacagtaacgaaccgggcgcagcaggattcagcggatcaacggtgattgccgagtttgaatcgctggaagcggcccaggcctgggctaatgacgatccgtatatcgccgccggggtttaccgccaggtctcagttaagccgtataagaaggttttttga

SEQ ID NO: 137707 - DNA, 747 bp, Enterobacter cloacae
atgagcgcaatgacccttgatttacctcgccgctttccgtggccaacgctgctgtccgtggctatccacggtgccgttgtggcggggctgctttatacctcggtacatcaggttattgaacagccttctccgacgcagccgatagagatcacaatggtggcgccggccgatcttgagccgcctccggcggcgcagcctgtcgtggagcccgttgttgaacccgaacctgagccggagccagaggtagtgcctgaaccgccgaaagaggcgccggtggtgatccataaaccggaacctaagccgaagcccaaacctaaacccaagcctaagccggagaaaaaggttgaacagccgaagcgggaagtgaagccggcagcagagccgcgtccggcctcgccgtttgaaaacaacaatacggcgccggcgcgtacagcgccaagcacctcgacagcagcggctaaacccaccgttactgctccaagcggcccgcgggcgatcagccgcgttcagccgtcctatccggcgcgcgctcaggcgctgcgcatagaaggtacggtacgggtgaagtttgacgtttcgcctgatggccgcattgataatctgcagatcctctctgctcagccggcgaatatgttcgaacgcgaggtgaaaagcgcgatgcgcagatggcgttatcagcagggaagaccgggtaccggcgtaacgatgaccatcaaattccgcctgaacggcgtcgagattaactga

SEQ ID NO: 137708 - DNA, 873 bp, Enterobacter cloacae
atgtggcaagcaatcagtactcttttacgcgattggcataccgaagacgctgaaatcgaactgaaaaccgagctgcccggtggagagatccattccgcctggcatttacgcttcggcgggaaagattacttcgtgaaatgcgacgaacgggaacttctgcctatcttcaccgccgagtccgatcagctggagctgctgtcgcgaagcaaaaccgttcgcgtaccgcaggtctttgccgtcggcagcgatcgcgactatagcttcgtggtcatggagtacctccctccccgtccgctggatgcgcacaatgcgtttctgcttggccagcagctagcccacctccatcagtggagcgatcagccgcagttcggtctggattttgataacgatctttccaccacgccgcagcccaacgcctggcagcgtcgctggtcggttttttttgccgagcagcgtatcggctggcagctggagctcgcggcggagaagggattgcactttggcgatatcgataccttagtcgatatggtacagcagcgactggccaaccatcagccgcagccttcgctgctgcacggggatctgtggtccggcaactgcgccttagggccggatggcccctatatattcgatcccgcctgctactggggcgaccgcgagtgcgatttagccatgctgccgatgcatccggaacagcccccgcaaatctatgacggctatcagtccgtttcgcctctgccgtcgggttttctcgatcgtcagccgatttatcagctttatactctgctgaacagagcgattttgtttggcggccagcacctggtaacggcccagcaggcgctggatgatgtattgatggagaaaatgcgttaa

SEQ ID NO: 137709 - DNA, 285 bp, Enterobacter cloacae
atgagcaatgagattaccgcctgggtcgtcagcgtgaccttccatgaacaggcgctgacggagatcaatgaggtaagcaaccattttacccgtgccgggtttgtactgacgctcaatgatgaagagggcacgccccatgagctgggtaccaacaccttcggcctgctgagcggccagacggccgaggaagttaaggccctcagcgccggcctggcggaagcggcccttggccgcccggcggaaatcgctgtggccacattcgccgagtggttaaaagctcaataa

SEQ ID NO: 137710 - DNA, 966 bp, Enterobacter cloacae
  misc_feature (698)..(707): n is a, c, g, or t
atgaccaaaatttacacgctcacgctggccccctcgctggatagcgccacgcaaaccccacagatctacccggaaggcaaacttcgctgcagcgcgccggtatttgaacctggcggcggcgggatcaatgtggcccgcgccgtgacctttctcggcggcaaagccaccgccattttcccggtcggtggcgctaccggcgagcatcttgccgccctgctggccgatgagcaggtgccggtcgagaccgtcgaaacccgcgactggacgcggcaaaacctgcacgtccacgtggccgccagcggcgaacagtatcgcttcgttatgcccggcgcggcactgacggacgatgaattccgccgtctggaagagaaggttctgactatcgaacccggctctctgctggtggtcagcggcagcctgccgccaggtattagcgtcgataatctgatgcagctggtgaaaaatgcgcaacagcagggactgcgctgcatcattgacagttccggcgatgcgctggccgccgcgctggacgtcggcaatattgagctggtgaaaccgaaccagaaagagcttagcgccctcgtgcagcgcgatctcagccaacccgatgacgtgcgccttgccgctcagtcgttgatccagtccggtaaagtgcgccgggtggtggtctccctgggtccgcagggggcattaggcgnnnnnnnnnngggtccgcaggggccattaggcgtggacgccagcggcagcgttcaggtagtgccgccaccgatgaaaagccagagcaccgtcggggctggcgacagcatggtgggcgccatgaccttgcgtctggcggaaaacgccagccttgaagacatggttcgctttggcgtcgccgccggtagcgccgcgaccatcaaccagggcacccgcctctgctcgcgggccaatacgcaaaaaatctatgattatctctgcgggcgttga

SEQ ID NO: 137711 - DNA, 759 bp, Enterobacter cloacae
atgaagcttttaaagacagtacccgcagcggttatgctggcgggggggctttttgcgtctgttggcgcaatggccgatgattctgtatttaccgtcatggatgacccttccgctgccaaaaaaccgttcgaaggggtggttaacgcaggctacctggcgcagtccggcaacaccaagagctcttcgatgacggcggattccaccctgacctggtatggtaataccaccgcctggtcgctgtggggcaacgccagcaacacgtcgtccaatgatgagcgatcctcagaaaaatatgctgtcggcggacgtagccgctataacctgaccgatatgaactatgtctttggtcagggtagctggctaactgaccgctacaacggctatcaacagcgcgatgttgtgacggcgggctatggtcgtcagatcctcaacgggccggtgcacagtctgcggtttgaattcggtcctggcgttcgctatgacgaatataccgacggggatactgatacccagccgctgggttatgcttcgggtacctgggcctggcagatgaccgataacgccaaattttcgcaaggggtatcggtgttcggcgccgaggacaccacggtcaactcagagagcgcgttaaacgtggcgattaacgcccatttcgccctgaaggtcgcctacaacgtgacctggaactctgagccgcctgcgtccgcgccggagcataccgatcgccggacctcgctctccctcgggtataagatgtaa

SEQ ID NO: 137712 - DNA, 234 bp, Enterobacter cloacae
atgaaaaacaatcgatataccatcgcagccctggcgctgtgcgtgctttcttttggcgcatcagccgccacgcccgttccgccatcgggtcatcaggatcatacccaggtaggtatcgccaaagcctctgacgttgaggctggtgcgaatattgcgcccggcgcccctaccaccggaaaatccatgaacgacgcctttaatgtgcatacgctggtggccggcgagtggtcttaa

SEQ ID NO: 137713 - DNA, 693 bp, Enterobacter cloacae
gtggccggttttttcccacagcacacggtccatcatgaacggaccttttacttcctgatactggtactctttcagtttagaacgaacaaacgtttccagttcacggaagatggtccagccgtcattgtgccagaacaccatccccggcgcctcttcctgcatgtgatacaggtcgagctgcttaccgattttacggtggtcacgcttggcggcttcttccagacgctgcaggtaggcattcagcgcttttttatctgcccacgcggtgccgtagatacgctgcaacattttattgttgctgtcgccgcgccagtaggctccggcggttttcatcagcttaaagtgatggcagaagcgcatgttcggtacgtgcggaccgcggcacatatcgatatattcttcatgatgatacaggccaggcttgtcatcatgggcaatgttttcatcaagaatagaaactttatagctttcgccgcgtttcacgaaggtttcacgcgcttcatgccagctcactttcttcttgatgacgtcgtagtttttctcggcgagctcatgcatacgtttttcgagcgcgtcgatatcttcctgggtcagggtgtggtcgaggtctacgtcatagtagaaaccattatcgacaaccggaccgatagccattttggtgttgggccacagctgtttgatggcatggcctaa

SEQ ID NO: 137714 - DNA, 363 bp, Enterobacter cloacae
atgaaagagttatcagtaattgaaatggaatccattgctggtgcatacagctgggatttttcctccctgggttcagcactgacttctatcgtatcaaacggcgttgaagcagttgcatccgcggtcactctgggatcgattcttgctagctacggcagttctattggtggaactcatggcagcgataacggcgggatcttcggcgttggtaccattggtatggccgttggtggcttatgggggctgatcgctggcggtattattggtgctattaccggtgccttacttggttgggatgattctatgcagctgaccatggacggttataaaggtttgattgatggaacaaccggcattttctaa

SEQ ID NO: 137715 - DNA, 363 bp, Enterobacter cloacae
atgaaagaattatctgtaattgaaatggaatcaatctctggtgcttatagctgggacttctcatccctgggatcggcgatttcatcgattgcatcaaacggcgttgaagcagtcgcttctgctttgctgttaggtgcaatcaccgcaggtggtggtagcatcgttggtggctcccacggcagcgacaacggcgggatctttggggttggtactatcggtatgatgatcggtggactctatggccttatcgttggcgcaattaacggtgccgcagcaggtttcttcctgggctgggatcagtcaaaacagatcgcgattgatagtttagaaggtatctttaacggtactccgggtatttattaa

SEQ ID NO: 137716 - DNA, 1647 bp, Enterobacter cloacae
atggcagcaaaagacgtaaaattcggtaacgacgctcgtgtaaaaatgctgcgcggcgtaaacgtactggcagatgcagttaaagtgaccctgggcccgaaaggccgtaacgtggttctggacaaatccttcggcgcgccgaccatcaccaaagatggtgtttccgttgcacgtgaaatcgaactggaagacaagttcgaaaacatgggcgcgcagatggtgaaagaagttgcctctaaagcgaacgacgcagcaggcgacggtaccaccaccgcaaccgtactcgctcaggctatcgtgaacgaaggcctgaaagctgttgcagcaggcatgaacccgatggatctgaaacgcggtatcgacaaagcggtactggctgcagtagaagagctgaaagcgctgtccgttccgtgctctgactccaaagctatcgctcaggtaggtaccatctccgctaactccgacgaaaccgtcggtaaactgatcgcggaagcgatggataaagttggtaaagaaggcgtgatcaccgttgaagacggtaccggtctggaagacgaactggacgtagttgaaggtatgcagttcgaccgcggctacctgtctccgtacttcatcaacaagccggacaccggtgccgttgagctggaaagcccgttcatcctgctggctgacaaaaaaatctccaacatccgcgaaatgctgccggttctggaagccgtagcgaaagctggcaaaccgctggtcatcatcgctgaagacgttgaaggcgaagcgctggcgaccctggtggttaacaccatgcgcggcatcgttaaagtggctgcggtgaaagcaccgggcttcggcgaccgtcgtaaagctatgctgcaggacatcgctactctgactggcggtaccgttatctctgaagagatcggtatggagctggaaaaagcgactctggaagacctgggccaggcgaaacgcgtggttatcaacaaagacaccaccaccatcatcgatggcgttggcgaagaatccgcaatccagggccgcgtagctcagatccgtaagcagatcgaagaagcgacctccgactacgatcgtgaaaaactgcaggaacgtgtcgctaaactggctggcggcgtggcagtaatcaaagtcggtgcggctaccgaagttgaaatgaaagagaaaaaagcacgcgtcgacgacgccctgcacgcaacccgtgctgcggttgaagaaggcgtggtggctggcggcggcgtagcgctggttcgcgttgcggcgaaactcgctggcctgaccggtcagaacgaagatcagaacgtcggtatcaaagttgcgctgcgcgcaatggaagcgccgctgcgtcagatcgtttccaacgccggtgaagagccgtctgttgtggcaaacaacgtgaaagcaggcgacggtaactacggttacaacgcagcaactgaagaatacggcaacatgatcgacttcggtatcctggacccaaccaaagtcacccgttctgcactgcagtacgcggcttccgtggctggcctgatgattaccaccgagtgcatggtgaccgacctgccgaaaggcgacgcgcctgacttaggtgctgctggcggcatgggcggcatgggcggtatgggcggcatgatgtaa

SEQ ID NO: 137717 - DNA, 294 bp, Enterobacter cloacae
atgagtattcgtccgttacatgatcgtgtgatcgtcaaacgtaaagaagttgaaaccaaatctgcgggcggcatcgttctgaccggttctgcagcagctaagtcaactcgtggcgaaatcatcgctgtcggtaaaggccgcatcctggaaaacgggaccgtgcagccgctggacgttaaagttggtgacatcgtgattttcaacgatggctacggcgtgaagactgaaaagatcgacaacgaagaagtactgatcatgtccgaaagcgacatcctggcaattgttgaagcttaa

SEQ ID NO: 137718 - DNA, 1251 bp, Enterobacter cloacae
atgagtggtttaaaacaggagttagggctgggacagggagttgggttgctttccacctcattactgggtaccggcgtcttcgccgtcccggcgctggcggcgctggtcgctggcgataacagcctgtgggcatggccgctgctcattctccttgttttcccgattgccatcgtcttcgccctgctcggccgccattttcccagcgcgggcggcgtggcccactttgtcgatatggcctttgggccacgtctggccagcgtcaccggctggctgtttttatcggttatcccggtcggactccccgccgccctgcacatcgccaccggttttggccaggcgctgttcggctggcatgatgcgcagctgctgctggcggagctgggcaccctggccatcgtctggtgggtcggttcgcgtggcgccagctccagcgccaacctgcagacgttggttgccgtactgattgtggcgctgatcgtcgtagtctggtggcgcggcgggataagcccggcgcagatccccttcccggccccggcggagattgaccgcgggcagctctttttggcgctgtcggtgatgttctggtgctttgtcggtctggaagccttcgcgcatctcgcctcggagtttaaacatcccgagcgtgatttccccagggcgctgatgataggcctgctgcttgccggctcggtctactgggcctgcaccgtgctggtgctgcacttccacgcctttggcgaggagatggcggcggcggcgtcattaccgaatatcgtggtccgtctgttcggcgtcgaagcgctgtgggtagcctgcgtcatcggctatctcgcctgtttcgccagcctcaacatctatattcaaagctttgcccgcctggtctggtcgcaagcgcagcataagccacacagctacctcgcaaggctgtcgccacggcagatcccgcgcaacgccctcaacgccgtgctgggatcctgcgtagttagcacccttggcatctatctgctcgatatcaatctggacgcgctgatcgtttacgccaatggcattttcatcatgatctatctgctgtgcatgctggcgggttgtcgtttgcttcgcggtcgctatcggctattggcggtggtgggcagcattctctgtctgctgctgctggcgatggtcggctggaaaagcctgtacgcgctggtgatgctggcggggctgtggctgtttttacccaggcgcaagctggcgacgggaagcgtgtag

SEQ ID NO: 137719 - DNA, 477 bp, Enterobacter cloacae
gtgcgttggattccgtttattgctttttttctttacgtttacattgagatatcgatctttatccaggttgcgcacgtgctgggcgtctttatgaccctgatcctggtgatctttagctcggtggtagggatgtcgctggtgcgtaaccagggcttcaaaaacttcctgctgatgcagcagaagatggccgcgggcgagagcccggcggcggagatgatcaagagcgtatcgctgattatcgctggtctgctgctgttgctcccggggttctttaccgacttcctcggcctgctgctattgctgccgccggtgcaaaagcatttgacgatgaagctgatgccgcacctgcgcttcagccggatgccgggcggcggctttagcgccggaactggcggcggagagaccttcgaaggggaattccagcgcaaagatgagcagcgcgaccgtctggaccataaggacgatcgccgcgattaa

SEQ ID NO: 137720 - DNA, 1437 bp, Enterobacter cloacae
atgttaaacaacattcgtatcgaagaagatctgttgggcaccagggaagttcccgcggacgcttactacggcgttcatactctgcgagcgattgaaaacttctacattagcaacagcaaaatcagcgacataccagaattcgtgcgcggcatggtcatggttaagaaagccgccgcgctggcgaacaaggagctgcagaccattcccaaaagcgcggcaaatgcgattattgccgcctgtgacgaagtcctgaataacggcaaatgcatggaccagttcccggtcgatgtcttccagggcggggccggtacctccgtaaacatgaacaccaacgaagtcctggcgaacattggccttgagctgatgggccaccagaaaggcgaataccagtacctgaacccaaacgatcatgtcaacaaatgccagtccaccaacgatgcttaccccaccgggttccgcattgcggtgtatgcctccatccttaagttaatcgatgcgattaaacagctgggcgaaggcttccaggcgaaagccgtggagttccaggacatcctcaaaatgggccgcacccagctgcaggacgcggtgccgatgaccctcggccaggagttccatgccttcaatgtgctgcttaatgaagagaccaaaagcattctgcgcactgcggagctgctgctggaggtgaacctcggcgccaccgccattggtactcgcctcaacaccccggacggctatcaacagctggcggtgcagaagctggctgaagtaagcaacttaccggtcgtcccggcggaagatctgattgaagccacttcggactgcggggcgtacgttatggttcacagttcgctgaaacgcctggcggtgaaactgtccaagatctgtaacgacctgcgcctgctctcttccggtccgcgcgcgggcctcaacgaaatcaacctgcctgagctgcaggctggctcttcaatcatgccggcgaaggttaacccggtggtgccggaggtggtcaaccaggtctgcttcaaagttatcggcaacgataccactgtgaccatggcctccgaagccggtcagctgcagttgaacgtgatggagccggtgatcggccaggcgatgttcgagtcgattcatatcctgaccaacgcctgctacaacctgctggagaaatgcgttaacggcatcaccgccaataaagcggtatgtgaaggctacgtgtataactccatcggcatcgtcacctacctcaacccgtttatcggccaccacaatggcgatatcgtcggcaagatctgtgccgaaaccggcaagagcgtacgggaagtggtgctggagcgcggactgctgacggcggcggagttggatgatattttctctgcgcaaaacctgatgcatcccgcttataaagcaaagcgttataccgatgaaagcgaacagtaa

SEQ ID NO: 137721 - DNA, 1302 bp, Enterobacter cloacae
atgtttggtgcagaactggttattgtcctgctggcgatttatctcggcgcccggctcggcggcatcggtatcggctttgccggtggccttggcgtccttgtcctgacgcttatttttcaaattaaaccgggtgcgatccccttcgacgttattgaaatcattatggcggtgattgccgctatcgccgccatgcaggtcgccggcgggatggattacctggtcagcctcgccgaacggatgctgcgccgccacccgaagtacattaccttccttgccccgctggtgacctggtttatgaccgtgctcgctggcaccggccataccgccttctccacgctgccggtgatcaccgaagttgccaaagagcaaggcattcgtccgtctcgtccactgtcgattgcggtggtggcctcccagatagcgatcaccgcctcgcccatttccgccgcagtggtctttttcgctggtatccttgaaccgctgggcgttagctatttgacgctgctggccatctgtattccggtcacgctgctggcggtgatgctcaccgctatcgtctgcaacttcctcggctgcgaactgaaagacgatccggtttaccaggagcggctggccaagggggaagtcagactgcgcggcagccaggtatttgagctgcagccgcacgccaaacgttccgttctgctgtttttgatcggcatcgtggcggtgatgttctacgccacggccatcagcgataccgtcggcctgattaagaacccggtgctgccgcgtaacgaggcgatcgtggtatttatgctgaccatcgccaccctgattagcatcacctgtaaaatcgacaccggcgaagtgctcaacgccagcacctttaagtccgggatgagcgcctgcgtctgcgtcctcggcgtcgcctggctgggagataccttcgttaaagcgcatatcagcgacatccaggccgtggccggcgatctgctgcataattacccatggctgctggcggtggtactgtttttcgccgccacgctgctctactcgcaggcagccacgaccaaggcgttgatgcctgccgcgctgctgctgggcgtcagcccgctgacggctatcgcctcgtttgccgcggtctcggcgctgttcgttctaccgacctacccaaccctgctggcggcggtagagatggacgacaccggctcaacccgcattggtaaatatgtctttaaccacgccttcctgatccccggcgttatcgctatcacgctgtgcgtgatcctcggttttatctttggcgggattatgctgtaa

SEQ ID NO: 137722 - DNA, 324 bp, Enterobacter cloacae
atgactacgcctgatgctgttgttgtgctctgtaccgcgccggacgaagcgaccgcccaggatctggcggcaaaagcgctggcggaaaaggtggcagcctgcgccacgctgctgccgggggccacctctctgtattactgggaagggaaactcgagcaggagtatgaagttcagatgctactcaaaactgaccttgcccatcagcaggcgctgctggactgcctgaagtcacaccacccgtatcaaaccccagaactgctggttctacccgtcacgcatggagacaacgattacctctcatggcttaccgcatcattacgctga

SEQ ID NO: 137723 - DNA, 1797 bp, Enterobacter cloacae
atggcttaccgcatcattacgctgatcctgctgctgtgcagcacatcagccaccgccgggttattcgacgcgccggggcgctcgaacttcgtgcctgctgatcaagctttcgcctttgactttcagcagcaacagcatgacgtcaacctgagctggcaaatcaaggatggttattatctttatcgtcaacagtttaccttcagcgccgccggggcgacgatcgacgaaccggcgctgccggcgggagagtggcatgaagatgagttttacggcaaaagcgagatctttcgccaacgcctgaccgtgccggtgacggtgaaggaggcggacaaagaggctactctcaccgtcacctggcagggctgcgccgatgccggattctgttatccgccggagactaaagtgatcccgctgagcgccgtgcgggcggcctcaaacgacgctcagccaaccgccgccgcgcccgtgtcgtcgctgaaccatcgcccggccttcaatccgccgctgccggttgaaccgcgcccgatggaggagaacgccgtgccgcaggcgcctgccatggcgccgccagcaggcgtccccgctcgtctgcccttcaccgccctgtgggcgctgctgattggcattggtatcgccttcaccccctgcgtgctgccgatgtacccgctgatttcgggcatcgtgctgggcggaaaacagcggctttccaccccgcgcgccctgctgctggcctttatttacgtccaggggatggccctgacctataccgcgctggggctggtggtagccgccgccgggctgcagttccaggcggccctgcagcacccgtatgtcctggtcggcctgtcggcggtgtttatactgctggcgctctccatgttcggcctgttcacgctgcagctgccgtcgtcgctgcagacccggctgacgctgctcagcaataagcgccagggcggctcgcccggtggcgttttcgcgatgggcgccattgccgggctgatctgctccccctgcaccactgcgccgctgagcgccattctgttgtatatcgcccagagcggtaatctgtggctgggcggcggcacgctgtacctttacgcgctgggcatgggtctgccgttgatccttgtgaccgtgtttggcaatcgcctgttgccgaaaagcggcccgtggatgagccatgtgaaaaccgccttcgggtttgtgatccttgccctgcccgtcttcctgctggaacgcatactcggcgaccagtggggggtacggctgtggtcaatgctcggtgtcgccttcttcagctgggcgtttatcacctcgctgggcgctacccggccgtggatgcggctggtacagatcattctgcttgccgccgcgctggtcagcgcgcggcctctgcaggactgggcgtttggcgccccggcggccgagcagcaggcgcacctggctttcacccgcgtcagctcggtggccgagcttgaccaggcgctggcgcaggcgaaaggtcaaccggtgatgctcgatctttacgccgactggtgcgtggcctgcaaagagtttgaaaaatacacctttagttcacctgacgtgcagcaggcgctgaaaggcaccgtgttattacaggttgatgtgacgaagaacagcccgcaagacgtcgcgctgctgaaacacctgcaggtgctgggtctgccgacgatcctgttcttcaacgctgagggtcaggaacagcctgagcggcgagtcaccggctttatggatgccgcggcattcagcgcccatttgcgcgattggcaagcgtga

SEQ ID NO: 137724 - DNA, 591 bp, Enterobacter cloacae
atggaggagaacaccgtgctacgtgaagacgtcctggcagaagccattaagattcttgaaattgaaggtatcgccaacacgtcgctggagatggtcgctgagcgcgtgtcctgcccgacgagcgacctgaaacgcttctggcctgaccgcgaagcgctgctgtacgacgcgcttcgctatctgagccagcaggtggatgcctggcgtcgtcagctcctgctggacgagaccttaagcgcagagcaaaagctgctggcacgctatgccgcactcaccacctgcgtaagcaaccagcggtacccgggctgcctgtttatcgccgcctgcaccttctacccggatcctcagcaccccattcaccagctggcggaacagcagaagcaggcttcgctggcctacactcacgagctgctgactcagctggaggtggatgacccggaaatggtcgccaagcagatggagctgattgtcgagggctgtctgagccgtctgctggtcaaacgtagccagacggatgtggataccgcccggcggctggctgaagatattctacgcttcgcccagtgccgtatgggcggcgccttgacctga

SEQ ID NO: 137725 - DNA, 357 bp, Enterobacter cloacae
gtggctgtcgtcgagagcgtccagcgcgccaaaatcccggtcgtcgatcagcaggctggcggtggagtcggtggggatatcgtgctcgatttgcgcaaaggttaccgtggcggtgaggtgctgttcgctgcccgcgttgcgggtcaacagcacgctgacctcacccatgcggacgccgtaacccgccgcccggcaggcgccggtattatcgcaggcgagctcccagtctttttgtgcaaaggaaaaaccttgcaggggagccgccagcaggggcgtagagcagaggcccagccaggcagcccagaagaacgcgcgcatatcaatccctgtcagcaatcagtgagggggaaattatag

SEQ ID NO: 137726 - DNA, 729 bp, Enterobacter cloacae
ttgcgctttcaacactgcgttatacaacgtgcgcagagccaggttatccgcctctttctgctgcctggggatcacctggctgacaaaggtcggcagcatccaggtgccacccggggtgatttcccgacacataccggtgctgtacttcaggctgggggtaaaggttttaccatcccaaacgcgcgtctcgccggtgacgcagtcggccatgccccgttctttgtgcaaaaagacgatagcgccgtcggcgtagctggaggcctcggtagtgagcagtcgcggtttgctcaactgggcgttatcgaccagccacagggcataaccgtcgttatagggcgctcgccagcagagcgcctgcgccagagaatgggttttgtccagcgcggtcagcgtgatctggcgatctgccgccggaatggcctgattctgccagtcgtcgcagcgctggttcagcagcggcgtcaggatgggcagcagtttctggcgctgaagcatactcaacggcactggctgcgcgttatggagaaccggggcggcgataatttccggggcgggagtggctggcaaaatggcatcgtcgccggcatcgcctttatccagcagcgcatcggcggtgccggtgcgtcgctgaaacgcatccattttacccagcacctcgcggctgccggcgctggaaagcggcaggtgctggccgttaagggtgaattcgattttgcgctgattcgttaa

SEQ ID NO: 137727 - DNA, 2139 bp, Enterobacter cloacae
atgaaatccatgcacattgccgccagctgcgagctggtcacccgcttgtccacccaccgtcgcgttgtggcgctggacagtaccgattttaccgatgtggcggcagtcgtcatctccgtggccgacagtcgcagcggcatccttactctcctcaggcgtagcggatttaacctgccggtctacctgctgagtgagacggcggtcgacaagccggagggggtgcaggcggtgatcgccggtaaagatcaggagtggctggagctggaggcggcggcctgtgattatgaagcgcgtctgctgccgccgtttttcaataccctgacccagtacgtcgagatggataacagcacctttgcctgtccggggcatcagcacggggcgtttttcaaaaagcaccctgcaggccgtcagttctatgacttttttggcgaaaatgtctttcgcgccgacatgtgcaacgccgatgtgaaattaggcgatctgctgatccacgaaggatcggccaagcacgcgcagaagttcgctgcgaaggtgttcaacgcggataaaacctacttcgtcctcaatggcacctcggcggccaacaaagtcgtgaccaacgcgctattgacccgcggcgatctggtgctgttcgatcgcaacaaccacaagtcaaaccatcacggggcgctgatccaggcgggggcgacgcctgtttacctggaagccgcgcgcaatccgttcggctttatcggcggcattgacgagcgctgctttgatgagcattacctgcgggatctcatccgcgaagcggcgcctgagaaagccaatgcctcccgcccgtttcgtctggcggtgatccagctcggaacctacgacggcacggtctataacgcccgccaggtggtggataaaataggccacctctgcgattacatcctgttcgactcggcgtgggtgggctatgagcagtttatcccgatgatggccgactgctcgccgctgctgctggagctgacccccgacgatccgggtatttttgtcacccagtccgtgcacaagcagcaggccggcttctcacagacgtcgcagatccataaaaaagataaccatctgcgcggccaggcgcgcttctgtccgcacaagcggctgaataacgcctttatgctgcatgcctccaccagcccgttctatccgctgttcgccgcgctggacgtcaacgctaaaatccacgaaggcgagagcggccgccgcctgtgggccgagtgcgtggcgctgggcatcgaggcgcgcaaagcgatcatcgctaactgcaagatgatccagccctttattccgccgacggtggcggggcgcccgtggcaggatcacccgaccgaggcgatcgcccgggagcgccgcttcttcagcttcgagccgggcgcgcgctggcatggttttgagggctatgcggacgaccagtattttgtcgacccgtgcaagctgctgctgaccaccccgggcatcgacgcggagagtggggagtacagtgagttcggcattccggcgactattctggcgcattatctgcgtgaaaacggcatcgtgccggagaagtgcgatctcaactcgattctgttcctgctgacgccggcggaaagtgccgaaaaaatggcgcagctggtagcgatgctcgggcagtttgaacagcatattgaagcggatacgccgctggccgatgtgttgccgaccatctataacaaatatccggtgcgttatcgcgactataccctgcgcgagctgtgccaggagatgcacgatctgtacgttagctttgacgtgaagagcctgcaaaaagagatgttccgtaaacggagcttcccaagggtggtgatgaatccccaggatgccaaccacgagtttattcgcggcaacgttgagctggtgcgtctgagcgaggcggaaggccgcgtcgcggcggagggggcgctgccgtatccgccgggcgtgctgtgcgtggtgcccggcgaggtctggggcggcgccgtgctgcgctatttcctcgcgctggaggagggggtcaatatgctgcctggcttctcgccggagctgcagggggtttacagcgagacggatccggacggcattaagcggctgtatggctacgtgctgaagggataa

SEQ ID NO: 137728 - DNA, 1254 bp, Enterobacter cloacae
atgaatcttaagctgcagctcaaaatactgtcgttcctgcagttctgcctttgggggagctggctcaccacgcttggctcgtacatgtttgtcacgctgaagtttgacggcgcggcaatcggcgcagtgtatagctcgctcggtatcgccgcggtgttgatgccgacgctgctcggcatcgtcgccgataagtggatcagcgccaaatgggtatacgccatctgccacctggtcggcgcgttaacgctgtacctcgcggcgcaggtcaccacgccgggcgagatgttcctcgtgatcctgcttaactcgctggcctatatgccgacgcttggcttgatcaataccatctcctactaccgcctgcagtcggcggggctggatattgtcaccgatttcccgccaattcgtatctggggcaccatcggctttatcctcgccatgtggggcgtgagcttctccggctttgaactgagccatatgcagctgtacattggcgcgacgctgtcggtcctgctgactctgttcaccctgacgctgccgcatattccggtcgccaacgcccagcgcaatcaaagctggacggagatgctcggcctgaacgcttttgcgctgtttaaaaacaagcgtatggctatcttctttatcttctcgatgatgctcggcgccgagctgcaaatcactaacatgttcggtaacaccttcctgcacagcttcgataaagatccgctgtttgccggcagctttatcgtcgagcacgcgtcagtgctgatgtcgatttcgcagatttccgaaacgctgtttatcctgaccatcccattcttccttagccgctacggcattaagaacgtgatgcttatcagtattgtggcgtggatgctgcgctttggcctgttcgcctttggcgacccgacgccgttcggcactgtactgctggtgctgtcgatgatcgtctacggctgcgccttcgacttctttaacatctccggttcggtgttcgttgagaaagaggtgcgcccggaaatccgcgccagcgctcaggggatgttcctgatgatgaccaacggcttcggctgtattctcggcgggatggtgagcggcaaagtcgtcgaacactttaccgtcgaggggatcactgactggcagagcgtgtggctgattttcgccggctattcgctggtgctggcctttgccttcgtggcgctgttcaaatacaaacacgtcagacaaccgaccgccgcccagcagagcgtgtga

SEQ ID NO: 137729 - DNA, 1086 bp, Enterobacter cloacae
atgatgaaaaaatacttagcgctcgcgctgattgcgccgttgctcgtttcgtgttccagctccaataaaaaaggcgccgaatacaacgaggcctgggtcaaggacacgaacggattcgatattttgatgggccagttcgcccacaacatcgagaacatttgggggtacaacgaagtcctgctcgccgggccaaaggactacgtcaagtacaccgaccagtatcaaacccgcagccacatcaacttcgatgaagggacgatcaccgtcgagaccattgccggcaccgaccctcgcggacgactgcgccaggcgatcatcaaaaccctgttgatgggcgatgaccccaactccattgacctctattccgatgtcgatgacatccagatctccaaagagccgttcctctatggccaggtggtggataacaccggggcgtcgattcgctgggagtggcgcgccgcgcgctttgccgactatctgctgcaaacccgtctgaagagccgcaacaacggcctgcgcgtggtctacagcatcaccattaacctggtgccgaaccacctcgacaaacgtgcgcataaatacctcggcatggtgcgtcaggcctcgcgtaagtatggggttgatgagtcgctgatcctcgcgattatgcagaccgaatcctcctttaacccctatgcggtcagccatgccgacgccatggggctgatgcaggtggtccagcacagcgccggcagagacgtcttccgctcccagggtaaatccggcctgccaagccgcagctatctgtttgacccggcgaataacatcgacaccggtaccgcctacctggcgatgctgaacaatgtttacctcgccggcatcgataaccccacctcgcgtcgctacgcggtgatcactgcctataacggcggcgccggcagcgtactgcgggtcttctccagcgataaagtgcaggcggccaatattatcaacagcatggcgccaggggacgtctaccagacgctgaccacccgccatccgtcggcggaatcgcgccgctatctgtataaagttaatacggcgcagaaaagctaccgccgtaaatag

SEQ ID NO: 137730 - DNA, 276 bp, Enterobacter cloacae
atgagcagaaccattttttgtaccttcctgcagcgtgaagcggacggccaggatttccagctgtatccgggcgagctcggaaagcgtatttacaacgaaatctccaaagaagcctgggcgcagtggcagcacaagcagaccatgctgatcaacgagaaaaagctcagcatgatgaacccggagcaccgcaaactgcttgagcaggagatggtgcagttcctgtttgaagggaaagacgtgcacatcgaaggctacacgccgccggaaaaacagtaa

SEQ ID NO: 137731 - DNA, 1059 bp, Enterobacter cloacae
ttgacttttctcgccacgcaattttcagcccaggttctggactggtacgacaaatacgggcgtaaaaccctgccctggcaaatcgccaagacgccctacaaagtatggctctccgaagtgatgttgcaacaaacccaggtgaccacggtaatcccctattttgaacgctttatggcgcgtttccccacggtggtggatctcgccaacgcgccgctggatgaagtgctgcatctgtggaccggtctgggctactacgcgcgggcgcgcaacttacataaagccgcgcagcaagtcgccacactgcacggcggggaattcccccggacctttgacgaagtggcggcgctacccggcgtcgggcgctcaacggcgggggcgattttatccctttcgctcggtcagcattatccgattctcgacggcaacgtgaagcgcgtgctcgcccgctgctatgctgtcagcggctggccggggaaaaaagaggtggaaaaacggctgtgggacatcagcgaagaggtcaccccggcagagggcgtcgagcgcttcaaccaggcgatgatggatctcggggcaatggtttgtacccgctcgaagccgaagtgcgagctgtgtccgctgagcaacggctgcgtggcctacgcgaaccattcatgggcggaatatccgggcaaaaaaccgaagcagaccctcccggaacgcaccggctacttcctgctgatgcagcacggcgacgaggtgtttctttcccagcgtccgccggtgggtctgtggggcgggttgttctgttttccgcagtttgcagacgaagcggagctacgcgagtggctggcgcagcgccagattaaggccgataatctgacgcaattaaccgcttttcgccacactttcagccatttccacctggatattgtgccgatgtggcttacagtgcactcatctggcgcatgcatggatgaaggcaacgcactctggtataacttagcgcagccgccgtcggtcggtctggcggcccccgtggagcgcttgttgcaacagctaaaagccggagcgccggtataa

SEQ ID NO: 137732 - DNA, 720 bp, Enterobacter cloacae
atgaaaaacgacgtcatctctccggaattcgatgaaaacggtcgcccgctgcgccgtattcgtagcttcgtccgtcgccagggccgcctgacgaaagggcagcagcatgcgctggataacatttggccggtgatgggcgttgaattcaacgatgcgccgctcgatttcgccgccctgtttggccgtgacgcgccggtcaccttagaaattggcttcgggatgggcgcctcgctggtggcgatggcgaaagccaaaccggaacagaatttcctcggcattgaagtacactccccgggcgttggcgcttgtctggcttctgcggaagaagaaggcgtacaaaacctgcgcgtaatgtgtcacgatgcggtggaagtgctgcataccatgatcccggataactcgctgaatatggtgcaactgtttttccctgatccgtggcataaagcgcgtcataataaacgtcgtatcgtgcagccgcctttcgctgagctggtgaaaagcaagctgaagctcggcggcgtcttccatatggcgaccgactgggaagcttatgccgtgcatatgctggaagtcatgtcctcgctggaaggctatcgtaaccagtcggcaagcaacgattacgtaccgcgcccggaatcgcgcccggtaaccaaatttgaacagcgtggccatcgtctcggccacggcgtatgggacttaatgttcgagagggtgaaataa

SEQ ID NO: 137733 - DNA, 327 bp, Enterobacter cloacae
atggccaagaatcgtagccgtcgtctgcgtaaaaaaatgcatatcgatgagtttcaggagttaggcttctccgtcgcctggcgtttcccggaagggaccagcgaagagcagatcgaccagacggtcaacgatctgatcgaagaggtgatagagccgaacaagctggccttcgacggcagcggttatctctcctgggaagggctcatctgcatgcaggagattggtaagtgcactgaagagcatcaggctatcgtacgcaaatggctggaagcgcgtaagttagaggatgtgcgcaccagcgaactttttgacgtctggtgggactaa

SEQ ID NO: 137734 - DNA, 717 bp, Enterobacter cloacae
atgcgtaaaacgctgctggcggtggcgctctccgtcaccgctttgtctgcccatgcggactaccagtgtagcgtcacgccgcgtgacgatgtgatcctcagcccgcagcaggtgcaggtgaaaggggaaaacggcgatctggtgataaagccggacggcaatctgacctttaacggcaaggcctatgcgctcagcgccgcccagcgcgaacaggcgcaggattatcaggccagcctgcgcagcagcctgccgtggattgacgaaggcgcgcggtcgcgagtcgaaaaaagccgcaaggcgctggataaaatcattaccgaacaggttggcgccaacagcagcatgcacggtcgcctgaccaaactggatgcgcagctgaaagaacagatgaaccgcataattgagcgccgcagcgatggcctgaccttccactataaagccatcgaccaggtacgcgccgatggccagcagctggtgaatcaggcgatgggcggcattctgcaggacagcattaacgagatgggggcgaaagcggtgctcaaaggcggcggtaatccgctacagggcattctcggcagcctcggcggcctgcaaacggcgattcaggaggaatggaaaaaccaggaggccgatttccagcagttcggcaaagatgtttgcagccgggtggtatcgctggaggacagccgcaaagcgctggttggctcgctgaaataa

SEQ ID NO: 137735 - DNA, 1137 bp, Enterobacter cloacae
atggctaatttgccgccgctgagtctctatatccatattccctggtgcgtgcagaaatgcccgtactgcgattttaattcgcatgcgctgaaaggcgaggtgccgcatgatgactacgtccagcatctgctgaacgatctgcaggctgatgcgcactatgcccagggacgggaaataggcactatttttatcggcggcggtacgccgagcctgctgtccggcccggccatgcaaaccctgctcgatggcgtccgcgcctgcctgccgctggccgccggggcggaaatcaccatggaagccaacccgggtaccgtggaggccgatcgcttcgttgattatcagcgcgccggggtgaaccgcatctccatcggcgtacaaagctttagcgaaccgaagctgcagcgcctggggcggatccacggcccggaggaggccaagcgcgcagcacgtctcgccagcggcctcggcttgcgcagcttcaacctcgacctgatgcacggtctgccggaccagtcgctggaggaggcgctggacgatctgcgtcaggcgattgccctcaacccgccgcacctgtcgtggtaccagctgaccattgagccgaacaccttgttcggctcccggccgccggtgctgccggatgacgacgcgctatgggatattttcgagcaggggcatcagctgctgagcgccgccggctatcagcagtacgagacgtccgcctatgctaagccaggcttccagtgtcagcataatctcaactactggcgctttggcgactacctcggcatcggctgcggcgcgcacggcaagatcaccttccctgacggacgcattctgcgaaccgccaaaacccgccacccgcgcgggtatatggaaggccgttaccttgagcgtcagcatgatgtggaagaagcggataaaccgtttgagttctttatgaaccgttttcgcctgctggaggccgcgccgcgcgctgaatttagccgctataccggacttgaggaagcggcgatccgcccgcagctggacgcggcgatagcccagggctacctgcaggaagacgagcagaactggcaggttaccgagcacggtaagctgttcctgaattccctgcttgagttgtttctgaacgagtaa

SEQ ID NO: 137736 - DNA, 594 bp, Enterobacter cloacae
atgcaaaaagtcgtcctcgctaccggtaacgccggcaaagtgcgcgaactggcctcgctgctggaagattttggtctcgatatcgtcgctcagaccgagctgggcgtggactctgcggaagagaccggcctgaccttcattgaaaacgcgattctgaaagcgcgccacgcggcgcagatcaccggcctgccggccatcgccgacgattccggtctggccgtcgatgctcttggcggcgcgccgggtatttactccgcacgctattccggcgtcgatgccagcgaccagcagaatcttgagaagctgctcgacgcgttaaaagacgtgccggacgaccagcgtcaggcccagttccactgcgtgctggtctatctgcgccatgccgaggatcccacgccgctggtgtgccacggcagctggcctggggtaatcacccgacaagccgccggtcatggcggcttcggttacgacccgatcttcttcgtcccgtcagaaggtaaaaccgcggccgaactgagccgtgaagaaaagagcgccatttcccatcgcgggcaggcgctgaaactgttactggaagcattacgtaatggctaa

SEQ ID NO: 137737 - DNA, 291 bp, Enterobacter cloacae
atgagtgccattgaaacctgcgctgacgggctggtgctgaggctgtacattcagcctaaggccagccgcgatagcatcgtgggcgtacatggcgacgagcttaaagtcgccattaccgccccgcccgttgatggccaggccaatgcccacctggtgaaatttctcgccaaacagttccgcgtcgccaaaagccaggtactgattgaaaaaggcgagctgggccgccataagcaagttaaaatcatcgccccacaacagatcccgactgcggtcgcggcgctaactgaataa

SEQ ID NO: 137738 - DNA, 567 bp, Enterobacter cloacae
atgaagacgttgactttcctgctttcaacggtcattgagctttacacgatggtcgtgttgttacgcgtctggatgcagtgggcgcgctgcgacttttacaacccgttttcgcagtttgtggtgaaagccacgcagccgattgtcggaccgctgcgccggattatcccggcaatggggccgattgacagcgcctcgctgctggtggcatttattctctgcgtcatcaaagcgatcgtgctgtttatggtgatcaccttccagccgatcatctggatctccgctctgcttattctgctgaaaaccatcggctcgttgatcttctgggtactgctgttgatggcgatcatgagctgggtcagtcagggccgtagcccggtggagtatgtgctgatgcagctggcggacccgctgctgcgccctatccgcaacctgctgccgtcgatgggcggtatcgatttctcgccgatggtgctggtactgctattgtacgtaatcaatatgggcatcgccgaagtgctgcaggccaccggtaatgtactgctgccggggctgtggatggcgctatga

SEQ ID NO: 137739 - DNA, 702 bp, Enterobacter cloacae
atgaacgatattgcgcataacctggcacaggtccgggacaaaatctccggtgctgccgcccgatgcgggcgtgcgccagaagaagtgacattgcttgcagtgagtaaaacgaaacctgcgagcgcgatcgaagaagccattgcggcaggccagcgggcatttggtgaaaactacgtccaggagggcgtggagaagattaaccatttccagcaggctggcgtcagcgggctgcagtggcactttattggccccctgcagtccaacaaaagccggttggtggcagagcattttgactggtgccacaccgtcgatcggctgaaaatcgccacccgcctgaacgagcaacgcccggcgcatttgccgccgctgaaggtgctgattcaaattaacatcagcgatgagcagagcaaatccggcatcccgctggaagcgctcgacggcttagcggcggagatcgctgagttacctcatctggaactgcgcggcctgatggccatccccgcgcctgagtcagaatatgtaaggcagtttgccgtcgcccggcaaatggcggtagcatttgcgcgattaaaaacgcggtaccccacggtcgatacgttgtctctgggaatgtcggacgatatggaagccgcaatcgcggcgggaagcacgatggtgcgcatcggtacagccatttttggtgcgcgcgactacagcaaataa

SEQ ID NO: 137740 - DNA, 981 bp, Enterobacter cloacae
atgaagctggaagaaatcgtagcccttagtgtaaagcataatgtctccgatctacacctgtgcaattccgccgcaccgcgctggcggcggcagggcaggctggagcccgcgccctttcccgcgccggatattgcgaatttactcaacgactggctcgatgccgcacagttactgcactggcaggaacacggccagattgactttgcgctgaccctggcctgcggtgcgcggctgcgcgccagcgccttcgcccatacgcgtgggatatcgctggtgctgcgcctccttcctgaacagtgcccgcgtctggacacgctcggcgccccgcctgcgctgagcgaactgctggcggaagagagtggtttgctgttggtcaccggagcgacgggcagcggcaagtcgaccaccctggcggcaatggtggggcacctcaatcagcatcttgatggccatattctgacgcttgaagatccggtggaatttattcatcacagcgagcgctgtctgatccagcagcgggaagttggccgtcactgtccttcgttcgccgcggcgctccgcgtggcgctgcgccaggatccggatgtgatcctgctcggggagctacgcgatagcgaaaccattcgcctggcgttaaccgcggcggagaccgggcacctggtaatggcgacattacatacccgcggcgcggcgccggcggtggagagattgatcgatgtctttccggcggaggagaaagatcaggttcgtagccagcttgccggaagcctgtgcgcggtgctggcgcaaaaattgttacctgcacgtcagggcgggagagttgcgctatacgagcttctggtcaacacgccagcggtggcgaatttgatccgtgaaggaaaagtacatcaattgcctggtgtgatgcagaccgggatgcaggccggaatgttgacctttacccagagttttcagcaacgtgtcgctgcaggcgcgctataa

SEQ ID NO: 137741 - DNA, 261 bp, Enterobacter cloacae
atgatccagggtgtcaacgtcggctaccacccggttgagcagctcaccctggcgaaagcgcgccagccccgccggagagagggggagcagtttgctgaaggtgaaaacgcgcaggtgctgcagcacgcgaaaggtagcgtcgtggctgaccaggcgctcaaagtagcgcccggcggtacggataattgccgcgccgcgaacgcccgcggcaggcagcatatagttaaaactgtagatcccggcgacgcccaccaccgctga

SEQ ID NO: 137742 - DNA, 1767 bp, Enterobacter cloacae
atgaataaaacccgtcaacaagagttaacccgctggttaaaacagcaaagcattatctcccgtcgctggttgatgatttcccgcctgcttggcgtggcgagcggtctgctgatcgtggcgcaggcatggttcctggcgcggatcctgcaccggatggtgatagagaatattccagcgaccgccctgctgctgccgctcacgctgctggtgctgatctttgtactacgcgcctgggtggtctggctgcgtgagcgggtcggctttcaggccgggcagcatattcgctatgaaattcgccgccaggttcttgaccgcctccagcaggcaggcccggcgtggatccagggcaaaccggccggcagctgggcaacgcttattcttgagcaaatcgacgacatgcacgactattatgcccgctacctgccccagatgacgctggcggcctgcgtaccgctgctgatcgttattactatttttccgattaactgggccgccgcgctaatccttctcggcaccgccccgctgatcccgcttttcatggcgctggtcgggatgggcgccgccgacgccaaccggcgtaacttccaggcgctggcccgcctcagcggccacttcctcgaccgcctgcgcggcatggaaaccctgcgtatttttcatcgcggtcaggctgaaaccgataatattcgcgacgcctcgcaggattttcgccaacgcaccatggaagtcctgcgtctggccttcctctcctccggggttctggagtttttcacctccctctccattgcgctggtagcggtgtattttggcttttcttaccttggcgagctgaacttcggccactatggcgcgggcgtcacgctgatggcgggattcctgacgctgatcctcgccccggaatttttccagccgttacgtgacctgggtaccttctaccatgccaaagctcaggccgtgggcgccgcagacagcctgaaaacgtttatggaaacgccgctgacccaggtagagcgtggcgagaaaacgttaaatgacaacgatctgattagcgtggaagcgcgcgacctggtgatcaaatctccggaaggtaaagttctggcggggccgcttaattttgcgctgcccgccggcgctcgcgtggtgctggtcggccagagcggatccgggaaaagctctttgctgaatacactgctcggctttctgccctatgaggggtcgctgatggtcaacggcgtagagctgcgcgagctggacgctgagcgctggcgccgcctgctgagctgggtaggacagaatccgcagttgcctgccgccacgctgcgggaaaacgtgctgctggcgtggcccgaagctagcgaagcacagcttcggctggcgctggacaaggcctgggtcagcgagtttatcgccctgctgccgcaggggatccataccgccgtaggcgatcaggcggggcgtctgtcggtaggccaggcgcagcgtatcgcggtcgcccgcgcgctgttggtgccgtgccgcctgctgctgctggatgaacctgccgccagccttgacgcccatagcgaacagcgagtcatgcaggccctgacccacgcctccagtgagcaaaccacgctgctggtcacccaccagctcgaggggctggccgactgggacgacgtctgggtgatgcaggacggacagattatcgaacaaggcgactacgccacgctggcccgtgctggtggggtcttctcggcgctgctggcccatcgtcaggaggagatttaa

SEQ ID NO: 137743 - DNA, 996 bp, Enterobacter cloacae
atgtatgccaattattatggggatctcatgggcacagccaaacacagtaaactgcttatccttggttctggacctgcgggatacaccgcggcggtctatgccgcacgcgccaacctgcagccggtgctgatcaccgggatggaaaaaggcggtcagctgaccaccacgacggaagtggaaaactggccaggcgatccgaacgatctcaccggtccgctgctgatggagcgcatgcacgagcatgccgcaaaatttgaaaccgagatcattttcgaccatatcagccgcgtcgatttgcaaaaccgcccgttccgtctgacaggcgacagcggcgagtacacctgtgacgcgctgatcatcgccaccggcgcttccgcccgttacctgggcctgccttccgaagaagccttcaaaggccgcggcgtttccgcgtgcgctacctgcgacggattcttctatcgcaaccagaaagtggcggtgatcggcggcggcaacaccgcagtggaagaggctctgtatctgtcgaatatcgcctctgaggtacacctgatccaccgtcgcgattccttccgtgcggaaaaaatcctcattaaacgcctgatggataaagtggcaagcggcaacatcgtgctgcataccgatcgtaccctcgaagaggtgaccggcgaccagatgggcgtcagcggcctgcgcctgcgcgataccaaaaacagcgacaatgtcgagtccctggaagtggctggtttatttgtcgccatcggccacagcccgaacaccgccatctttgagggccagctggagctggagaacggctacatcaaagtgcagtccggtatccacggcaatgcgacccagaccagcatcccgggcgtgttcgccgccggcgatgtcatggaccatatctatcgtcaggccatcacttctgcgggcaccggctgcatggcggcgctggatgcggagcgttacctcgacggtttggctgacgcttgcaaataa

SEQ ID NO: 137744 - DNA, 495 bp, Enterobacter cloacae
atggtagatagcaagaagcgccctggcaaagatctcgaccgcattgatcgtaacatcctgaatgaattgcaaaaagatgggcgaatttctaacgtcgagctttctaaacgggtgggactttctccgacgccttgccttgagcgtgtgcgtcgtcttgaaagacagggttttattcagggctatacggcgctgctcaacccgcattatctggatgcatcacttctggtatttgttgagattactctgaatcgtggcgcaccggatgtgtttgagcaatttaacgccgcagtgcaaaaacttgaagaaattcaagagtgtcatctggtttccggtgatttcgactatctgttgaaaacccgtgtaccggatatgtcagcgtatcgtaaattactgggcgagaccttgctgcgcctgccgggcgttaacgacacccgtacctacgtggtaatggaagaagtcaagcaaagtaatcgtctggttattaagacgcgctaa

SEQ ID NO: 137745 - DNA, 4182 bp, Enterobacter cloacae
ttgagccaggaatacaccgaagacaaagaagtcaaactaaccaaactcagcagcgggcgccgactccttgaggcgatgctcatcctttgctccctcttcgccatctggctgatggcggcactactgagctttaacccctcggaccccagctggtcgcaaacggcatggcatgagcctattcataatttaggcggcgcccccggcgcgtggcttgccgataccctctttttcatttttggcgtcatggcctacaccatcccggtgatcatcatcggcggatgctggtttgcctggcggcatcaggaaaacgacgaatacattgattattttgccgtttcccttcgcctcatcggtgcgttagccctgatcctgacctcctgtggtctggcggcgattaacgccgatgatatctggtacttcgcctccggcggggtgatcggcagcctgctgagcaccacgctgcaacccctgctgcacagcagcggcggcaccatcgccctgttgtgtatctgggcggccgggctgacgctgttcaccggctggtcgtgggtcagcattgcggaaaagctgggcggcggcatcctgtccgttctcacctttgccagcaaccgtacccgtcgggatgatacctgggtcgatgaaggcgaatacgaagacgacgaggaagagtacgacgacgaagaggcggccaggccgcaggaatcgcgtcgcgcccgtatcttacgcagcgcgctggcgcggcgtaagcgtctggccgagaagtttaccaaccctatggggcgtaaaaccgacgctgcgcttttctccggcaaacggatggatgacggcgaagaggtggtgcaatacagcgccagcagggcgcctgttgccgccgacgatgtactgttttccggcgccagcgccgcgcgtcccgcagaggatgatgtgctgttctccggcgccagcgccgtgcgcccgggcgatttcgacccttacgatccgttgttgaatggccacagtatcgctgagccggtaagcgcagcggcggcggctactgccgcgccgcaggcgtgggcagaatcaccggtgggccatcacggcgctgcgccagcttatcagccggaagccagctatccgccgcagcaggcctatcagcctgaacccgctccgttccagcaggctgcttatcagccgccagcggggcaaaccgcaccgcaggcgtatcagcctgagccagcgccgtatcaacagccggtttacgatccgcgtgccggtcaacctgcgccgcaggcctatcagcctgagacagcgccgtatcagcagccggcttacgatccgtatgccggtcaacctgcgccgcaggcctatcagcctgagccagcgccgtatcagcagccggcttacgatccgcatgccggtcaacctgcgccgcaggcctatcagccggagccagcgccgtatcagcagccggcttacgatccctatgccggtcagcctgcgcctcagacctatcagcagccggcttacgatccgaatgccggtcagctcgcgccgcagacctaccagcagccggcttacgacccgcatgccggccagcccgcgccgcagccgtatcagccggagccagcggcgtatcagccgcaaagcgcgccagttcccccaccggagccagagcccgaggtcgtgcaggaggaagtgaaacgtccgccgctctattatttcgaggaagtggaagagaagcgggcgcgcgaacgcgagctgttggcctcctggtatcagccaattcctgagccggaaagtccgattgccactaaaccgctgacgccgccgaccactgcgtccaaaccgccagtggagacaaccgtagtctctgcggtagcggctggggtgcatcaggctaccgccgccagcggcggcgcggcggcaacaacctcgtccactgccgcatccgctgcggctacgccattgttcagcccggcgtccagcggcccacgggttcaggtgaaagagggcatcggtccaaaactaccgcggcccaatcgcgtgcgtgttcctacgcgtcgggaactggcctcctacggcatcaagctaccgtcgcagcgggaggcggaacagcgcgcgcggcaggcggagcgcgatccgcattatgatgatgagctgctctcggatgaggaagcggatgctatggagcaggatgaactggctcgccagttcgccgccacccagcagcagcgctacggtcatcgctgggaagacgataacgcgactgatgacgatgaggccgacgccgcggcggaagcggagctggcgcgtcagtttgccgctacccagcagcagcggtacgctaccgagcagccgccgggcgccaacccgttctcgccggcagattatgaattctcgccgatgaaaacgttggtcaatgacggcccgagcgaaccgctgtttacgcccacgccggaagtccagccgcagcagccggcccagcgctatcaacaaccggcggccgctccgcagcagggttatcaacctgcgcagcatcagccgatacaccatcagcctgtgccgccgcagccgcagtcctatccgactgcgtcgcagcccgtacagccgcaacaaccggttgccccgcaggggcatcagcctgccgcccctgcgccgcaggagagcctgatccacccgctgctgatgcgcaatggcgatagtcgaccgctgcaaaagccgaccacgccactgccgtcgctggatctgcttaccccgccgccgagtgaagtcgagccggtggatacctttgctctcgagcagatggcacgcctggtggaagcgcgactcgccgatttccgcattaaagcggatgtggtgaactactcaccggggccggtgatcacccgcttcgaactgaatctggcgcctggcgttaaggccgcacggatctctaacctgtcacgggacctggcgcgatcgctgtcaacggtcgccgtgcgcgtggtggaggtgatcccgggcaaaccgtatgtcgggcttgagctgccgaataaaaaacgccagaccgtctacctgcgtgaagtgctcgacaacgccaagttccgtgataacccatctccgctcaccgtggtgctgggtaaagacatcgctggcgatccggtagtagccgatctggcgaaaatgccgcatctgctggtggccggtaccaccggttccggtaagtctgttggcgtcaacgccatgatcctcagcatgctctacaaggcgcagccggaagatgtgcgtttcattatgatcgacccgaaaatgctcgagctgtcggtctacgaaggaattccgcacctgctgacggaagtagtcaccgacatgaaagacgccgccaatgcgctgcgctggagcgtcaatgagatggagcgccgctacaagctgatgtcggcgctgggcgtgcgtaacctcgcgggctacaacgagaagatcgccgaagccgcgcgcatgggacgtccgatcccggatccgtactggaagcctggcgacagcatggacgccgtacatccggtgctggaaaaactgccgtacatcgtggtgctggtggatgaattcgccgatctgatgatgaccgtcggcaaaaaggtggaagagctgatcgctcgcctggcgcagaaagcgcgcgcggcggggatccacctggtgctggcgacacagcgtccgtcggtagatgttattaccggcctgattaaggccaacatcccgacgcgcatcgcctttaccgtgtcgagtaaaattgactcacgtaccattctcgatcagggcggcgcggaatcgctgctgggtatgggggatatgctttactccgggccgaactctaccacgccggtgcgtgtccacggggcgtttgtgcgcgaccaggaagtccacgccgtggttcaggactggaaagcccgcggtcgcccgcaatatgtggatggcattacctccgacagcgaaagcgaaggcggcggtggcggcttcgacggcggggaagagctggatccgttgttcgatcaggcagtcaactttgtgaccgagaagcgcaaagcgtcgatttccggggttcagcgtcagttccgcatcggctataaccgtgccgcgcgtattatcgaacagatggaagcgcagggtatcgtcagcgagcagggccataacggtaaccgcgaagtgctggcgccgccgccctttgaatga

SEQ ID NO: 137746 - DNA, 612 bp, Enterobacter cloacae
atgaaaaaactcgcaatcacctgtgcattactgtctggtatggtcgtcagccaggtctgggcagatgcggccagcgacttaaaaagccgtcttgataaagtgagcagcttccatgccagcttcacgcaaaaagtcaccgacggcagcggtaacgccgtgcaggacgggcagggagacctgtgggtgaaacgcccgaacctgtttaactggcatatgacccagccggatgagagcgtcctcgtttcggatggtaaaacgctgtggttctataacccgttcgtcgagcaggccacggcgacctggctgaaagacgctaccagcaacacgccgtttatgctgattgcccgcaaccagtccagcgactggcagcaatataatatcaagcaaaatggcgatgattttgtgctgacgccaaaaagcggcagcggcaacctcaagcagttcacgatcaacgtcggtcgggacggcactatccatcagttcagcgccgtcgagcaggatgatcagcgcagcagctatcagctgaaatcgcagcagaacggcgccgtcgacgcagctaagttcacctttacgccgccgaaaggggtgacggtggacgatcaacgtaagtag

SEQ ID NO: 137747 - DNA, 1344 bp, Enterobacter cloacae
gtgagcaatctgtcgctcgatttttccgacaacgcgtttcaacctctggccgctcgcatgcggccagaaaatttagcgcagtatattggccagcagcacctgctggcgccgggtaaacccctgccgcgggccattgaggccgggcacctgcattcgatgatcctctgggggccgccgggtaccggcaagaccactctggcggaagtgattgcccgctacgccagcgccgatgtcgaacggatctcagcggtaacctctggggtgaaagagattcgcgaggctattgagcgcgcgcggcaaaatcgcaacgccggccggcggaccatcctgtttgttgacgaagtgcatcgctttaataaaagccagcaggatgcctttctgccgcatattgaagacggcaccattacttttattggcgcgaccaccgaaaacccctcctttgagcttaactcggcgctgctctcccgcgcccgcgtctacttactgaaatcgctgaccaccgacgatatcgagcaggtgcttgaccaggcgatgaacgataaaacccgcggctacggcggccaggatatcgttttgccggatgagacccgcagggccattgccgagctagtgaacggcgacgcgcggcgagcgctgaataccctggaaatgatggccgatatggccgaaagcgatgactcgggcaagcgggtgctgaaggcggaactgctgaccgagatcgctggcgagcgcagcgcgcgctttgataacaaaggcgaccggttctacgatttgatttctgctctgcataagtcggtgcgcggaagcgcgccggatgcggcactttactggtacgcgcggatcatcaccgccggcggcgatccgctgtacgttgcccgccgctgtctggcgattgcctcggaagatgtcggcaacgccgacccgcgggcgatgcaggtcgctatttcggcgtgggattgctttacccgcgtcgggccggcggaaggcgaacgggcgattgcccaggccatcgtctatctggcctgcgcgccgaagagcaacgcggtgtacaccgccttcaaagcggcgctggccgacgcgcgggatcgtcctgactacgacgttccggtgcatctgcgcaatgcgccgacgaagctgatgaaagagatgggctacggccaggagtatcgttacgctcatgacgaacccaacgcctacgccgccggcgagcagtacttcccgcaggaaatggcgcaaacgcgctattatcacccgacaaaccgggggcttgagggcaaaattggcgaaaagctcgcctggctcgctgaacaggatcaaaatagcccgataaaacgctaccgctaa

SEQ ID NO: 137748 - DNA, 1293 bp, Enterobacter cloacae
atgctcgatcccaatctgctgcgtaccgagccagacgcagtcgcagaaaaactggcacgccggggctttaagctggatgtagataaacttcgcgcgcttgaagagcgtcgtaaagttctgcaggtgcaaacggaaaacctgcaggcggagcgtaactcccgatcgaaatccattggccaggcgaaagcgcgcggggaagacatcgagccattacgcctggaagttaacaagcttggcgaacaactggatgctgcaaaatccgagctggaaacgctgctggcggaaattcgcgatatcgcgctggcgatcccgaatattcctcatgatgatgtgccggttggtcgcgatgaaaacgacaacgttgaagttagccgctggggtacgccgcgtcagttcgattttgaggtgcgcgatcatgtgacgctgggtgaaatgcacggggggctggattttgccgccgccgttaagctcaccggctcgcgcttcgtggtgatgaaagggcagctggcccgtctgcaccgcgccctggcgcagttcatgctggatctgcacaccgaacagcatggctacagcgaaaactatgtcccgtacctggtaaaccaggataccctgtatggcactggccagctgccgaaattcgccggcgacctgttccatacccgtccgctggaagaagaggctgacagcagcaactacgcgctgatcccgacggcggaagtgccgctgaccaacctggtgcgcgatgaaatcatcgacgaagacgatctgccgatcaaaatgaccgcccatacgccgtgcttccgctctgaagccggttcctatggtcgtgacacccgcggtctgatccgtatgcaccagttcgataaagttgaaatggtgcagatcgtccgcccggaagactctatggccgcgctggaagagatgaccggtcacgccgagaaagtgctgcagctgctgggcctgccgtaccgtaaggtcgcgctgtgcaccggcgatatgggcttcagcgcctgcaaaacctatgacctcgaagtatgggttccggcgcaaaacacttatcgtgagatctcctcctgctccaacgtctgggatttccaggcgcgtcgtatgcaggctcgctgccgcagcaagtccgataagaagacccgtctcgttcataccctgaatggttctggcctggcagtaggtcgtaccctggtggcgctgatggaaaactatcagcaggctgatggccgtatcgagatcccggaagtgctgcgcccgtatatgcgcggcctcgaatatatcggctaa

SEQ ID NO: 137749 - DNA, 426 bp, Enterobacter cloacae
atgaagttcattcctgcagtatcagaagccagcatagtaaaaattcctttgttcacagagcgatgccctgcgggttttccgtcaccggcatcagactacactgagtctgaactggatctgaatgagtactgcattcaccggcgccactccacctattttgtcagggcgattggcaactcaatgactgatattggcctctattccggcgatctgttggtcgtggataaagcagaacagccgcggcacggggatattgttatcgcggaaattgagggtgaatttacggtaaaacgcctgcttctgacgccgcggccagccctgcaggcgatgaacccggacttcccttccctgtacccggatccggaaacgctgcaaattttcggcgtggtgacagccttcattcataaaacccggagggcagactga

SEQ ID NO: 137750 - DNA, 858 bp, Enterobacter cloacae; identical to SEQ ID NO: 102269

SEQ ID NO: 137751 - DNA, 285 bp, Enterobacter cloacae; identical to SEQ ID NO: 102270

SEQ ID NO: 137752 - DNA, 600 bp, Enterobacter cloacae
atgcggacacgctttagtctacggttatctccctttacttcatttcctttctcacaggccagaaaacataactggcctgaatattctctctgggaccacggtcccacctgcatcgtcggtcaggttatctgcctgggaccacggtctcacctgcgtcatcggtcaggttatctgcctgggaccacggtcccacctgcgtcgtcggtcaggttatctgtctgggaccacggtcccacctgcgtcatctgtcaggtaatctgtctgggaccacggtcccacctgcgtcatcggtcaggttatctgactgggaccacgggcccacctgcgtcgtcggtcaggttatctgcctgggaccacggtcccacctgcgtcatcggtcagcttatctgtctgggaccacggtctcacctgcgtcatcggtcagcttatctgtctgggaccacggtcccacctgcgtcgtcggtcaggttatctgtctgggaccacggtcccacctgcgtcatctgtcaggtaatctgtctgggaccacggtcccacctgcgtcatctgtcaggtaatctgtctgggaccacggtcccacctgcgtcatctgtcaggtaa

SEQ ID NO: 137753 - DNA, 948 bp, Enterobacter cloacae; identical to SEQ ID NO: 102272

SEQ ID NO: 137754 - DNA, 729 bp, Enterobacter cloacae
atgccttactccatcggcgaatttgcccgactatgcgggataaatgcgaccacgcttcgcgcctggcagcgccgctacggcctgcttaagccgctgcgcaccgatggtggacaccgtctgtacagcgatgacgacgtccagcaggcgctgaagatcctcgactgggtgaaaaaaggggtgccggtcagccaggtgaaacccctgctgtcgcgccccggcgcgcggcgcaccaataactggctgacgctgcaggagaccatgctgcagcggctgaaagagggaaaaatcgagtctctgcgccagctgatctacgacgccgggcgcgaatatccgcgccaggagctggtaaccgaagtgctgcgtccactgcgcagtcaggtctccgccaacgtgccggccatcatgacgctgcgcgaaattctcgacggcatcatcatcgcctatacctcgttttgcctcgaaggcgacaagaaggcgcccggggacaactttctgatcaccggctggcacctgaccgacgcctgcgaaatctggcttgaggcgctcaaacgtaccggccagggccatcgcatcgacgtcctgccggtgcctcccgccgccctggcgccggagatttttccccagcgcaactggctgctggtcaccagcggcaaactttccgccgcccgccagaggcaggtcgaactctggcagcagcaggtcgtctccctcgagataattccgctctaa

SEQ ID NO: 137755 - DNA, 534 bp, Enterobacter cloacae
atgaagctatggcctgttgtcactggcgtcgctatcgcgttaaccctggtggcctgtaaatcgcccacgccgccgaaaggcgttcagccgattagcgggtttgacgccagccgttacctcggaaaatggtatgaggtcgctcgcctggagaatcgcttcgagcgaggcctggagcaggtgaccgccacctacggcgcccgcagcgacggggggatcagcgtcgtcaaccgcggttatgacccggtcaaaaaacgctggaatgagagcgacgggaaagcctatttcaccggcgcccccaccaccgcggcgctgaaggtgtcgttcttcgggccattctacggcggctataacgtgatccgcctggacgacgactaccagtacgcgctggtcagcggccccaaccgtgactatctgtggatcctgtcgcgcacccccaccattccggcggcggtgaagcaggattacctgaataccgcgcgcgagctgggctttgacgtcgatcgcctggtgtggatccgccagacgccgcgctag

SEQ ID NO: 137756 - DNA, 360 bp, Enterobacter cloacae
atgaacgtccctatgaatctgaacctggtatgttattccctgctgctgctcaccgccgtgggcagcgccctgctgccctacccgctggcgatgtggtttttactgagcagccttctgacatggcttatctatggcgccgacaagctggcggcgcgcaaagcctggcgccgggtgccggaaaccacgctgctggtgctgggcctggcgggaggctggccgggggccatcctcggccagcagtgctttcgccataaaacgcaaaagcagcccttccggacgcggtttttcatcagcgtagcgctcaacgtggcggcgctggccgggctgtacgtggtttatacccatctgctcagccgctaa

SEQ ID NO: 137757 - DNA, 3147 bp, Enterobacter cloacae
atgattgaatggattatccgccgctcggtggccaaccgcttcctggtgatgatggcggcgctgtttctcagcatctggggaacctggaccatcatccacaccccggtagacgccctgccggatctctctgacgtacaggtgatcgtcaaaacccgctatccggggcaggcgccgcagatcgtcgaaaaccaggtcacctggccgctgaccaccaccatgctgtcagtccccggcgccaaaacggttcgcggcttctcgcagtttggcgactcctacgtatacgtgatttttgaagacggcaccgatccttactgggcgcgctcgcgggtgctggagtatctcaaccaggtgcagggcaaacttcccgccggggtcagcgccgaaatgggcccggacgccaccggcgtcggctgggtcttcgagtacgcgctggtcgaccgcagcggcaagcacgacctcgccgaactgcgctccctacaggactggttcttaaaatatgagctgaaaaccatccctaacgtctcggaagtggcgtcggtgggcggcgtggtcaaggagtatcagattgtcgtcgacccgatgaagctgacccagtacggcatcagtctcggcgaagtgaaatcggcgctggacgcctctaaccaggaggcgggcggctcttccgtcgaactggcggaagccgaatatatggtgcgcgccagcggctacctgcagacgctcgacgacttcaaaaatatcgtgctgaaaaccggggataacggcgtgccggtctatctcggcgacgtcgcgcgggtgcagattggcccggagatgcgccgcggtatcgccgagcttaacggcgagggcgaagtcgccggcggcgtggtgatcctgcgctccggcaagaacgcccgcgagatgatctcggcggtcaaagagaagctggcgtcgctgcaaagcagcctgccggaaggggtggaagtggtcactacctacgaccgcagccagcttatcgaccgcgccatcgataacctcagctacaagctgctggaagagtttatcgtcgtcgccctggtctgcgccctgttcctgtggcacgtgcgctcggcgctggtggcgattatctccctgccgctcggcctgtgcttcgcctttatcatgatgcatttccaggggctcaacgccaacatcatgtcgctgggcgggatcgccattgcggtgggggcgatggtcgatgccgccatcgtgatgattgagaacgcccataagcggctggaggagtgggagcatcagcacccgggagagaagctcagcaacgacatccgctggaaaatcattaccgaggcctcggtggaggttggcccggcgctgtttatcagcctgctgatcattactctgtcgtttatcccgattttcaccctcgaaggccaggagggcaaactgttcggcccgctggccttcaccaaaacctggtcgatggccggggcggcgctgctggcgatcgtggcgatcccgatcctgatgggcttctggatccgcggcaggatcccggcggagagcagcaatccgctgaacctctttttgatccgcatttatcacccgctgctgctgaaggtcctgcactggccgaagaccaccctgctgatcgcgctcctgtcgatcctgacggttgtctggccgcttaaccgggtcggcggcgagtttctaccgcagatcaacgagggcgacctgctgtatatgccgtccacgctgccggggatctccgctgcgcaggcggcggatatgctgcagaaaaccgataagctgatcatgacggtgccggaagtggcgcgggtgttcggcaaaaccggcaaagccgaaaccgccaccgactcggcgccgctggagatggtggagaccaccattcagctcaagccgcaggatcaatggcgaccggggatgaccatggagaagatcgtcgaggagctggataaaaccgtgcgcctgccgggactggcgaacctgtgggtgccgccgatccgcaaccgcatcgacatgctctccaccggcatcaagagcccgattggcattaaggtttccggcactaacctggccgatatcgacgccatcgccgaacaaattgaaggggtggcgcgcagcgtgccgggcgtcacttcggcattagccgagcggttgggcggcgggcgctacctcaacattgatattcatcgtgagaaggcggcccgctacgggatgaccgtcggcgatgtgcagctgtttgtatcgtccgccatcggcggggcgatggttggcgaaacggtagagggcgtcgagcgctatccgatcaacatccgctacccgcagagctatcgcgacagcccggagaccctgcgccagctgccgatcctcacgccgctgaagcaacagattgtcctcggcgacgtggctgaggtgaaagtggtcaccggaccatccatgctgaagaccgagaacgcccgcccgaccagttggatctacatcgatgcccgcgaccgcgacatggtgtcggtagtgcacgatctgcagcaggccatcggcaaggaggtgaagctgaagccgggcatcagtgtgtcctactccgggcagtttgagctgctggagcgcgccaatcagaagctgaagctgatggtgccgatgacgctgatgattatcttcgtgctgctgtatctggcgttccgccgcgtcggcgaagcactgctgattatcaccagcgtgccgttcgcccttgtgggcgggatctggttcctctactggatggggttccatctgtcggtggccaccggtaccggctttatcgccctcgccggggtggcggcggagtttggcgtggtgatgctgatgtacctgcgccacgccatcgaggcggagccatcgctggagaatccgcagactttcagcgtcgataagctcgacgaggcgctgtaccagggggcggtgctgcgcgtgcggccgaaggcgatgaccgtggcggtgattatcgccggcctgttgccgattttgtggggcaccggcgccgggtcggaggtgatgagccgtatcgccgcgccgatgattggcgggatgatcaccgccccgctgctgtcgctgtttatcattccggcggcgtataagctgatgtggctgtcccggcatcggggcaagcgtagctaa

SEQ ID NO: 137758 - DNA, 1263 bp, Enterobacter cloacae
atggcatccctgacactgaaaaatacggcgttgatcctcggcagcatgctgattagcggcgcgcttaccgcggcgctgtacgcccgatgggctccgacccactctgccgctccggcggccgagcagcagcgtaaagtgctgttctggtacgatccgatgtacccgaacacccgcttcgataaaccgggtaaatcgccgtttatggatatggatctggtgccgaaatacgccgataaggagcatgccgccgccggtgcgccgggggtgcgtatcgacccgacgcagacccagaatctcggcgtaaaaaccgccgcggtcagccgcgggccgctgcgctacgcccagaccttcccggccaacatcagctataacgagtatcagtacgtgattatgcaggcgcgggcggcgggctttatcaataaagtctatccgctgaccgtcggcgacaaagtcaagcaaggcacgccgttactcgagctgaccatcccggactgggtggaagcgcagagcgaatatctgctattgcaggagaccgggggcaccgccacgcaggtcgaggggatcctcgagcgtctacgtctcgccggaatgccggatgacgatatccgccgcctgaaaaccacacgtaaaatccagacccgctttaccctcaaagcaccgatcgatggcgttattaccgccttcgatctgcgtgccggaatgaacatcgccaaagataatgtggtggcgaaaattcagggcatggatccggtgtgggtcagcgtggcggttccggaatccatcgcctggctgattaaagacgcctcgcaattcgccattcaggttcccgcctggccgggaaaaaccttccgcatcagcaaatggacgatcctccccagcgtcgatagcgccacccgcaccctgcagctgcgcctgcaggtcaacaacccggatgaagcgctgaagccgggaatgaacgcctatctgcagctgaccagtgaaagcgccccaatgctgctgatcccctccaaagcgctgatcgacagcggcagcgagcagcgagtgattaccgtggataacgaggggcgcttcgtgccgaaacgcgtgcaggtattccatgaatccaatggcgttacggccattcgcagcgggctgcaggagggggagaaagtcgtcgccagcggcctgttcctgatcgactcggaggccaatatcgccggcgcgctggagcgcatgcgcgcgcaggcccctgatgccgcggcctctgccgcccacgcgcactaa

SEQ ID NO: 137759 - DNA, 345 bp, Enterobacter cloacae
atgaattcactatctaaaatcgccctgttcaccctgctctctggcgcggtgttcgccgcccaggccgccgccccgcacgcaggtatggcgatgcacgagcagcacgccgccgcgcaggcgcaaagcatcagcggcaaaggcgtcattaaagctattgatatggataacaaaaaaatcactatcgcccacgaggccatcccggcggtgaactggccgccgatgaccatgcgcttcaccatcaccccgcagacgcagctcaacaatgtgaaggatggcgacagcgtggatttcaccttcgttcagcagggcaacctgtcgctgctgcaggatatccgcgcccaataa

SEQ ID NO: 137760 - DNA, 1494 bp, Enterobacter cloacae
atgaaatatcaggaaaatgacagctttgtcattttcccgtcacgccctgaacagagcccgctacgtaaagtagccgccatggataaatcgtcgaaaccgtctgccgccatgcgttcaatacagctacttaccctcagcgtgatatttgccttaaccggctgtctgtcgctcgctccggactaccagcgccccgcagcgccggtgccgcagcagttctctctcagccagaacaagctggttactgcaacagcgggctaccaggagaccggctggcgcacctttttcgtcgacccgcaggtgaaaagcctgattagcaccgcgctggccaacaaccgcgatctgcggatggcgacgctgaaagtgcaggaagcccgcgcccagtaccgggttaccgacgccgaccgctacccgcagcttaacggtgacggcagcaccacctatggcggcaagcttaaaggcgacaccaccaccagcagcgattatgccgccggcctgaatctcagctatgacctcgacttctttggccggctgaaaaaccttagcgaggccgaccgacagaacttcttcgccagcgaagaggcgcggcgcgcagtgcatatcctgttgattgctaacgtttcacaaagctacttcaaccagcggttggcggcagcgcagctgcaggtggccaacgataccttacagaactatcagcagtcttacgccttcgttgaaaaacagctgctgaccgggagcaccaccgtgctggcgctggagcaggcgcgcggcatgatcgagagcatccgcgccgatatcgccaaacggcaaggccagctggcgcaggccaataacgccctgcagctactgctcggcagctatcaacatctgccggacgatagcgccagcagcgcggtagacctgcaaggcgtaaccctgccgccatcgctctcctcagcgatcctgctgcagcggccggatattctggaagccgaacacagcctgcaagcggccaacgccaatatcggcgccgcgcgggcggccttcttcccgtcgatcaccctgaccagctcgctctccggcagcagcagcgaactctccagcctgtttaacgccggcggtgcgatgtggaacttcattcccaaaatcgaactgccgattttcaacgccgggcgtaatcaggccagcctcgatctggcggagatccgccagcagcagcaggtggtcaactatgaacaaaaaatccagtccgcctttaaagaggtggccgacgcgctggccctgcgccagagcctggccgatcaaattgccgcgcaggagcgctatctcgcctcgctgaatatcaccctgcagcgcgccactgcgctctatcaccacggcgcggtcagctatatcgaagtcctgagcgcccagcgcgatattttcaccacccgacaaaccctgctggaactcaactattcccgtcaggcaaatgaaatcaccctgttcaccgctctcggcggcggctggatggaataa

SEQ ID NO: 137761 - DNA, 1434 bp, Enterobacter cloacae
atggccgctaagcgccccttttccctggccacccggctgaccttctttattagcctcgccaccgtcattgccttcttcgccttcacctggatcatgatccattcggtgaaggcccactttgaagagcgcgacgttcacgatctcaggcagctcagcaccaccctggagacggtcctcgaccacgctgactacccgcaggcgcggcgtctggagatcgtgaagaatatcattgcgggctacgccaacgtcttcatctgcctggacgatggccagggcaatattctcttccagtcgcccaacgggccggatctcagccatatgctgagtacgccggggctggcgatgcagctccgcgacgggaatgtgatttcatggaccgacccgcagccgcgggcaatggcgcacgataatcatccaatggaaacccgcgcctggcggctgatcatgctgccgctgggcaagcaggcggacggtaaaccggcgtaccacctgctgatggccttatccatcgattttcacctgcactatattaatgagctgaaagcgaagctgatctccgcggcgtcgataatcagcctgctgatcatcgccatcgtgctgtttgtggtctaccaggggcataagccgatccgccagatcagccgccagatccagaatattacctcgcgggatctcgatgtgcgccttgacccgcaggcggtgcctgtcgagctggagcggctggcgctgtcgtttaaccatatgctggagcgcatagaggatgtctttacccgccagtccaacttctccgccgatatcgcccatgaaatccgcacgccgattaccaacctggtgacgcaaaccgaaatcgccttaagccagagccgcagccagcaggagctggaagaggtgttgtattccaatctcgaagagttctcgcggatgtcgcggatggtcagcgatatgctgttcctcgctcaggcggataataaccagctgatccctgagcaacaggcgctggatctggccgaggaagtgcataaggtgtttgagtttttcgaggcgtgggcggaagagaaggcggtggcgctgcgttttgtcggtagcccctgccgggtgacgggcgatccgctgatgctgcggcgagcgatcagcaacctgctgtcgaatgcgatccgctacacgcctgccgggcaggcggtgaccatccagttgagcgagagcgcggagacggtacgcctggtggtggagaaccccggtacgccgattgccgccgagcatctgccgcgcctgtttgaccgtttctatcgcgtcgacccctcgcgccagcgcaaaggggagggcagcggcatcggcctggcgattgtgaaatcgattgtcggagcccaccacggcagcgtggcggcgcagtccgatctgcgctcgacgcggtttattgtggtgttgccgaaatag

SEQ ID NO: 137762 - DNA, 267 bp, Enterobacter cloacae
atgcccgcacttaaaaagcagcgtatagatttgagattaaccgatgatgataagagcatcatcgaggaagctgcggcaatttcgaatcagacgattacccagtttgtggttgccagtgcctcagaacgtgctgcggaagtgattgagcagcaccgcagaatggtcctcaatgagcaatcatggagcctggtgatggaggcgattacccaaccgccagccccgaatgatcgactgaaacgtgcagcgaagcgtctacaaaccaggtaa

SEQ ID NO: 137763 - DNA, 534 bp, Enterobacter cloacae
atggagcagcaactgacgattgagatgattgccgatgcgttcagctacgatatcactggatttgattgcggcgaggaagcgctgaatacgtttttaaaagagcacctcaagcggcagcacgatggacaaatcttaaggggttatgcgctggtctccggggataccgttcccaggttgctgggttattacaccttatcggggagttgtttcgagcgaggcatgttgccgtctaaaactcagcaaaagaaaatcccgtatcaaaatgcgccaagcgtaaccctcgggcggctggccattgataaatctgttcaggggcagggctggggagagatgttggttgcccatgcgatgcgagtggtgtggggagcgtctaaagccgttggtatctacggattgtttgttgaagcccttaatgagaaggctaaagcattctatcttcgtctggggtttatacagctcgtgggtgaaaatagtaacttactgttttatccgaccaaatcgattgaacagctctttactgacgatgagtcataa

SEQ ID NO: 137764 - DNA, 1122 bp, Enterobacter cloacae
atggcttatcaactcaacattaactggcccgagtttttagaaaaatactggcagaaacagccggtggtattaaaaaacgcgtttccggacttcgtcgacccgattactccggacgagctggccggattagccatggagccggaagtcgacagccggctggtcagcctgaaaaacggcaaatggcaggccagcaatggtccttttgaacatttcgacgggctgggcgaaaccggttggtccctgctggcccaggcggtaaaccactggcatatgcctgccgccgagctggtgcgtccgttccgcgtactgccggactggcgcctggacgacctgatgatctccttctccgtccccggcggcggtgtcggcccgcatatcgatcagtatgacgtctttattattcagggcatgggcagccgccgctggcgcgtgggtgacaagctgccgatgcgtcagttctgtccgcatccggcactgctgcacgtcgatccgttcccaccgatcattgatgaagatctgcagccgggcgacatcctctatattccaccgggattcccgcacgacggcataacccacgaaaccgccctgaactactccgtcggcttccgcgggccaaacggccgcgacctgatcagcagcttcgccgactatgtgctggagaacgatctcggcgacgagcactacagcgatccggacctcacctgccgcgagcatccgggtcgggttgaagagtatgaactcgaacgtctgcgcaccatgatgatcgatatgattcgccagccggaagacttcaagcagtggttcggcagtttcgtcaccaccccgcgtcacgagctggatattgcgccggcagaaccaccgtatgaagaagaggaagtgctcgatgcgctgctgggtggtgaaaagctttcccgcctgagcggcctgcgcgttctgcatatcggcgacagcttcttcgtgcatagcgaacaactcgacaccaccgatgccgaagcgctggatgcgctgtgtcgctatacctcattaggccaggaagagctcggcagcggcctgcagaatccggcgttcgtgagcgaactgacgcggctgattaatcagggctactggtacttcgaagagtaa

SEQ ID NO: 137765 - DNA, 513 bp, Enterobacter cloacae
atgcgcgatgcgctggagcgccttgatacgctttatcccgggctaatcctgaagttcggcggccacgcgatggcggcgggcttatcgctggaggaggcgcgttttgaagagtttcaacagcgcttcggcgagctggtgaccgaatggctggatcctgcgctgttgcagggcgaggtggtttccgatggcccgctggcggcggcggagatgagcatggaagtggcgcagatgctgcgcgacgccgggccgtgggggcagatgttcccggaacgaagtatcaacgttgaaggcgataccgtccagcagcggctggtgggcgagcgtcacctgaaggtgatggtcgaaccggttgacggcgggccgctgctggacggtatcgccttcaacgttgatacttccatctggccggataacggcgtgcgtgaagtccagttagcctacaagctcgacatcaacgagttccgcggcaaccgtagcctgcagctgatcatcgatcacctctggccaaattga

SEQ ID NO: 137766 - DNA, 1071 bp, Enterobacter cloacae
gtgaaacaacagatacaactacgccgccgcgaggcggttgacggcgtcgaactccccgccgatctgccgccgctgctgcagcggctatatgccagccgcggggtgcgcagcgcgcaggagctggagcgcagcgtcaaaggcatgctcccctggacgcagctcaccggcgttgaaaaagcggtcgagatgctgcatgacgcgttccagaaagggttgcacatcgtggtggtcggtgattttgacgccgacggcgccaccagcaccgcgctcagcgtgttggccctgcgcgcgctgggttacggcaacgtctcctatctggtgccgaaccgctttgaagacggctacggtttaagcccggaagtggtcgatcaggcccatgctcgcggcgcgcagatgatcatgaccgtcgacaacgggatctcgtcccatgccggcgtcgatcatgcccatgcgctggggatcccggtgctggtgaccgatcaccatctgccgggcgagacgctgccggcggcggaagctatcgttaatcccaacctgcgcgattgcgacttcccgtcaaaatcactggccggggtgggggtggcgttttatctgatgctggcgctgcgcacttttctgcgcgataaaggctggttcgacgctcgcggcatccccgcgccgaaccttgccgagctgctggatctggtggcgcttggcaccgtcgcggacgtcgtgccgctggatgctaacaaccgtatcctcacctggcaggggttaagccgcattcgcgccggcaaatgtcggcccggtattaaggcgctgctggaaattgccaaccgcgatccgcaaaagctggcggccagcgacctcggtttcgccctcgggccgcgcctgaacgcggcgggacggctggacgacatgtcggtcggcgtcgcgctgctgctgtgcgacaacatcggcgaagcgcgggtgctggccaacgagctcgatgcgcttaatcagacgcgcaaagagattgagcaggggatgcaggcggaagcgctaacgctctgtcagcagctggagcgcagcgccgataccctgcccgggtag

SEQ ID NO: 137767 - DNA, 714 bp, Enterobacter cloacae
atgaaaaaaggtttattgatgttcaccctgctggcggcctccctttcaggagcggcgcacgccgatagcgcggcaattaaacagtcgctggcgaagctgggtgtgcagagcaccgatattcaaccatcgccggtttccgggatgagcacggtgctgaccgacagcggcgtgctgtacgtgaccgacgacggcaaacatatcatccaggggccgatgtacgacgtgagcggcgcgcagccagtcaacgtcaccaaccagctgctgctgggtaagctgaacgcgctgagcaatgagatgattgtctacaaagcgccgaaggagcagcacgtcatcaccgtcttcaccgatattacctgcggctactgtcataaactgcacgagcagatgagcgactacaacgcgctggggatcaccgtgcgctatctggctttcccgcgccagggtctgcaaagccaggcggagcaggacatgaaggccatctggtgcgcgaaagatcgcaacaaagcgctggatgacgccatgaatggtaaaggcgtgcagccggcgagctgcaacgtagatatcgccaaacattacaccctcggcgtgcagatgggcgtcaacggcaccccggcgatggtcctcagtaacggcatggtgctgccgggctatcaggggccgaaagagctgaaggcgttcctcgatgagcacaaaaaacagacaagcggtaactga

SEQ ID NO: 137768 - DNA, 897 bp, Enterobacter cloacae
gtgaaacaggatctggcactaatcgaacagtttctcgatgccctttggctggagcgcaacctggcggagaatacgctcagcgcctaccgtcgcgatttgacgatgttagttgagtggttgcaccatcgcggcctgtcgctggcaagcgttggcagcgacgatctgcaggcgctgctggctgagcggcagtccggcggctacaaagccaccagcaccgcgcgcctgctgagcgccgtgcgccgttttttccagcatctgtaccgggaaaaaattcgcccggacgatcccagcgcgctgctggcctcgccgaagctaccgcagcggctgccaaaagatctcagtgaggcgcaggttgagcgcctgctgcaggcgccgctggtggagcagccgctggaattgcgcgataaagcgatgctggaggtgctgtatgccaccggcctgcgcgtctcggagctggtggggctgacgatgagcgacatcagcctgcggcagggcgtgctgcgggtggtgggaaaaggcaacaaagagcggctggtgccgctgggggaagaggcggtactgtgggtggaaaattacctcgagtatggtcgcccctggctgctgaacggcgtggcgtcggatgtcttatttcccagccagcgcgcccagcagatgacgcgccagaccttctggcatcggattaaacactatgccgtactggcggggatcgacagcgaaaagctttccccgcacgtgttacgccatgcgttcgccacgcatttgctcaatcatggcgccgatctgcgcgtggtgcagatgctgttaggacacagcgatctctccaccacgcagatatacacccacgtggcgaccgagcgtctgcgacaacttcatcaacagcaccacccgcgggcgtga

SEQ ID NO: 137769 - DNA, 522 bp, Enterobacter cloacae
atgaatataggtctgttttacggctccagtacctgctacaccgaaatggctgcggagaaaatccgcgatatcatcggccccgagctggtgacgctgcacaatctgaaagatgactcccccgcgctgatgagccagtacgacgtactgatccttggcatcccgacctgggatttcggcgaaattcaggaagactgggaagcggtctgggatcagctggacaccctgaacctcgagggaaagatcgtcgcgctgtacggcatgggcgatcagctgggctacggcgaatggttccttgacgcgctcggcatgctgcatgacaagctggcgaccaagggcgtgaagtttgtcggctactggccaaccgaaggctatgagttcaccagcccgaaaccggtgatcgccgatggccaactgttcgttggcctggcgctggatgaaaccaaccagtacgacctgagcgacgagcgcatccagagctggtgcgagcagatcctcggcgaaatggccgaacacttttcctga

SEQ ID NO: 137770 - DNA, 411 bp, Enterobacter cloacae
gtggtcctgtggcaatctgatctccgtatctcctggcgcgcgcagtggttttccctgctgcttcacggcgtggtggcggccctggtgctgttggttccctggccgctgagctataccccgatctggctgctgctgctgtcgctggtggtcttcgactgcgtgcgcagccagcggcggatccatgcccgtcgcggggagataaaactgctcaccgattcccgtcttcgctggcaaaacgccgaatgggaaatcctcgggacgccgtgggttatcaatagcggtatgctgctgcgtttgcgccatgtcgatacccggcgcggacagcatctttggctggcggcggacagcatggacgccggagagtggcgcgatctgcgccggctggtgctgcaaaaaccggcgcaggagtaa

SEQ ID NO: 137771 - DNA, 267 bp, Enterobacter cloacae
atggacattaacaataaagcacgtatccactgggcatgccgccgcgggatgcgcgaactcgacatctccatcatgccgttctttgagtatgagtacgataccctcagcgacgctgacaaacagctgttcattcgcctgctggaaaatgacgatccggatctgttcaactggctgatgaaccacggcaaaccggccgatgcggagctgcagcggatggtaaccttaattcagacacggaatcgggaacgtggtcctgtggcaatctga

SEQ ID NO: 137772 - DNA, 984 bp, Enterobacter cloacae
atggcttttacaccttttcctccgcgtcagccttcctcttccgctcgtctgccgttaacgctgatgaccctggatgactgggcgctggcgacaattagcgggccggacagcgaaaaatatctgcaggggcagattaccgccgatgtgagtcatctcaccgatgcccagcatctgcttgccgcccactgtgatgccaaaggcaagatgtggagcaacctgcgcgtattccgtcgcgagggcggcttcgcgtggattgagcgccgcagcctgcgcgacgcgcagctgaccgagctgaaaaaatatgccgtcttctccaaagtcaccattgccgccaacgacgatctggttctgctgggagtagccggcttccaggcgcgcgccgcgctggtgccgctgttcgccgccttgcccgacgctgccaccccggtggtcagcgaaggcgccaccagcctgctgtggtttgaacacccgggcgagcgcttcctgctggtgaccgatgtcgacaccgccaaccgcgtcaccgacgcgttgcgcggcgaagcgcagtttaacaacagccaacagtggctggcgctgaatattgaagccggcctgccggttatcgacagcgctaacagcgggcagttcattccacaggccaccaacctgcaggcgctgggcggcatcagcttcaaaaaaggctgctacaccggccaggaaatggtcgcgagggcgaaattccgcggcgccaataagcgcgcgctgtggacgctgtcagggaccgccagccgggtgccggaagccggggaagacctggagctgaagatgggcgacaactggcgccgcaccggtacggtgctggcagccgtacagctggatgacggaagcctgatggtccaggtagtgatgaataacgacatggaaccggacagcgtgttccgtgtacgcgacgatgccggcagcctgagcatcaaaccattgccgtattcgctggaagaaaattaa

SEQ ID NO: 137773 - DNA, 660 bp, Enterobacter cloacae
atggttcgcaaaccattaatcactcagggatattctctggcagaggaagttgccaacagcatcagccacgggatcgggctggtgttcggtatcgtcggccttgtgttgctgctggtgcaggcggcggatacaaacgccagcgcgacggcgatcgccagctacagcctgtacggcggcagcatgattatgctgttcctcgcttccacgctctatcacgcgatcccgcatcagcgggcgaaacagtggctgaagaaattcgaccactgcgccatctatttgctgattgccgggacctacacgccgtttttgctggtggggttgaattcaccgctggcgaaggggctgatgatcgtcatctggagcctggcgctgctggggatcctgtttaagctgaccatcgcgcaccgctttaaaattttgtcgctggtgacctatctgaccatggggtggctgtcgcttatcgtggtctatcagctggcagtgaagctggcggtgggcggggtaacgctgctggcggttggcggggtggtgtactcgctgggggtcatcttctacgtctgcaaacgtattccttataaccacgctatctggcacggcttcgtgctcggcggcagcgtgtgtcacttcctggcgatttatctttacatcggccagtcctga

SEQ ID NO: 137774 - DNA, 312 bp, Enterobacter cloacae
atgcaggccaatgacattaccttttttcagcgttttcaggacgacatcctcgccgggcgcaaaaccatcaccattcgcgatgcagcggagtcgcactttaagcccggcgatgtgctgcgcgttgggcgctatgaagatgacggctatttttgcaccattgccgtgaccgcgacctcgacggtgacgctcgatacgctgaccgaacagcatgcgcaacaggagaatatgactctcgggcagctgcggcaggtcatcagcgacatctatcctggcgagagccagttttatgtcattgaattcaaagcgctttaa

SEQ ID NO: 137775 - DNA, 729 bp, Enterobacter cloacae
atgttctcccacgccgctgtcgccagtctcaataatcttgagatgatggtctaccactacgtcattaaaaatcgtgacaaagtgatgtacatgaccatccgcgaactggccgaggccgccggggtctccacgaccaccgtgttacgcttctgccgcaaactgcagtgcgagggctactctgaatttcgcgtgcgctttaaattatatctcgagcagaatgagcctcaacaggcaaatatcggcgccagcgaaataatgagcttttttaaaagcgtcaataatgacgagttcgatgaattactcgagcaggccgtcgatattattctcgcctccgaacgtattatttttgtcggcgccggcacctccggcgcgctggcgaaatatggcgcacgcttcttctccaacgtcggtaaattcagcaaccatattgacgacccctattttccggtaaccaacgatatggcccgcaacgcgctggcgatcgtgctttccgtctctggcgagacggaagagatcctgcgctttgccagccagttcagtctgcatcattgcaaggtaatgtcgattaccagccatgagcattcgcggctggccaaactggctgatttcaatctctcctggcacgtgccgcagacgcgcattggcggggtctacgatattacaacgcaaattccagtgatctatattctcgaatccctcggacgtaaattagcgcgcaaaatcagctaa

SEQ ID NO: 137776 - DNA, 360 bp, Enterobacter cloacae
atgattaagcgacaacgcaaagccattctttttgtcctcctggcctgtctggtggtgctaacctgcaccgctcaacggatggccgggatgcacgcgctggtcatgaacctcaccgccgacagccagtcgctacagcaaaaccaggatcaggccgaggcgccggtcacgccgtgcgagctcagcgccaagtcgctgatggccgttccgccgatgctgtttgaaggggcgctgttggctatcaccctgctgctggcggtgctggcggcgatcccgccgcgtatcgaacgccagtggcctccccgcgttatctcctcaccccgattgcgggtgcatctgcgattatgcgtcttccgtgagtga

SEQ ID NO: 137777 - DNA, 2010 bp, Enterobacter cloacae
atgtatatggtattcaggcgactactggtctgcctgctttggctatggctgcccgtcagccaggccgccgacagcggctggctgcgcgccgccgacaatcaacacgccagcgtgcgcctgcgggcgcaaaccgagggcaatggcgacactcgcctgcttttagacgtagcgctggaaaagggctggaaaacctactggcgctcgccaggggaaggcggcatcgcgccggctatcgcctggcacacgccgctggaggtgaactggcgctggccgacgccgcagcgcttcgacgtcgcgggcatttccactcagggctatcacggcgacgtcagctttccgatgacgctgcgcgggaagataccgccgacgcttagcggcgtcctgacgctctctacctgcagcaatgtctgtattctcactgactatcccttttcgctggatatgacgactccggcgggggagcgatttaattatgattttacccgcgcgatgggcacactgccgctgcgcgatggcctgacttcgcaactgaccgccagctacgtcagcggcaaactgacggtgaccgcccgccgcgatgccggctggcagcagccagcgctgtttatcgacagcatggaggatgtcgatttcggtaagccgagctttaccagccgcggcgatacgttgaccgccaccgtaccggtcaccgatagctggggcgaagcggcgccggacctgagcggcaaaacgctgtcgctggtgctggcggatagcggtcaggcgcaggaaagccatatcgccatcgccgccggcagcgccgcgccggggctggcgttaggctgggtgctgctgatggcgctggccggcgggctaatcctcaacgtcatgccgtgcgtgctgccggtgctggcgatgaaactcggctcgctggtgcaaaccgaaggtcgcgaacgcggcgcggtgcggcggcagttcctcgcctcggtgtgcgggatcgtcgtctcgttcctggcgctggcgctgatgatgaccgcgctacgcctggggaatcaggcgctcggctggggcatccagttccagaacccgtggtttatcggcgcgatggcgctggtgatggtgctgttcagcgccagtttattggggctgttcgaaatccgcctctcctccagcgccagcactttcctcgccacccgcggcggcaacggcttaatgggccatttctggcagggcgccttcgccaccctgctggcgacgccctgtaccgcgccgttcctcggtaccgccgtgtcggtggcgctggtggcgcccctgccgctgctgtggggcattttcttcgccatggggatcggcatgagcctgccgtggctgctgatcgttgcctggccgggtctggcgcaacgtctaccgcgcccgggccgctggatgaatcatctgcgggtggtgctggggctaatgatgcttggttcagcgctatggctggtcagcctgctgacgatccacatcggccgtacgccggtgcttaccctgctggtgattctggccatcgccctgctagtggccaccgcctggcgctaccgctggcggacggcgctgcgcgcgggcgccctggccatcgtggtggcgggcgccgtcgcctttgtcgcccaacaggacggccagggcccgcgccgcgaccgggttaactggcagccgctcagcgagcaggctatcgccagcgccctggcggagcataagcgggtatttattgatgtcaccgccgactggtgcgtgacctgtaaagccaataaatacaacgtgctgctgcgcgacgacgtccagcaggcgctgttagcgccagacgtagtcgccctgcgcggcgactggagccgcccctccgctgacattagccagtttttaaccgcacgcggcagcgccgcggtgccgtttaaccagatttacggaccggaattgccgcagggacagattctgcctgcgctgttagaccgcgaacaccttctcgccaccctgtccgccgctaaaggaaaataa

SEQ ID NO: 137778 - DNA, 612 bp, Enterobacter cloacae
atgagaactatcaccgcattattactgctgtgcgtatcggccttcagcttcgccgccccggcggaagaaccacaatcgaacggtaatgaccagttagcccagctgctgtttaacgatccgaatagcccgcgcaccggcgcgaaagagccaaaactcacgatcgtctcgtttaccgattacaactgcccttactgcaaacagtttgatccgctgctggaaaaaatcgtccacgataatccggacatccagctcatcgttaagctgctgccgtttaaagggcagagttcggtgaatgccgctaaaaccgcgctctccacctggcgtcagcagcccgataaattctgggcgctgcatcagcggctgatggcgaaaaaaggctatcacgatgacgccagtatcgccgccgcgcagaagaaaaccgccaccgatagtgtaaatatcgatgacaagaccatggattcgctgaagatgaacctgattttgtcgcaggtgctgaatattcagggcaccccggcgaccataatcggcgatcagatggtggccggcgcgatccctgctgaagacctggaggggctggtgaaagagcagctggcgaaagcccgtggccagtaa

SEQ ID NO: 137779 - DNA, 489 bp, Enterobacter cloacae
atggatctggccgccgcccatatgtttcagcgcgccgcagtagacctcggagcccaccacctgctgcacctcttttccggtatacagttcgatctcttcatccggggtagcggctttaaactccttctcccactggcgcagcgttttaagctgtcgctggttataggcgagatagccgtagccgggcacgaaatcggcgtcgatgttgtatttgcggatgcgttcgcgaatgatgcccgcgccgaggttggcgattttaaacagcgtctccagcccctctttgccgacgtgcttttttaccgcttcgatatcgtggccgataccggccatcacctggccgccgttgcgcccggtgccgccgtagccgagatggcgcgcctccagcaccaccacgttggtgatcccctgttccgccagctcaagggcggtgttaatgccagagaagccgccgccgataattaccacatcggcttcaatatcttcccgtag

SEQ ID NO: 137780 - DNA, 1485 bp, Enterobacter cloacae
atgagcgagataaccttactggcggaagtgaccgccttcttacgccagccgcacgggcagtttattgccggtcaacgtgaggcgggccgcggcgcgccgttcgcggtgatcaacccggcgaccgggcgggcgattgccgaggtcaccgcggcggatagtgaccaggcggatcgcgctatggagagcgcccgccaggcgtttagtcagtggcgcgagatgccgacgctggcgcgcggcgcgctgctgctgaagctggcggacacgctggcagagcatcgcgaagcgctggcgcagctggaaagtctctgttccggcaaaactatcacgctggcgcggatgctcgagctggaccagtcggtggcgttcctgcgctacttcgccggctgggcggggaaagtcaccggtgaaacgctggatgtctcgctgccatcgatggccggggagaaatataccgcctttacccgccgccagccgcttggggtggtggttggcatcgtgccgtggaacttctccatcatgattgccatctggaagctggcggcggccctggtctgcggctgcaccatcgtcctcaagccgagcgaatatacgccgctgacgctgctgcgcgtggcggagctggcaaaagcggtgggtatcccggatggggtgattaacgtggtcaacggcgccggcggcgagattgcccagcggctgattacgcatccggcctgcgccaaggtgagcttcaccggctcggtggccaccggtgaaaaagtccagcagtcggccagtgcgtcaggtaaacgggtgacccttgagctgggggggaaaaacgccgcgctgttcctcgatgacctgacgccggaggcgatggtcaacggcattattgaagctggctacctgaaccaggggcagatttgcgccgctgcggaacgtttttatctgccgcagggaaaactggatgcggtactggcgctgctgaaagacaagctcagcgcttttgcgccggggtcgccgctggatgaacggacgctgatggggccgctggccaaccgccagcagtatgacaaagttttgcggctcattcagaccgcccgcgacgagggcgataccatcgtctgcggcggcgaagcgctgccgggggagggctatttcctgcagccgaccgcggtcaaagtgcgcagcgaagagagcaccctgatgcgcgaggagaccttcggcccggtgtgcagttttatcggctatcgcagtgaagaagaggcgctggcgcggatgaatgcctcaccgtatggcctggcggccagcgtctggtcggataatattcgtcaggcgctacgctactcggaggcgattgaggccggcatcgtatgggtcaatatgcataccttcctcgacccggcggtaccgttcggcggcatgaagggctcgggcatcgggcgcgaattcggcagcgcgtttatcgatgattatacggagctgaagtcggtgatggtgcgctattaa

SEQ ID NO: 137781 - DNA, 1083 bp, Enterobacter cloacae
atgaaatacacacttccggcgttgacgctggccatcagcgcggcgttaagcggctgcgcgacgcctcattcctctgccgtttcccaaccggttgtcgactcgccagtccctaacgtggcgcaaccgctgcagcgccagctagcggaagggctgtacgagatggcgttaagcccgcagggtgatgcgctgtacgtcgccagcgctgaaggctttaaaaatgtacagggcggggcggtttacacactggatccgcacaccctcaataccatcggcctgacgcataccgatctgaaaaacttcgctttacagctctctgcggagggtaaaacgctgtatgtcagcaattcgctggacggcggcatcagcgctatcgacaccgccaccggcaaggtaaaaaaccgcctgctgttcagcgagcgcaatgaaaaaggtcgcccttatggggcccgtcagctgctgttgctgaataatactctctacgttggcgcggtagccgacccggcgcaaatctgggtggttgacgccactaccctgaagctgaaaacgcggattaaaaataccggtaaatggatgaccggcctgcactactccgcgcaaaccggtcgcgtgtacgccgctaacggcagcggtgaaattctggtgatcaacccgcgtaaccaacgcattgaacagcgctggaagccgctgggcgacaagccggcgctgctgcttaatatggccgaagatagcgacaccggccgtctgttcgtgaccgacaactcgaaagcgaaaaccactctggtgctggatatccacagcggcaagctgcttaaacagctcgacgtcggcgattcgctggcggtgcagttcaataagaaacgccacgaaatttatatttcacagcgtgaatccggcaaggtcatcagccttgaccccagccgctacacgctgaagaaaagctgggcgctgccggccaatcccaacagcttgctgctttccgccgatggtcagacgctgtttgtcaccgtcaaacagcccttcaataaagaccactccactaaaggcccggacagcgtcgtacgtatcgacctgaacgcgcaataa

SEQ ID NO: 137782 - DNA, 2199 bp, Enterobacter cloacae
atgcacaccacgcactattcatccttcccgctgcgtaaaacgctgctggccttagccatcggcgccgccagtcaaacggcgatggccgcggacgctgccgccgcgaagcagcctggcgaagagaccctcatcgtcgaggctaacgaaaccagcgattttaaatccggcggcgacctggtggttccggcattcctcgatggccagatcgcccacggcggccgtctggggatgcttggcgaacaaaaagcgatggacgtcccgtttaacgtcatcggctatacctcgaagctgattcaggatcagcaggcgaaaactatcgccgatgtcgtcagtaacgacgctggcgtgcaggccgtacagggctacggcaacttcgccgagacctatcgaatccgcgggtttaagctcgatggcgatgacatgacgatgggcggcctggcgggcgtggtgccgcgtcaggtgatggacacccagatgctggagcgcgttgaaattttcaaaggggctaacagcctgcttaacggcgcggccagcagcggcgtcggcgggatgattaacctcgagccgaagcgggcggaagatctgccgaccgcacgcgttggcgtcgactatacctctgattctcaggtgggcggcaccctcgacctggggcgccgtttcggcgacaacaaccagttcggcgcccgggtcaacctggtgcaccgcgagggtgaaggcgctatcgataatgataaacgccgtaccacgctggcttcgctggggcttgattaccgcggcgaccgtttccgctcctcgctcgatttcggctatcagaagaaaacgttccacggcggtacgatgggcgtcaatatcagcggcgtggatttcgttccggcgctgccggacaacagcaaaaactacagccagaagtggggctatagcgatattgaaagcgagttcggcatggcgaaggcagaatatgacctgaccgatagctggacggtatacagcgccctcggcggccagcattcgcatgaaattggtacctacagcgcgccgaagcttctgaataaaaacggcgatgcgacggtgggccgcctggatactaaccgcattatcgacgcgatcagcggcatgggcggggtacgcggcgatttcaataccggcgcgatttcgcataaggtgaacctcggctatgcggcgcaggtgcataccgatgcgaccgcctggcggatgtcggccaggaacccgaccactaatatctatgacaaccatgatgtggcgatgccggataacgcctattttggcggcaactaccacgatccgctggtcacctcgcgcagccgtacgcagggctggctgttgagtgataccctcggcttctttaacgataaagtgctgtttaccgccgctgctcgccatcagaaagtggttgtgcgcaactacagcaacgccaccgggctggaagatacctcttcgcgttatacccaaagccgctggatgccgacgtttggcctggtgtacaagccgtgggagcagctgtcgctgtatgctaaccataccgaagcgctgcagccgggctctgtggcgccgacgacggcggccaatgccgggcagagtaccgggatcgcgcactcgaagcaggacgaagtgggggtcaagatcgactacggtacgatcggaggatcgctggcgctgtttgaaatcaaaaaaccgaacgccatttccgataccgctggcaattacggcctcgacggcgagcagcgtaaccgcggcgtagagatgaacgtctttggcgaaccgatgctgggactgcgtcttaacgccagtaccgtctggctggatgccaaacagactaaaaccgctgaaggcgcaaccgacggtaaagatgccatcggggtggctaacttctacgcggtactcggcgccgaatatgacatcaagccggtggaaggcctgaccgccaccgcgcgcgtcaatcatagcggctcgcagtatgccgatgcggccaataccaagaagctggatagctacaccaccctggatttaggcctgcgctattgtatgcgtctgaacgccgaccagaacgaaatgatctggcgcgtcggggtgaccaacgtgaccaacgagaagtactggtctggcattgacgataccggtacttacctgttcgaaggcgatccgcgtaccgtccgcgtctcaatgagctacgacttctga

SEQ ID NO: 137783 - DNA, 1377 bp, Enterobacter cloacae
gtgaaagacgcgtcaacgtcgtcggagaccgtcacggaaagtggcccgacgcttcatcgcggtttacagaaccgacacattcaacttatcgcccttggcggcgcgattggcaccggcctgtttctcggcattggtcccgcgattcaaatggccggcccggcggtcttactgggctacgccgtggccgggattgtcgcttttctgatcatgcgccagctgggcgaaatggtggtggaagagccagtatccggttcctttgcccactttgcctataagtactgggggccgttcgccggctttctctccggctggaactactgggtgatgttcgtgctggtagggatggcggagctgaccgccgccgggatctatatgcagtactggcttcccgacgtgcccacctgggtttgggcggcggctttcttcatcattattaacgccgtcaacctggtcaacgtacgcttgtatggcgaagcggagttctggttcgcgctgatcaaggtgctggcgattatcggcatgattgccttcggcctgtggatgctgttcggcggccacggcggcagcaaagccgggttcgacaatctgtggaaacacggcggcttcctcgccaccggctggcacggccttattctgtcgctggcggtgatcatgttctccttcggcgggctggagcttatcggcatcaccgccgccgaagcgcaaaacccggaaaagagcattccaaaagcggtcaatcaggtggtctatcgtatcctgctgttctatatcggttcgctggtggtgctgctggcgctctacccgtgggtggagatcaaatccgacagcagcccgtttgtgatgattttccataatcttgacagcaacgtggtggcctccgcgctgaacttcgtcattctggtggcctcgctgtcggtgtataacagcggcgtgtactccaacagccggatgctgttcggcctgtcggtgcagggtaatgcgccgaaatttctcgcccgcgtcagcaagcgcggcgtgccggtgaactccctgctgctctccgggattatcacttcgctggtggtggtgctgaactacctgctgccgcatgaagcgctggggctgctgatggccctggtggtggcgacgttgctgctgaactggatcatgatctgtatggcgcacctgaagttccgcgccgcccagcgccgcaaagggcgcgaatcgaagttcaaagcgctgctggcgcccgccagcaactacttctgcattgctttccttgggctgatcctggcgctgatgtgcactatcgacggcatgcgtctgtcggcgatcctgctgccggtgtggatcctgttcctgtttatcgccttcaaactgctgcgccgcccggcgtaa

SEQ ID NO: 137784 - DNA, 1242 bp, Enterobacter cloacae
atggtcacaacaacagaaggtcgggaaagtgtccgcgtgagccaccgttttctggtgccgcggctgtcgttaatgatgtttatgcagttttttatctggggcagctggtcggtgaccctggggctggtgatgacccgctatgagatgtcattgctgatcggcgatgcgttctccgccgggccgatcgcctccatcttgtctccctttgtgctggggatgctggtggatcgctttttcgcctcgcagaaggtgatggcggtgatgcacctggccggggcggcgatcctgtggtttgtcccgcaggcgctggtggcgcagaacggcgccctgctgattggcctgctgttcggctatacgctgtgctatatgccgaccctggcgctgaccaacaatatcgccttccacagcctggccaatgtcgataaaaccttcccggtggtccgcgtgttcggcaccatcggctggattatcgccgggatctgcatcggggtgaccggtatctctgataccaccggcatcttcacgctggcggcgctctgttcggtcgcgctggcgctctacagcctgacgctgccgcacaccccggcgccggccaaaggcatgccggttcagtttcgcgacctgctgtgcgcggacgccttcgcgctgctgaaaacccgccatttcctgattttctccctctgcgccaccttaatttccgtgccgttaggcacctattacgcctataccgcgtcgtatctggcggatgccggcgtcaaagatgtcagcaccgcgatgtcgttcggtcagatgtcagagatcgtctttatgctggtgatcccgttgctgttccgtcgcctcggggtgaaatacatgctgctcatcggcatggcggcgtggttcgtccgctacgcctttttcgctctcggagtcagcgaggaggggcgcttcctgctctatctgggcattttgctgcacggcgtgtgctatgactttttctttgtcgttggctttatctacaccgaccgcgtggcgggcgagaaggtaaaaggccaggcgcagagcatgattgtgatgttcacctacgggatcggcatgctgctgggctcgcagatctccggcgcgctgtataaccatctggtggccggccagagcgtgcctcaggcctgggtgaccttctggtggatcccggcggtggccgccgcggttatcgcgctgattttccttttctctttccagtacaacgagaaagagccgcactaa

SEQ ID NO: 137785 - DNA, 1110 bp, Enterobacter cloacae
  misc_feature (416)..(425): n is a, c, g, or t
atgaaaacgattaagggaccgggcatttttctggcgcagtttatcgggacgcaggcgccgttcaacaccctggcggggatagcgcagtgggccgccggcctggggtacaaggcattgcagatcccctgcaaccacccggcgatttttgatgtcgagcgggcggcggcgagccagacctactgcgacgaggtcagcggcatcctggcggagcatgggctggtgatcagcgagctgtccactcaccttgaaggacagctggtggcggtgcatccaacgtatgacgcggcgttcgacgcctttgccccggcggcgctgcatggcgatccgcaggcgcgccagcgctgggcggtggagaaagtgcgccaggcggcggtagcctccggccgcctggcgcactttctccaccgcccagcgcnnnnnnnnnngcgctgggcggtggagaaagtgcgccaggcggcggtagcctccggccgcctggggctgcaggcgcacgcgaccttttccggggcgctggcatggccctttttttatccgtggccgccgcataatcagccgcttctggatgaggcctttgccgagctggcccggcgctggcggccgctgctggacctcttcgacgagcagggggtcgatgtctgctatgagatccaccccggcgaagacctgcacgatggcgtgacctttgagcgttttcttgcgctggtggataaccatccgcgctgcaatatgctctatgacccgagccacctgcatctgcagcagatggactacctgacctatatcgatatctatcatgcgcgtattaaagcgtttcacgtcaaggacgccgaatttcgccgcaacgggcgcaatggcgtctacggtggataccagccctggcagcagcgggccgggcgtttccgctctcccggcgacgggcagatcgacttcaaaggggtgttcagtaagctgaccgaatatgattttgccggctgggcggtgctggagtgggagtgctgcctgaaggatagtgagaccggcgcgcgcgagggcagcgagtttatccgccgccatatcattcccgttgccggacgggccttcgatgactttgccgccggcgggagggagtaa

SEQ ID NO: 137786 - DNA, 1152 bp, Enterobacter cloacae
atgattcaggttgcgattatcggggcagggtttattggcccggcgcatctggaggcgctgcggcggctgggagatgtcgaggtggtggcgttgtgcgacagccgccttgaggcggcgcagcgcaaggcgcgagcgctgaacattgcccatgcctacgacagcgtggaggcgctgctggcccatccggggctgcaggtggtgcataactgtacgcccaaccatctacatgcccagattaaccggcagatcctcgccgccgggctgcacgtcttctccgaaaaaccgctgtgtatgacggcggaggaggcgcgggagctggtggcgcttgccgcccgggccggcgtggtgcatggcgtcagcttcgtctaccgccagttcgctatggtccagcaggcggcggcgatgatccgccatggcgaggtcggcagaatcttcgcggcccacggcagctatttacaggactggatgctgctggagaccgactacaactggcgggtcgattcggcgcagggcggcgcgtcgcggacggtggccgacatcggctcccactggtgcgataccgtgcagtttatgaccggtcggcggattgtcgaggtgatggcggatctgtctatcgtctggccaacgcgtaaagcgccggtcaatggcaaagcgaccttcagcgccgttcacgaggcgcaggcatatgaaacgcggcctgtcgataccgaggactttggctcggtgctgttgcgttttgacgatggcagcaaaggcagctttatggtctctcaggtgagcgccgggcggaaaaaccgtctggcggtggagattaacggcagcctctgttctctggcctgggatcaggaagtgccccagcggctgtggatcggccaccgcgagcagccggatcgcctgctcagcgatgacccgagcctgctgcggccggaaatcgctgacagcgcccattaccccggcggccatattgagggctggccggacgcctttaagaatatgatggggcatttttatcaggcggtgcgcgccgggaagatgccggcggccggggtccggcgcttcgccgctttcgacgacggcgccgatgtgatgtacatcatcgaggcgatcgtcaaaagccatcaggaacagcgctgggtcagcgtcgaacgctga

SEQ ID NO: 137787 - DNA, 417 bp, Enterobacter cloacae
atgaggctctccaccgcggttctcgccctcagctgtgccctggcaacgatcaccggctgcacctcgtcaaaatcgtcaccggaacgccatgcctacgccttcgtcgcccaccggtccgattttgtcggcggcaacttcaccgtcaaccgccaggaaaattaccgtttaaacctgccgacctttacggcgatgtatgcccgcggacagcaggataaagccgctggcatgagcgaaagcgatgcccgccgcaccgcggaagccatcaaacagcaggcggcgcagggcacccgcaccgagcacgccttcaccggcaatgccagcgacaaatgggataatgcgatggaaaataaagatgccgtcctgttcggcaacgagctctccggtgcctatctcgacggctatcttggggtgaaataa

SEQ ID NO: 137788 - DNA, 870 bp, Enterobacter cloacae
ttggggaatcagcttaacgatgccagttcacgccagcgcggctggatcggttcgctgctggccgggctggcggtgggcctgctgtgggcgccgtgcgccgggccggtattgggagcgatacttagcctgggctttgtgcatccggggctggcgactaccggcggcttgctgctggcctacggcagcggcggggcgctgatgttattcctgctggggtggtgcggggcggcgttgatcgccagattgcgtcgcggacaggcgttcggcgagcggctgcgccggttggcagggggggcaatgctggcctcggtggcgctgatcgctagcggcggcgatcgctatctgcaaagcgctggtggactgagccaggcgctggagcagcggctggccgcccgtctgccgcagccggagcaaaagaccagcctccagccgatcgccgcgccgcagcccagcaacgcgatgccctctctggcggggggcagcgcatggatcaacagcccggcgttaactccggagcgtctgaagggcaaagtggtgctggtggatttctggacccgggagtgtatcaactgtcagcataccctgccttacgtgcgcgactgggcgaacaaataccgcgcggcgggcctggtggtgattggcgttcataccccggaatatccctgggagcgttcgttgcccctgctgcgccaggcggtgaaggactggcggataacctacccggtggtggcggataatgagtacgccatctggaacgccttcggcaatcagtactggccggcgcattacattttcgacgctcgcggacagctgcgttataccgcattcggcgaaggggattattcccgccaggagcaggtgatccagtag

SEQ ID NO: 137789 - DNA, 882 bp, Enterobacter cloacae
atggagaaacgcttaccagggctggatctcgacgccctgcgcagctttgtgaccggcatggagtgcggcagtttcgcccaggcagcgctgcgcctgtcgcgttccacctccgcggtcagcgcccagcttaaaaagctggagagccagtgcggtgcggcgctggtgaccaaacaggggcggcatctggtgctcaccgcggaaggcgaaaagctgatgagctacgccagacgcctgctggcgctcaatgatgaaaccctgcgcgcgctgcagggtgagcggctcaccggcgagatccaccttggtatgcaggaagattttggcgaatcgctgatgccggggatcctcgggcaatttaaacggcatcatccgcaggtgcggatagtcgccagggtggatcgcaatggtccgctgcgccaggcgctggcggaagaggcgctggatctggcgctgctgtggcaaaccgaagatcagggttccgggctgggcctctgcccgctggcgtggattgcgcatcctgacctggatattcgcgctctgctggtctccggcgagccgctgccgctggtgatgttcgacagcccgtgcctgatgcgctcccgcgccattgcctgtctcgatgccgcggggatcccctggcaggtggtgttcgtcagccacagcctgagcggcatctgggcggcggtgcaggccgggctgggcctgacgatacgcacccgcatcggcatgccaggcaacctgcgccctgcaggaggactgctgccagcgccaggaagtctggccgtcagcctgcgacaaaccccgcgtgaggaatcgcattccgccgccgtggcgctgctcggcgaactgatgaccgaggccctgcagggatggctcgacaggtga

SEQ ID NO: 137790 - DNA, 1011 bp, Enterobacter cloacae
atgggcctgatgctggcgcgcgacgccttcttcgcccgtctggggcactccatccagcaggatgggctgccgggggatatccgcaagtacaaagtcttgtgctcggaaaacgcccacttctcggtgcagaagaacatggcgctgatgggcctcggctaccgctcggtaacgctggtgaaaaccgacgaattcgcgcggatggacgtgtccgacctgcaggcgaagattgcgcaagcgcaggctaacggcgagcagatcatggcgatcgtcgccaccgccggcaccaccgacgcaggcgctatcgacccgctgcgcgacatcgccggtatcgctgcggaacatcagatctggctgcacgttgacgcagcctggggcggcgccctgctgctgtctgagcagtatcgcgactaccttgacggtctggagctggtggattccgttaccctggacttccataagcagttcttccagaccatcagctgcggcgcattcctgctgaaggacgcgcgccattacgagctgatgcgttatcaggcggcctatctgaactccgagttcgatgaagaacacggcgtaccgaacctggtgtctaagtcgctgcagaccacccgccgcttcgatgcgctgaagctgtggatgggtctggaagcgctgggccagaaacagtatgcggcgatcatcgatcacggcgtcacgatggcgaaaaacgtggcggagtacgtgaagtcgcagccgacgctggagctggtgatgcagccgcagctggcgagcgtgctgttccgttcccgtccggcgcagatggccgggagcgacgcggcggctatcgcgctgctcaaccagcgcgtcggcgacgccctgctggcctccggccgcgctaacgtcggcgtaaccgagcacaacggcgttacctgcctgaagctgactctgctgaacccggtggtgacgctggatgacgtgaaggttctgctgaacctggtggagcgcaccgctcaggagctgctggcgcaataa

SEQ ID NO: 137791 - DNA, 411 bp, Enterobacter cloacae
  misc_feature (345)..(354): n is a, c, g, or t
atgtccacattgaatccgattcttgctggttcagcgcagagcgttgaagcctatcagcaggttatcgagcagaccagccaggccgttgtgcagtggctgaagcaacctgagatgtatcaggggaaaagcgttgacgagctgcgtgagcgtatctccctagaatttaacgaacagggtttgggtaaccaggcggcgattgatcgtgcgatcgagtacttcctgaaagacagcctgtcggtgcatcacccgcagtgcgtggcgcacctgcactgcccgagcctggtgattagccaggcggcggaagtgctgattaacgccaccaaccagagcatggactcctgggannnnnnnnnngttttccggcgggcgacgccggcgtcttcaccagcggcggcacccagagcaacctga

SEQ ID NO: 137792 - DNA, 1383 bp, Enterobacter cloacae
atgacggataaagtccgtattgatactttacgtgccgatttattagacgcaaacaacgaaacctttttggcccgtcaggccgaattcgaatcgaatgtcaggagttacccgcgtaagctgccgctggctatcactaaagccgaaggcgtgtggctgacggatgcggataacaaacagtacctggactgcctcgcgggcgccggtactctcgctctgggccacaaccaccctgatgtattgcagagcatccaaagtgtcattaccagcggcttgccgttacatactctcgatcttaccaccccgttaaaagatcgcttctccgaatacctgctctcttgcctgccgggcgaagggaaagaatattgcctgcagttcaccggcccgtccggcgctgacgccgtggaagccgcgctgaagctggcgaaaaaatacaccggtcgtaccgcggtgatcagcttctccggcggctatcacgggatgacccacggcgcgctgtccgtcaccggcaacctgtcgccgaaagcggcggttaacggcatgatgccggaagtccagttcatgccttacccgcacctgtatcgttgcccgctgggcatcggcggcgaagccggcgtgaaagccctgacctactacttcgaaaacctgatcaacgacgtggagagcggcgtccgtaaaccggcggcggtgatccttgaagccgtgcagggcgaaggcggtgtgaacccggcgccggtcgagtggctgcagcgcatccgcaaagtgaccgaagagcacggcattctgctgatcgtcgatgaagtgcaggccggctttgcccgtaccggtaaattcttcgccttcgagcacgccggtattcagccggacatcatcgtgatgtcgaaagcggttggcggcgggctgccgctggcggtgctgggcattaaaaagcagttcgacgcctgggaaccgggtcaccacaccggcaccttccgcggcaaccagctggcgatggccaccggcctgaccaccctgcgtcatctgcgcgacaacaagatcgccgacaaagtcgccgcccagggcgagtggctgaaaggtaaactggccgagctgcagaaacgctacccggtgattggccacgttcgcggtctcggtctgatgatcggtatcgaaatcgtcaagccgaacgaagcgcaggatcatatgggctgctacccggctgacggcgaactctctgccctgctgcagaagaaatgcttcgaagcgggcctgatcctcgagcgtggcggtcgtcacggctgcgtgctgcgcctgctgccgtccctgctgatcagcgacgcggagctggacgtgttcctcgacaaatttgaacaggccctgctggccgccggcgtaaaaccggtctga

SEQ ID NO: 137793 - DNA, 936 bp, Enterobacter cloacae
atgaaaaagtcgctattcgccggggcaaccttgaccgccctgttcagcggccacgcgctggccaatgaaccgctgacgctggtgctggactggtacattaatcccgaccatgcgccgattatggtggccgagcagatcggcgcctttaaggcccaggggctggacgtcaggattgtccccccttccgatcccgcgctgcctccgcgcatggtggccgcccgtcaagcggatctggccatcacctaccagccgcaggtgcacttctttgctgacgaagggttaccgctggtgcgtgtagggacactgattaattcgccgctgaatacggttatcgccctggataagcagatcaaaaccccggcagatctgcaaggcaagaaggtgggctactcggtcagcggcattgagcaggccaccctggcgaccatggcgcaacatgcagggatcgatccggccagcatcaaactggtgaacgtcaatttccagctgaccagcgccctgctggccggccaggtggacgcggttatcggcggctatcgtaatatagaagcgcaggagctgaagctgcagggcaaaacgccggtggtgatgaacgtcgaagattacggcgtgccggcctatgacgagctggtgattgtcgcccatcgcgacgcaattcatgaggcgaagatccgtaaattcctcaccgccctgcaggcgggagtgggctatctgcgcgcccatccgcagaagagctgggaggcgttcgccgccgcccacccggagcttaggaccgaactcaaccaccaggcgtggttgcaaaccgtgcccctgttcgccaccgatccggcagcgctggataaagcgcgctacgagacttacgaacagtttttatataacaataagttggtgaaaaaagttacacctttaacaaattatgcggtgcaactgcattga

SEQ ID NO: 137794 - DNA, 741 bp, Enterobacter cloacae
atgactggacgtctctggcgcggcggcatggtattcggcgggctgatgctcctctggggtctggccagccgcagcggcattccccattttcttttaccgtccccgctggcggtcgccgaggcgctatgggttaatcgcgcctatctcggctggcatacgcttatcacgctcagtgagatcctgagcggcctggcgctgggcgtaacgctcggcgtcaccctggcgctgggcatgatcctctccccccgtctgcagcgctggctgatgccgctggtgctcaccagtcaggcgatcccggtctttgccctcgccccgctgctggtgctgtggctgggctttggcatgagcgccaaagtggcgatggcggtgctggtgattttctttccggtgacttccgccttctttgatggcttgcggcgggtcaaccaggagtatctcgatctggcgcgcagcatgaatgcctccttcggcgctcaactgcgacatgtccgcctgatggccgccctgccggcgctgggctctggcctgcgcatggcggctgcggtggcgcccattggcgcgatcatcggcgaatgggtcggctccgccgaggggctgggctacgtcatgctcaacgccaatgcgcgactgcaaaccgatatctgcttcgccgcgctgtttattttagtactactgaccctcctgctgtggctggcggtagataccctgctacaccggctgatcgactggtcgccggaataa

SEQ ID NO: 137795 - DNA, 729 bp, Enterobacter cloacae
gtgacggcgccgggtatcgaggtccgtggcctgagcctgcatgtcggcgaccgtcggctgttcgacaacctgtcgtttacggtccccggcgggcagtgggtgtcgctgctcggcgccagcggcgccggcaaaaccagcctgctgcgggtgatggccggtctggcgcccgccacccgcggagaagtggtcgccagcgatgggcaaccgattcagggccgtctggcgtggatggggcagaaagatctgctctacccctggctgagcgttcgggacaacgtcgccctcggcgcgcggctgcgcggtgaaaaagtcgatcgtgaccgggtcgccgctctgcttgaacaggttgagctttcatcctgcgccgacgcccgcccggcgactctctccggcggcatgcgtcagcgcgccgcgctggcgcgcacgctgtatgaggatcgccctatcgtgctgatggatgagcctttctcggcgctggataccctcacccgtacgcggattcagaccctggcggccaccctgctggccggtcgcacggtggtgcttatcacccacgatccgcaggaggcctgccggttgagccaccgcctgctggtcctctcggcggccgacggcgacattgatgatagccatcacctcgccggcacacctccgcgcgcgccggacgcgcccgatctcctgatcggccaggccgccctgctgcagcagctgatgagggcccaaccatga

SEQ ID NO: 137796 - DNA, 696 bp, Enterobacter cloacae
gtgatcgttcccgcttttagccaaggtctttacggccgtttacgccagctggccgccgctgactggcagcgctatgtggcgcatcctttcgtccagcaacttgccgatgggacgctggcggaaaacgcctttcgtcgctatctgacccaggattatctgtttctgattcactttgcccgcagctacgcgctgctggtgagtaaactgcgcgcgctgccggagatgcgggccgcggccgcctcaatgaatgccatcctcaacgaactgccgctgcacgtcggctactgtgcccagtgggggattagcgaaccggagatggccgcccaacctgaagcccccgaaaccctcaactatacacgctacgtgctggatattggccactcgggtgacgcgctggatctgctggtcgccctgatgccctgcgtcgcgggctacgccgaaatcggtctcggcctgctgcagcatcccgccacccgactggacgataacccctacgcctcatggatccgcaactatggcgatgaaggctatctgcagggcgtcagcgccgcgctggcgctgttggaaacggtgtggcagcagcgcgggagcgaggcgcgaatcactgagctgagcgagattttcaccaccgccacccgccttgaggcgcagttctggcagatgggcctcaacgccgcggcggagacccgggcgtga

SEQ ID NO: 137797 - DNA, 1107 bp, Enterobacter cloacae
atgcgtaaagccttctggctattattcgcgctggcgctgccggcgctggcgcaggatccggtgctacccgccgtgacggcgatccatacggcgcccaccctcggtgagctgccgccgccggagtcgctgcgaccgtgctgcgcttttggttacgacctgcacgtgcgcgcggcgggcattccgatcccgatgtaccagatcggtaatgtgttgactctgggtacgctgggtaagcaccattacaacgacagcgcgttcggtgcggtgaaaaatctgctggggctcagcgaggagcagaacgggcttatctatacccgccgcggcgggtttattgatatcgcccatgtgcgcgatacggcggacaacaccttttatctgttcaatcgtattgcgccgacgctgggtcaggcggggcggatcttctacagtgaagaactgggcgtgcgccgcgtgcagctgaatgcctttacgccgccggcgggcgtcaggcagcgctatcagctggcggcctggctcgccgggcatctggccttcgaaatcgcccagtggcatgagagcgcccagtggtatggcttccagtcggtccccgggttttccgaagagatttccgctttttcgcccgaggatctctactccaatttactgggcgcgaggctggcgattaatgtcatcctcagcggccacggcggttcgctggaggattataaccaggccatggatgcggcgctgaaacaagtgctgacccggctgctggtggcgacgcgcggagagacggaagcgatgtttcagcagatcgacggcgactggtggaacagtcaccggcgggtgccggataagtttctggtactgaagcgtaactacgatctacaggaaaaccggctgccgacgccggtcccattcgaaaccatgccgccgtatcgcctgaccatgccggagcaggtcgggggattccgcttacgcgacctcggcgaactgcagatctatccagggcacgatatgcaggcattgccggttcccgcgcaatactatggcgccgaagcgttccaggggctggcggaccgcgcccatgaggcggataaaacccagctggcgcggacagaaaaatag

SEQ ID NO: 137798 - DNA, 1173 bp, Enterobacter cloacae
atgattaacggtttaaaacctctcgaccgcaccctgcgctggggcatggtcggcggcggcggcagcagccagatcggctatattcaccgctctgcagcgctgcgcgataacaccttcacgctgctggccggcgcctttgatattgatgccgagcgcggacgccagttcggccaacagctgggggtggatcccgaccgctgttacgccgactatcaaagcctgttccgcagcgaggctgcccggcctgacggcattcaggcggtgtcagttgccacgccaaataacacccactatgccatctgccgggccgcgctggaggccgggctgcacgtggtgtgcgaaaagccgctgtgcttcagcagcgaggaagctgacgagctggtggcgctcagccagcggcggcgcaagattatcggggtgacctacggctatgccggccaccagctgatcccgcaggcccggcagatgattgccgacgggctgctgggcgatatccgtatcgttaatatgcagtttgcccacggttttcacgcccagccggtggaacaggaaaatgccagtacccgctggcgggtcgatccccgcttcgtcggccccagctatgtgctgggcgacctggccacccatccgctgtttctggtcgaaaccatggccccgcagctgaagatcacccggctgatgtgcgccagacaaagcttcgtcaaaagccgcgcgccgctggaagataacgcccatgtactgatggagtatgacaacggggccatcggctcactgtggagctccgccgtcaactgcggttcgatgcacgggcaaaaggtgcgaatcatcggtgaaaaagccagtctcgaatggtgggatgaacagcccaaccagctacgctacggaatccagggcgaacccgtgcgcatcctcgagcgcggtatggactatctcgatccgctggcgcgtcaggatgatcgcatcggcggcggtcatcccgagggactgtttgaggcatggtcgaatctctatcgccgcttcgccatcgccatggatgccgccgaccgtcgcgacgaggcgctgctggccgacttctggtacccggacgcccgcgccggggcgttcggcgtccgctgggtggaaaactgcgtgcgttctgccgacaacggtgcctgctgggtcgacttccgctaa

SEQ ID NO: 137799 - DNA, 924 bp, Enterobacter cloacae
atgatacatcctatcgctaacgccccctgcagctggggcgtcgatgacccgaaaaaccctaacctccctgcctgggctaccgtactgaaggaggcggcgcaggctggctatcgcagcattgagctcggcccctggggttatctccccaccgatccggccagcctgcgcgcggcgctggagcagcatcagctgtcgctggtcgccggcacgatctttgacgatctggtgagcgaggcccatttccccaccctggtagcgctgacccatcaaatctgccgcaatctgtcgcaggtagccgctgccgaaccgatcccgggccgccctttccagccgccctatctggtgattatcgacttcggcaaccccgaacgggcgcgctttgccgggcgcggcgcgctggctccgcgcctcaatgacaaagactggcagcgcatgatggagcacattatcgcccttagcaccctcgcctggcaggagtacggtgtgcgggcggttatccatccgcacgccgggggcagcattgaattcgcggatgagatcgagcggctggccaacgatatcccgcacgacgtcgccgggttgtgtctggacaccggacatctctattacgcagggatggatccgctcgactggctggatcgctattaccaccgcctggactatctgcacttcaaggatgtcgacccgcaggtttatcagcgtgctatccatgaaggtatcgacttcttcactgcctgcgccgaaggggtgatgtgcccgctcggtagcggcgccattgactatccggctatcaaagactttcttgcccgccgggggtatcagggctggataaccattgaacaagagcgcgacccgcgccatgccgcaggcagcctgcaggcggtcacggaaagtctgcgctatctgcgcgacgtcggattctga

SEQ ID NO: 137800 - DNA, 1080 bp, Enterobacter cloacae
atgatgaagcgcaatattctggcagtggtgatccctgccctgctggtagccggtgcagccaacgctgcagaaatctataacaaaaacggcaacaaactggacttctatggaaaaatggtcggcgagcacgtctggaccaccaatggcgacaccagcagcgacgataccacctatgcccgtatcggcctgaaaggcgaaactcagatcaacgatcagctgatcggctacggccagtgggaatacaacatggacgcgtccaatgttgaaggttcccagaccacaaaaacccgtctggcgttcgcgggcctgaaagcgggcgaatacggttcattcgactatggccgtaactacggcgcgatctacgacgtcgaagcggcaaccgatatgctggttgaatggggcggtgacggctggaactacaccgacaactacatgaccggtcgtaccaacggcgtcgcaacctaccgtaactccgacttcttcggtctggttgacggtctgagcttcgcgctgcagtaccagggtaaaaacgaccacgaccgtgcgattcgcaagcagaatggcgacggcttcagcaccgcagccacctacgcgttcgacaacggtatcgcactgtctgcaggctactccagctctaaccgtagcgtcgatcagaaagctgacggcaatggcgacaaagccgaagcctgggcgacctctgcaaaatatgacgctaacaacatctatgcggccgtcatgtactcccagacttacaacatgactccggaagaagataaccacttcgccggtaaaactcagaactttgaagcagttgtacagtatcagtttgacttcggcctgcgtccgtccatcggctacgtacagaccaaaggcaaggacctgcagtcgcgtgctggcttctccggcggcgatgcggatctggttaaatacatcgaagtgggtacctggtactactttaacaagaacatgaacgtctacgctgcgtataaattcaaccagctggacgacaacgattacaccaaagcggctggtgtcgccactgacgaccaggcggccgtgggtatcgtttaccagttctaa

SEQ ID NO: 137801 - DNA, 1191 bp, Enterobacter cloacae
atgtttgagaacattaccgccgccccagccgacccgattttaggtctggccgatctgtttcgtgccgatgaccgccctgaaaaaattaacctcggaattggtgtttacaaggatgaaaccggtaaaacgcccgttctgaccagcgtcaaaaaagcagagcagtatctgctggaaaatgaaacgactaaaaactatctgggcatcgatggtattcctgaatttggtcgctgcacccaggagctgctgttcggtaaaggcaatgcgattatcgctgataaacgcgcccgcaccgcgcagacaccgggcggtaccggtgcgctgcgtgtcgccgcagacttcctcgccaaaaacaccgacgtgaaacgtgtgtgggtaagtaatccgagctggccgaaccataaaagcgtattcacctctgccgggctggaagtgcgcgaatacgcatactacgacgcggctaaccacgcgctggactttgatggtctgctggccagcctgaacgaagcccaggcgggcgacgtggtactgttccacggctgctgccacaacccgaccggtatcgatccgacgctcgatcagtggcagcagctggcgcagctgtcggtggaaaaaggctggctaccgctgttcgatttcgcctaccagggcttcgcccgcggtctggaagaagatgctgaagggctacgcgcttttgctgctctacataaagagctgctggtcgccagctcctactcgaaaaactttggcctgtacaacgagcgcgtcggcgcctgcactctggtcgccgcggatcaggagactgtagaccgcgccttcagtcagatgaagtcggtgatccgcgccaactactccaacccgcctgcgcacggcgcctccgtggtcgccaccattctgagcaacgatgcgctacgggcaatctgggagcaggaactgaccgatatgcgccagcgcatccagcgtatgcgtctgctgttcgtcaataccctgcaggagaaaggcgcgagccgcgacttcagctttatcagccagcagaacggcatgttctcattcagcggcctgactaaagagcaggtgctgcgcctgcgtgaagagttcgccatctatgcggtcgcttccggacgtatcaacgtggccgggatgacgcctgacaatatggcgccgctgtgcgaagccatcgtcgccgtactgtaa

SEQ ID NO: 137802 - DNA, 525 bp, Enterobacter cloacae
  misc_feature (466)..(475): n is a, c, g, or t
atgaactatcgtattattccggttaccgcgttcgcgcagaactgttctcttatctggtgcgggcaaacccggctggcggcgctggtcgatcctggcggcgatgctgaacgtatcaaagcggtggtggcggaggctggcgtcacgctgatgcagatcctgctgacgcatggccacctcgatcacgttggcgccgcggctgaactggcgcagcattatggcgtaccggttattggtccggaaaaagaggatgagttctggctggaaggattaccggcgcaaagccggatgttcggcctggaggattgccaaccgctgcgtccggatcgctggcttaatgaaggcgatgtggtcaatgtggggaatgtggcgctgcaggtgctgcactgcccgggccatacgccgggccatgtggtcttttttgatgacgcctcccgactgctgatctccggagacgtgattttcaaannnnnnnnnnaggcggggtgggacgcagcgattttccgcgcggcgaccatgggcagctga

SEQ ID NO: 137803 - DNA, 636 bp, Enterobacter cloacae
gtggcgagcgatagcgagctgatcctggcatcgcgcaaagcggaaaaagtatataacgattcattgactgtagacctgattatcatggacaaatttgacgctaatcgccgcagattgctggcgttgggtggcgctgcgctgggtgctgccgccattctccctgcgccggcatttgccaccctctcgaccccccgtccgcgtattttgacgctgaataacctgcataccggtgaatcgctcagggcggagtttttcgatggcagaggctatattcaggatgaattagcaagacttaaccattttttccgtgactatcgcgcgaataaaattaagtccatcgatccaaatctgttcgatcatctttatcggttgcagggactacttggcaccaacaaacctgtccagcttatctctggctatcgttcccttgataccaacgatgagcttcgcgcacgaagccgtggtgtagcgaaacacagctatcacaccaaggggcaggcgatggatttccatattgaaggtatttcgttaagcaatattcgcaaagcggcgttatctatgcgcgcaggtggtgtaggatattacccacgtagtaactttgtgcatattgataccggtcccgtaaggcactggtaa

SEQ ID NO: 137804 - DNA, 216 bp, Enterobacter cloacae
atgtatatgcacttctggcgcacgaaaggcaccttaccgggcattattgccaacgtcaaggcagcctcactccaggaaaatcgggcgctgcagaggtgcagcgcccttttttacccagtgctaggacaacaaaatccattgaactacttcatttacctgattaattgttccgctttcgtcagaatttgtgcgctggatcgcgcggtgatatcgtaa

SEQ ID NO: 137805 - DNA, 1791 bp, Enterobacter cloacae
atgttgcttaagaaacggtatggtcgtccattgtcagcgctcagtctgagcctggcaatggcatttgctccgctgttcaatgtccaggccgcagagcctgaagtcgtaccaggtgatagctccgctacgcctggagagctttccgtcgcgctgtcgcaaagcgacgggcaatcgccggcggtcgcgaagctggccggtgagcagccgctgtcgatggaagccgcggcgaacagtcgcgcccagatcgaagcgctattgccggctggctacaaacccgtctttatgaatccgctggtctcgctatacgccgccagggatatgaaaccgatgtgggaaaaccgcgaggcggtgcaggcgttccagcagcagctggcggagatcgccatcgccggttttcagccgcagtttaccacctgggtcagtctgctgaccgatcctgccgtcagcggcatggcgcgcgatgtggtgttgtctgatgccatgatgggctatcagcactttatcagcggcatccccacccaggggacccgctggttatatagctcgacaccgtacaagatggcgaccccgccgctgtcggtgattaaccagtggcagctggcgctggataatggctccctgccggcgtttatcgccggcctggctccgcgtcatccgcagtatgaggccatgcatcagtcgctgctggcgctggtggctgattcacgtccatggccgcagatgaccggcagcggctcgctgcgtccgggagaatggagcaatgatatcggcgcgctgcgcgagatcctccagcgtactgggatgctggaaaattccgccaatatcgttctgcccggcgacgtggtgagtccttcggcgaagaaaaagagcaagcccgcggcgcgcggtgtgtacgatcgccagctggtggagggcgttaagcgctttcaggccatgcaggggctgggggcggatggggtcatcggccaatccacccgtgactggctcaatgtctcatcggcgcagcgcgctggcgtgctggcgctgaacattcagcgtctacgtctgctgccaggcaaactatcgactggtatcatggtgaatattcccgcgttttcgctggtctattaccaggacggcagtcaggtgctggcctcgcgggtgatcgtcggacgtccggaccgcaagacgccgatgatgagcagcgcgctgaacaacgtagtggtcaatccgccgtggaacgtaccgcccaccctggcgcgcaaagatattctgccgaaggtgcgtaataatcctggctatctggagcagcatggctacaccgtgatgcgcggctggaacagtaaagagaccatcgatccttaccgggttgactggtcaaccatcaccgagaacaatttaccgttccgttttcagcaggcgcctggggcacgtaattcactggggcgttacaagtttaatatgccgagttcggatgctatctatctgcacgatacgccgaatcataatctgtttcagaaggatgtccgtgcgctcagttccggctgcgtcagggtcaataaagcctcggagctggccaatatgctgctgcaggacgcgggctggaatgacacgcgcatttccgacgccctgaagcagggggatacgcgctatgtcaatattcggcaaaatataccggtgaatttatattacttaacggcgtttgtggacgctgatggacgtacacaatatcgaacagatatttacaattacgatatcaccgcgcgatccagcgcacaaattctgacgaaagcggaacaattaatcaggtaa

SEQ ID NO: 137806 - DNA, 4449 bp, Enterobacter cloacae
atgattgaacgcggtaagtttcgctcgctaacgctggttaactggaacggcttctttgcccggacctttgatcttgatgaactggtgaccaccctctccggggggaacggcgcgggtaagtccacgaccatggcggccttcgtcacggcgctgatcccggatttaaccctgctgcacttccgtaacaccaccgaagcgggggccaccagcggctcacgcgataaaggcctgcacggtaagctgcgcgccggggtgtgttactcggtactcgatgtgatcaactcccgccaccagcgcgtggtggtcggcgtgcgcctgcagcaggtcgccgggcgcgatcgtaaagttgatattaaacctttcgccattcagggactgccgacctctatcctgccgacccagctgttgaccgaaacgctgaacgatcgccaggcgcgcgtcgtgagcctcaacgagctgaaagataaactcgaggcgatggaaggggtccagtttaaacagttcaactcgatcaccgaatatcactcgctaatgttcgatctgggcgtggtggcgcgtcgcctgcgttccgcctccgatcgtagcaagtactaccgcctgattgaggcctcgctgtacggcgggatctccagcaccattacccgctcgctgcgcgactacctgctgccggaaaacagcggcgtgcgtaaagcgttccaggatatggaagcggcgctgcgggaaaaccgcatgacgctggaagccattcgcgttacccagtccgaccgcgatctgtttaaacacctgatcagcgaagccaccaactacgtggcggcggactatatgcgtcacgccaacgagaggcgcattcacctggataaggcgctggagtatcgccgcgatctcttcacctcgcgttcgcagctggcggctgagcagtataagcacgtcgacatggcgcgcgaactgcaggagcataacggcgcggagggcgatctggaagccgattaccaggccgccagcgatcacctgaacctggtgcagactgcgctgcgtcagcaggaaaaaatcgagcgctacgaagcggatctcgacgagctgcagatccgtctggaagagcagaatgaagtggtggcggaagccgtcgatcgtcaggaagagaacgaagcccgcgctgaggccgccgagctggaagtggatgagctgaaaagccagctcgccgactatcagcaggcgctcgatgtgcagcagacccgcgccattcagtataaccaggcgctgcaggcgctggagcgcgcgaaggcgctgtgccatctgccggatctgaccccggagagcgccgacgagtggctggaaaccttccaggcgaaagagcaggaagcgacggagaaaatgctgtcgctggaacagaaaatgagcgtggcgcaaaccgcgcacagccagtttgaacaggcttaccagttggtggcggcgattaacggcccgctggcgcgcaatgaagcctggcacgtggcgcgcgaattgctgcgcgacggcgtgaaccagcgccaccaggccgagcaggcgcaggggctgcgcagccgcctcaacgagcttgaacagcgcctgcgcgagcagcaggacgctgagcgtcagctggccgagttctgcaaacgccagggtaaacgttacgatatcgacgatctggaaacgctgcatcaggagctggaagcgcgcatcgcgtcgctggccgacagcgtctccaatgctcaggagcagcgcatggcgctgcgtcaggagctggagcaactgcagtcgcgtacccagacgctgatgcgccgggcgccggtctggctggcggcgcagaacagccttaaccagctgtgcgagcaaagcggcgagcagtttgcgtccggccaggaggtcaccgaatacctgcagcagctgctggagcgtgaacgagaggctatcgttgaacgtgacgaggtcggcgcccgcaagcgcgccatcgacgaagaaatcgagcgtctcagccagccgggcggttcggaagatccgcgcctcaacgccctggcggaacggttcggcggcgttctgctgtccgagatctacgatgatgttagcctcgacgatgcgccgtacttctccgcgctgtacggtccgtcgcgccatgcgatcgtggtgccggatctgtcgcgggtagccgagcagcttgaggggctggaagattgcccggaagatctctatctgatcgaaggcgatccgcagtccttcgatgacagcgtattcagcgtcgacgaactggaaaaagcggtggtggtgaagattgccgatcgccagtggcgttattcgcgcttcccgtcgctgccgctgtttggccgcgcggcacgtgaaaaccgcattgaaaccctgcatgccgagcgtgaatcgctgtcagagcgttttgcgaccctgtcgttcgatgtgcagaaaacccagcgcctgcaccaggccttcagccgctttatcggcagccatctggcggtggctttcgaggacgatccggaagaagagatccgcaaactcaacagccgccgcggcgagctggagcgtgcgctgagcgcccatgaaagcgataaccaacagaaccgtgtgcagtacgagcaggcgaaagagggcgtgtcggcgctcaaccgcctgctgccgcgcctgaacctgctggcggatgatacgctggccgaccgcgtggacgagatccaggaacgtctggacgaagcgcaggaggctgcgcgctttattcagcagcacggtaaccagctggcgaagctggagcctattgtttcggtgctgcagagcgatccggagcagtttgagcagctgaaagaagattacgcctatgcgcagcaaacccagcgcgatgcacgtcagcaggcttttgccctggcggaagttgtgcagcgcagggcccacttcagctactccgattcggcggaaatgctcagcggcaacagcgatctcaacgagaagctgcgccagcgtctggagcaggcggagtccgaacgcagccgcgcgcgcgacgcgatgcgtgctcatgcggcgcagcttagtcagtacaatcaggtgctggcctcgctgaagagctcgtatgacaccaagaaagagctgctcaacgatctgtataaagaattgcaggacattggcgtgcgcgccgacgccggcgcggaagagcgtgctcgcgcgcgtcgcgatgaactgcacatgcagctgagcaataaccgctcccgacgcaatcagctggagaaagcgttgaccttctgcgaagcggaaatggacaacctgacccgtaaactgcgcaagctggagcgcgattactgcgaaatgcgcgagcaggtggtgaccgccaaggcgggctggtgcgcggtgatgcgtctggtgaaagacaacggcgtcgaacgtcgtctgcatcgccgcgagctggcctatctctccgccgatgagctgcgttcaatgtcggataaggcgctgggggcgctgcgtctggcggtcgccgataacgaacatctgcgtgacgtgctgcgtatctcggaagatccgaagcgtccggagcgcaaaattcagttcttcgttgccgtataccagcatctgcgcgagcgtattcgtcaggatattattcgcaccgatgatccggtggaagcgatcgagcagatggagattgagctcagccgcctgaccgaagagctgaccaaccgtgaacagaagctggcgatcagttcccgcagcgtggccaacattattcgcaaaaccattcagcgcgagcagaaccgtatccggatgctcaaccagggtctgcagagcgtctccttcggccaggtcaacagcgtgcgtctgaacgtcaatgtgcgtgagacccactcgatgctgctcgacgtgctctccgagcagcatgagcagcaccaggatctgtttaacagcaatcgtctgaccttctctgaggcgctggccaagctctatcagcgtctcaacccacagatcgacatggggcagcgcacgccgcaaaccatcggtgaagagctgctcgactaccgcaactatctggagatggaagtggaagttaaccgcggctccgacggctggctgcgcgcggagtccggcgcgctgtctaccggggaagctatcggtaccgggatgtcgattctggtgatggtggtgcagagttgggaagatgaatcccgtcgcctgcgcggcaaggatatctcgccttgccgtctgctgttcctcgatgaagcggcgcgtcttgacgcccgctccatcgccaccctgttcgagctgtgcgaacgtctggagatgcagctgattatcgcagcgccggagaacatcagtccggaaaaaggcactacctataaactggtgcgtaaggtgttcaataatcacgaacatgtgcacgtcgtggggctgcgcgggtttgccgcgccgctgccggaagcgctgccgggaacggccgacgcctcctga

SEQ ID NO: 137807 - DNA, 705 bp, Enterobacter cloacae
atgtcattgacaaatattgaacaagtgatgccggttaagctggcgcaggcgttggccaatccgttatttccggcgctggacagcgccctgcgcgcgggccgtcatatcggtctcgacgagctggataatcacgcatttttgatggattttcaggattacctggaagagttttacgctcgctataacgtcgagctgatccgcgcgccggagggattcttctacctgcgcccgcggtccaccacgctgatttcgcgctcggtactgtccgagctggatatgatggtgggcaaaattctttgctatctctatctcagcccggagcgcctggcgaacgaagggatttttacccagcaggagctctatgacgagctgctgaccctggccgatgaatccaggctgctgaagctggtgaacaaccgttccaccggttcggatctggaccgccagaagctgcaggaaaaaatgcgggcctcgcttaaccgcttacgtcgtctggggatggtgtggtttatgggccacgatagcagcaagtttcgcattaccgaatcggtattccgctttggcgccgatgtgcgcgccggcgacgacccgcgcgaagcgcagcgccgcctgatccgcgacggggaagcgatagccctggaaaatcacctgcagctcaatgatgagaatgaagaaaaccagccggatagcggggaggaagagtaa

SEQ ID NO: 137808 - DNA, 1080 bp, Enterobacter cloacae
gtgcgccagcgtctgctgaaccgctttaccagcgaaattaccgaaggcaatgcgatctatcgcctgacgccgttggggattgggatcaccgattattatatccgtcagcgcgaattctcgacgctgcgtctctcgatgcagctgtcgatcgtcgccggcgagctgaagcgcgcggcggacgccgcggaagagggcggtgatgaattccactggcatcgcaacgtttttgcgccgctgaagtactccgtagcggaaattttcgacagcatcgacctgacgcagcgcattatggatgagcagcagcagctggtgaaagacgatatcgcgcagttgttgaataaagactggcgcgcggcgatttccagctgtgaactgctgctgtcggaaacctccggcaccctgcgcgaactgcaggatacgctggatgcggcaggggataagctgcaggcgaacctgctgcgcattcaggactcgaccatggcgcgcgacgatctccattttgtcgatcggctggtgttcgatctgcaaagcaagctcgaccgcatcgtcagctggggtcagcaggcgattgacctgtggatcggctacgaccgccatgtgcacaagtttatccgtaccgctatcgatatggataagaaccgcgtcttcgcccagcgtctgcgccagtcggtacagacctattttgatgaaccgtgggcgctaacttacgccaacgccgaccgcctgctggatatgcgcgatgaagagatggccctgcgcgatgaagaggtcaccggcgagctgccggcggacctcgaatttgaagagtttaacgaaattcgcgagcagctggcggcgctgatcgaagcgcagctggcggtctataaagagaaaggaataccgctggatctcggcctggtggcgcgggagttcctggcgcagtatccgcgcgggcgtcacttcgacgtggcgcggatcgtcgtggatcaggcggtacagctgggcgtcgcccaggcagatttcaccggactgccggcaaaatggcagccgattaatgattacggagccaaggtacaggcgcatgtcattgacaaatattga

SEQ ID NO: 137809 - DNA, 393 bp, Enterobacter cloacae
atgattattatcgcagcggcaattatcaccgacagtcagggacgctgtcttttagtgcgtaagcggggaactgaatattttatgcaacccggcggcaagcctgaaatcggcgagaccccgcacgcggcgctgatccgcgagctggaggaggaactcaacttcagcgtctcaccagaagaactggtccaggtaggccgtttcactgatgcggcggcaaacgagccaggtcatcttgtctctgcggatgtctttctgatagccacgaacagggtaagctttacaccgacgatggaaatagaagaagtgatctggtttacgccgggtcaggatcggcatattaagcttgctccccttaccgaaaaccacctgctccctctgctgaaaggggtgtaa

SEQ ID NO: 137810 - DNA, 981 bp, Enterobacter cloacae
atgtctattcagaaaattgctcgtctggccggcgtctcggtggccacggtgtcgcgggtgctgaacaacagcgatacggtaaaagccaaaaaccgtgagcgcgtgctgcaggcgatcaaagagagcaactatcagccgaacctgctggcgcgtcagctgcgaaccgcccgcagcaatatgatcctggtgatggtctccaatatcgctaaccccttttgcgccgaggtggtgaaggggatagaagaagaggcggagaagaatggctatcgcattctgctgtgtaactccgggtcggatctggcccgctcgacctcgggcctgcagctgctctccggcaaaatggtcgacggcattattaccatgaacgcgctctccagcctgccggaactgaccaccatgattggcgacgcgccctgggtgcagtgcgcggagtatgccgacaccggcagcatctcctgcgtcgggattaacgacgtcgaggcggctcagggggcggtgtcccgactggccgatagcggccgccgccgcatcgcgctcattaatcacgacctcagctatcgctatgcccgtctgcgcgagcgcggctataaaagcgtgctgcacgtgcacggtctggcgtatcagcaggtgacctacgcgcaggatcttagcgcggcggccggtaaacgggcgatggagcaactgctgtcgcaagacgagaagcccgatgcggtgtttgccgtttcggactccctcgccgccggggcgctgcgggctatcgcccaggccggactgcgggtgccggaggatatcgcggtgatcggcttcgatggcaccgagctggcggaagtggtctccccgcagctcaccaccgtcgaacagccctcccgggcgatcggccgtacggcggtgtctctactgatgaaacgcatcgacgatcccgacgctgccgtcgagcgggtgatgatggactggcgcgtgatagaccgcgccagcgtctga

SEQ ID NO: 137811 - DNA, 1245 bp, Enterobacter cloacae
atgcaggaattaatatcgcaaattgccgccttaggaatcgaaataacccccacccgctcgctgatgattatcttcggcattatcttgttcaccgccgtggtcgtgcatctgatattgcacaaagtggtcctgcgcgcatttgaaaaacgggcgctggccagcagccatctgtggctgcaaatcatcacgcagaataaactctttcaccgactggcctttaccctgcaggggatcatcgtcaacgtccaggcggtgctgtggctgcaaaaaggcagcgaggccgcggaaatattaaccaccgtggcccagctgtgggtgatgatatatgccatgctgtccttcttctcgctgctggatgtcattttaaaactggcgcagaaatttcccgccgcctcacagttgccgctgaagggcatattccagggaattaagctggtgacggcgattattatcggcatcctgattatttccctgctgataggccagtcaccggcgatcctgattagcgggctcggcgcgatggccgcggtgctgatgctggtgtttaaagatccgatcctcggtctggtggccggtattcagctctcggccaacgatatgctcaagcttggcgactggctggagatgccaaagtacggcgccgacggcgcggtgatcgatatcggcctcaccacggtcaaggtacgtaactgggacaataccatcaccaccattccgacctggtcgctggtctccgactcgtttaaaaactggagcggcatgtcggcctccgggggccgccgcatcaaacgcagccttaacatcgacaccaccagcattcattttcttgacgaacaggagcagcagcgcctgatccgggcgaaattactcaaaccctatatggattcgcgccacgaggagattagcgcctggaaccagcagtacgccggggagcaatcgatcctcaacgagcggcgaatgaccaatgtcggcaccttccgcgcctatctgcaggagtatttacgccatcatccacgcatccgccaggatatgaccctgatggtgcgccagctggcgccggatgccaacggcttgccgatcgagatctactgcttcaccaacaccgtggtgtgggcggaatatgaggggatccaggcggatattttcgaccatgtcttcgctgtggtggatgagtttggcttacgcattcatcaaacgcccaccggcaacgatattcgcgcgctgaccggcgccttctcccgctga

SEQ ID NO: 137812 - DNA, 1428 bp, Enterobacter cloacae
atgaatacgtctgctgtttcacccggccgcgccggtctgttgctgctactgagcggccagatgctgccgcttattgatacctcgatcaccaatgtggcgctggacgccatcacccacaccctggcggccagcgccacgcagctggagcttatcgtcgcgctgtacggcgtcgcctttgccgtctgcctggcgatgggcagtaagcttggcgataactatggccgccggcgcctgtttatgtggggcgtcgccctctttggcatcgcttccctgctgtgcgggatggcgaacagcatcggcgccctgctggcggcccgcaccctgcagggcgccggggcggcgctgattgtgccgcagatcctcgcgaccctgcacgtcaccctcaaaggccccgcccacgcccgggccatcagcctgtatggcgggatcggcgggatcgcctttatcgtcggtcagatgggcggcggctggctggtgtcggcggacatcgccgggctgggctggcgcaacgccttttttatcaatgtgccgatctgcctgctggtgctggctctgagccgccgctatgtgccggaaacccgtcgcgagacgccgtcgcggattgactggcagggtacgctgtacctcgcgctgatcctctgctgcctgctgttcccgatggccctcggtccggagctgcactggccgctgtggctgcagctgatgctggtggcggtcctgccgctgctgttcgccatgcgtcagagcgccctgcgccagcagcagcgtggcgaccatcctctgctgccgccgcgtctgctgcagttaaccagcatccgcttcgggatggccatcgccctgctgtttttcagcgcctggtccggctttatgttctgcatggcgctgaccatgcaggaggggctggggatggcgccgtggcagtccggcaatagctttatcgccctcggcgtggcctattttatttcggcgctgtatgccccgcggcttatcgcccgctacagcatggggcggatcctgctgaccggtctggcggtgcagatcgccggtctcctgctgctgtgcgccaccttctcccgcttcggcgtcgccaccagcgccctgacgctggttcccgccacggcgctgatcggctatggccaggcgctgatcgtcaacagcttttatcggattggtatgcgcgatattagcgccagcgacgccggggccgggagcgcaatcctcagcaccctgcagcaggcgaccctcggtctcggaccggctatccttggttcgctgttcctggcgctggctcgtcgcggcggcggaaactatccgcaggcgctgattgattttctgctggtcgaggtggctatgatgctgttgctgggggcgatagcgctgtggctgcgccatcatctcaaccgacagccggcgacggtggcctcgtaa

SEQ ID NO: 137813 - DNA, 870 bp, Enterobacter cloacae
  misc_feature (116)..(125): n is a, c, g, or t
atgaccacgatgccgcaacgggagtcgacgatcgccgtgccggacgatcgacgcaaacagctgggggcctttctgcgcgcccgtcgtgaaagcctcgatccgcagcgcctggggtnnnnnnnnnnggtgggccgccggcgcacgccgggtctgcgccgggaagaggtggcgatgctcgccgacgtcggcgttacctggtacacctggctggagcaggggcgggaggtgaatccgtcggaggcggtgctggtgggggtggcgaatgccctgcagtgcagtccgctggagacccggcatctgttcgtgctcgccgggctgaccccgccggaagccacccaggtgacggtgtgcgaaggcatcagccctggcacccgccggatgctcgacagcctgatgccgcagccggccagcattcagaaaccgaactttgatattgtggcgtggaacgacagcttctgccgcctgatgggcatcgatttcgccaccctcccggaagaagatcgcaactgcatttatctctatctgacccatgagacctggcgcagccggatcgaaaatcgcgatgtgctgccgaccttcgtctcctatttccgcgccgcgatggccgagcaccgcggcgatccggcgtgggaaaacaaactggcgcgctttttcgccgcctcgtcggagtttgaagcgctgtggcatcagcgctacgaggtgcgcggcgtggaaaaccagattaaacattttaaccacccgcagctcgggcgattcagcctgcagcagatgtactggtattcggcgccgcgcaacggctcgcgcctgctggtctacctgccgatggatgaggcgggcgagcaggcgctggcgtggctggaccaacattaa

SEQ ID NO: 137814 - DNA, 1044 bp, Enterobacter cloacae
atgaacgtaacccgaaaagagcagcgcattattcagcgcgcgctgaatgcctggcaggccagcggggagttaaccccctcggacagccagcggctggcgcaaacgatgcgcgtctcccccttcgactggcggcgcctgagccgctatgccttctggaccgcgctggcctgcgtgctgatttccctgggcagtctattcgccgacagcgagctggtggcttggctgctgagcctgttcagccactcggcgctgatgcggatcctgctgcctgcgctgctggcagtcgtctgctacggctggggttttcgtcgccagcggcgggagacgcagtggcactacagcaccgaggcgattttgtttctgggcgtcgtctttaccgccgtggcgctatggcagcttggcgaacggctggataacggcagcggccatatcgcaccgctgtttctggccggatgcgtgatttacggcgccatcggctatattgcccgctccgggctggtgtggctcttttttctgctggcgctgggcaactggttcggcgcggaaaccggctacgtctcggggtggggcgcctactggctgggcatgaactacccgattcgcttcgtcctgttcggcggcgcgctgctggcgctctgctacggcgcgcaatccctgcttcgccagcggcagctgtttaccgtcagcaaggcgatgggcctcacgtacctgtttattgcgctgtggatcatgtcgattttcggcaattacgacgcagacagctggtaccaggtgagccaggcgcgactcctgccgtgggggctgctgtttgccgtagcggccggcgtctgcatttttatcagcctgaaaaccgatgacggaatgctgcgcggcttcggactaaccttcctggcgatcaatctctatacccgtttctttgagtttttctggaacgggatgcacaaggtgctgtttttcctgatccttgccgtctcgctggcggtgattggccgctatgccgagcgcatctggcatgccggcgaagggcaggtggagaaaaaataa

SEQ ID NO: 137815 - DNA, 318 bp, Enterobacter cloacae
atgttcagattggttgtgcatgtggacgttaaaaaggaattgcaggcgcttccgcccattgtccaggcgaagatgatccggcaattagacaagttacgccaaaatcccaccgcgctgagagaacctgacagtaaaccgctggggcaggggctatttgaaattcgtgcgttaggttcggtacaggggcgagggatctacgtttttcagcaaggcaagacgctctttctgctacgggtttttgtcaagaaaacgcaaaaaaccccgtcatcggaaattcgcctggcgctgaagcgattagaggagatgcgcaatgagtaa

SEQ ID NO: 137816 - DNA, 288 bp, Enterobacter cloacae
atgagtaaaaagatcattgactgggatacgttaaaaacagaactgcttggccagcctgaggttcaggctgcattcgatgcgcaagaacgtcaacagcgattacgtactatgctggcgcaatggcgcgagcaggcggggctaacccgagcccaggtggcgcagaggatgggggtgagtgcgccgacggtctccagaatggaagccaatatcacccgcgccagtctggatacgttaacgcgatacgcgttagcctgcggtataaagcacccgcaagttttactttactaa

SEQ ID NO: 137817 - DNA, 654 bp, Enterobacter cloacae
atggatatcgtatcggtcgctttgaagcgctattccaccaaggcctttgacgccacgaaaaagctgactgccggggaagcggaacagctgaaaacgctgctgcagtacagcccgtctagcaccaactcccagccgtggcactttattgtcgccagcaccgatgaagggaaagctcgcgtggcgaaagccgccagcggcacctacgtgttcaacgaacgtaaaattctcgacgcctcgcacgtggtggtgttctgcgcgaaaaccgcgatggacgacgcctggctgcagcgcgtggtggatcaggaagaggccgatggccgtttcgccaccccggacgcaaaagccgctaaccacaagggtcgtactttctttgccgatatgcaccgcaaagagctgaaagatgacgatcagtggatggcgaaacaggtgtatctcaacgtcggcaatttcctgctgggcgtagcggcgatgggtctcgacgccgtgccgattgaaggggtcgattttgcgatcctcgatgaggaatttgacctgaaagcccagggctacaccagcctggtggtggtcccggtcggccaccatagcgtagaagatttcaacgctaccctgccgaagtcgcgtctgccgcagtcgacgaccattaccgagatttaa

SEQ ID NO: 137818 - DNA, 369 bp, Enterobacter cloacae
atgacgccggaaacactgcatccctgcgctcaccgtatcgccctgacctacccgtttaccgaacactgctggccctttgggccagagtacgacgtgtttaaggtcgacggccgcatctttatgatcaccatgactattcgcgggcgggcgctggtcaatctcaaggccgagccgcagaagtcgctgctgaatcagcaaatttatcgcagtatcgaacccggctaccatatgaacaagaaacactggatcacggtggtgccaggagaggatatcagcgaggatctgctggccgagctgattgacgattcgtggcatcaggtggtgaacaagctgagtaaaaaggcccagcagcgcctgcgtccgcgctga

SEQ ID NO: 137819 - DNA, 582 bp, Enterobacter cloacae
gtggctcgtccaaagagtgaagataaaaagcaagcgttactggaagctgccaccgcggctttcgcccagtccggcatagccgcctcgacgtcggccatcgcccgcagcgccggtgtggccgagggaacgctgtttcgctatttcgccaccaaggatgagttgctcaacgagctgtacctcgcgattaagctgcgcctggtgcgcacaatgatcgccgggctggatccggacgagaagcgcccgaaagagaacgcgcgcaatatctggaacagctatatcgactggggcgtgcgcaacccgatggagcacaaagcgatccgccggatggcgctcagcgagcgcatcaccgacgaaacccgccgccaggtaaaagagagctttccggagctcaacgaaatgtgccagctgtcggtgaaagagatattcctcagcgaggcgtaccgcgcctttggcgacgccctgtttctgtcgctggcggaaaccaccatcgaattcgccagccacgatccgcagcgcgcccgggagattatcgccctcggctttgaagccatgtggcacgccctgcatgaggcggacgcataa

SEQ ID NO: 137820 - DNA, 1101 bp, Enterobacter cloacae
atgaaccgtgtcactttcagcgtggtcgccatcatgttactcgcagcagcaacgacattgccgtttgttcttaatgccggttttggtaaggcgccgcagggggcacagcttagccaggtggaagcgtctccccactaccgggacggccagttccataaccagttgcccacgccagggttcaccgggcagaaaaatatgctggcggcgtggtgggatttcctgatgaccaaacgggaaaacgcccgtcccgcgcaaccgctgccgctggtgaagaccgatctggcgtcgctgcccctcgggcaggacgtgatggtctggctcggccactcctcctggtacctgcagctggcgggaaaacgcatcctgatcgacccggtgttcagcgattacgcggcgccgttctcctttatcaataaagccttccccggcgactatccgtggcgggcggaagggatgccggagatcgatctgctgatcatctcccacgatcactacgaccatctggattacgccaccattcgcgccttactgccgaaaattaagcgggtcattacgccgctgggggtcggatcgcatctgcgctactggggaatggacggggcgctgattaccgaagcggactggcagcaggcggtaccggccagcgacgagctcaccgtccacgtgctgccggcgcggcacttttccggccgtgggctgaagcgtaaccagacgctgtgggccagttttctgttcgttaccccgcagcaaaagatttattacagcggcgacagcgggtatgggccgcactttaaagcgataggcgatgagttcggtccggtcgatctggcgatcatggagaacgggcagtatgaccaggactggaaatatatccacatgatgccggatgaaactgctcaggctgccgacgacctgcgcgctcgcgcggtgctgcctgggcatgcaggacgattcgttttggcgaaacacagctgggatgaaccgtatcaacggctggcggctgccagcgaaggaagggcctggcgtctgctgacgcctgtgcagggcgagccggtgtgggtcgccgataagacgcaatcatttaacgcctggtggcgctaa

SEQ ID NO: 137821 - DNA, 342 bp, Enterobacter cloacae
atgacgatttccgctcaggtgattgatactatcgtcgagtggattgatgataacctgcatcaaccgctgcgtattgatgatatcgctcgccatgccgggtattcgaaatggcatctgcaacggctgtttttacagtacaaaggggagagcctggggcgctatattcgcgaaaggaagctgctgctggccgcccgcgatctgcgcgacaccgatcagcgggtctacgatatctgcctcaagtatggctttgattcgcaacagacttttacccgcgtctttacccggaccttcaatcagccgccgggcgcctaccgcaaagagaaccacagtcgcgcccactga

SEQ ID NO: 137822 - DNA, 249 bp, Enterobacter cloacae
atgaaacatccactggaaacgctgctctccgccgccgggagcttactgctggccctgctctcctgtctgctgttgcccgcgccttcgctgggcctgacgctggcgcaaaagctggttgagacattccatatgatggatctcaaccagctctatacggtgctgttttgtctgtggttcttagcgctgggcgccattgagtatctggtgctgcgctgggtgtggcgtcgctggttttccctcgagcggtaa

SEQ ID NO: 137823 - DNA, 897 bp, Enterobacter cloacae
atgaataccgaagatcaggattgcggtttcaacggcggcgaaatggtgctctccctggccgaccgctggatcatcgcggaattcaaccacaccgtgaaagcatatcgcgaagcgctggataacttccgcttcgatatcgccgccggcatcctgtacgagttcacctggaaccagttctgcgactggtacctggagctgaccaagccggttatgaacggtggcagcgaagcggagctgcgcgggactcgccatacgctggtgaccgtgctggaaggtctgctgcgcctggcgcatccgatcattccgttcattaccgagaccatctggcagcgcgtgaaagcgatctgcgggatcaccgccgacaccatcatgctgcagccgttcccgcagtacgatgcttctcaggtggatgacgcggcgctggccgacaccgaatggctgaagcaggcgatcgtcgccgtgcgtaacatccgtgcggaaatgaacatcgctccgggcaaaccgctggaactgctgctgcgcggctgcagcaaagaggccgagcgtcgcgtgaacgacaaccgcagcttcctgctgaacctggcgcgtctggaaagcattaccgtgctgcctgccgatgataaaggtccggtctcggtgaccaagattgtcgacggcgccgagctgctgatcccgatggcgggcctcatcaataaagaagatgagctggcgcgtctggcgaaagaagtggccaaaatcgaaggtgaaattggccgcatcgagagcaagctggccaacgaaggctttgtcgcccgcgcgccggaagcagtgatcgctaaagagcgcgagaagctggaaggctacgcggaagcgaaagcgaagctgattgagcagcaggcggtgatcgccgcgctgtga

SEQ ID NO: 137824 - DNA, 504 bp, Enterobacter cloacae
atgaatacgagcgtccccgcggcgacgttgctgcgtcgcattacggcggcagacaatgccgccatcgccagggtcatccgccaggtctcggctgaatatggcctgaccgccgataaaggctatacggtcgccgacccgaatctcgatgagctgtatgagctgtacagccagccgggctccgcctactgggtggtggagcaagagggggaagtggttggcggcggcggcgtcgcgccgctcgcctgcagcgagccggatatctgcgagctgcagaaaatgtattttatgaccagcgcccgcggccaggggctggcgaagaagctggcgctgctggcgctggactacgcccgcgaacaagggtttaagcgctgctatctggaaaccaccgccttcctgacggaggcgatcggcttatatgaacatctcggcttcgagcacattgacggaccgctgggctgcaccggccacgtggactgcgaagtacggatgctgaaaacgctgtag

SEQ ID NO: 137825 - DNA, 765 bp, Enterobacter cloacae
atggattacccgcagattctttccccgattatcaacttcctgcactgcccgacgccgcaggcgtggattgacgaagcccgcaagccggaaaacctgccgctgctgctgaccgaccatatggtgtgcgagctgaaagcggcgcagaacgccatgctgctggtgcgtcgctacgtcgcggataaagctgacgccgacgaactgttggcctgcctgaagccgtacgaagacttcacctaccgccgggggccggagccggattttgtcgccctgcataaacggatcaacaaaagcgccatgccgcagaccgacgacccgtggggccgccagctgctggacagcatgattttattgattaaagaggaactgcatcacttctggcaggtgcgggagatgatgctggcgcgcgatatcccctacgtcaaaatcaccgccagcaactatgcccgcggcctgcggcgcgaagtgcgctcgcatgagccggtgatgctgatcgataagctgatctgcggcgcctatatcgaggcccgctcttgcgaacgctttgccgccctggcgccgtggctggacgacgatctgcagaagttctacctgtcgctgctgcgctccgaggcgcgtcactatcaggactatctggatctggcgcagaagattgccggagaagatatcagcgagcgggtgcgccagctcggcgaggcggaagcggcgctgatcctccgtcccgaggccgagttccgctttcacagcggtgtgccggtagcggcgtaa

SEQ ID NO: 137826 - DNA, 423 bp, Enterobacter cloacae
atggcaaacccggaacacctggaagaacagcgtgaagagacgcgtctgattatcgaagagctgctggaagatggcagcgatccggacgcactgtacacgattgagcatcacctctctgcacacgatttcgaaaccctggagaaagtggcggttgaagcgttcaagctgggctacgaagtgaccgagcccgaagagctggaagtggaagagggtgacatggtcatctgctgcgatattctgagcgaatgcgcgctgaacgcagacctgatcgatgcccaggtggaacagctgatgacgctggcagaaaaatatgacgtcgagtatgacggttggggcacctattatgaggacccgaacggtgaagacggcgacgacgatgacgaagagtatgtcgatgaagacgacgatggtgttcgccactaa

SEQ ID NO: 137827 - DNA, 1005 bp, Enterobacter cloacae
atgtctgcgttttaccagaagcattttttaaagttactcgattttacgcctgcagaaatcaccgccctgctcgagctggcggcaaagctgaaagccgataagaaaaacggtatcgaagtccagaaactggcaggaaaaaacatcgcgctcatcttcgaaaaagactcaacccgtacacgatgctctttcgaagttgccgcatacgatcaaggcgcccgcgtgacctatctggggcccagcggcagccagattggccataaagagtcgatcaaggacaccgcccgcgtgctcggacggatgtacgacggcattcagtaccgcggccacggccaggaagtggtagagaccctggcgcaatacgccggcgtgccggtgtggaacggcctcaccaacgagttccaccccacccagctgctggcggacctgctgaccatgaaagagcatctgccgggcaaagcctttaaccagatgacgctggtctacgccggcgacgcgcgcaacaacatgggcaattcgatgctggaagccgccgcgttgaccggtctggatctgcgcctggtggcgccatcggcctgctggccggaggccgcgctggtggagacctgcaccgcgctggccaaacagcagggcggcaacatcaccctgacggaagatatcgccgcgggggtgaaaggcgccgattttatctataccgacgtctgggtctcaatgggcgaggcgaaggaaaaatgggccgaacgtatcgccctgctgcgcgactatcaggttaacagcgcgatgctggcgctcaccggcaacccgcaggtcaagttcctccactgcctgccggcgttccacgacgaccagaccacgctgggcaaacagatggctgccgattacggcctgcacggcggcatggaggtgactgacgaggtgtttgagtcggcggcgagcgtggtcttcgaccaggcggaaaaccggatgcacaccatcaaagctgtgatggtggcgacgctttcacgctga

SEQ ID NO: 137828 - DNA, 726 bp, Enterobacter cloacae
atgtcgaattttggactgcaacagaatacttccgtaccgttatacaggcagcttaaagataaaatcctcagcgatatttcttccgggaaactcgctgaaggagagaaaatccccaccgagattgagctcagcgaactctacaatatcagccgtattacagtgcgcaacgcagtgaaagagctggtagccgaaggctatttggtaaaaaagcaggggaaggggacttttgtctgtctgcctaaaattgagcgtaaagttgttcacttacttagctttactgccgcatgcgatgctaaccatctaccaacccatagcgtagtgactcgtcgtgagattctgcgggactatcgtaatgcgcgtcagcttcttgagcttgagagcgatgattccgtgctttatatccaacgccttaggatcgctggcgatgcgccgttaatgttagagaataattactactctctgaaacgattaggttttttacagcaggaggatcttagcgggtcgctgtatcagctattgcgtgaaaaatacgcgatcgtgcctacctatgcgggtgaaacgacagtagaaatggtgcgtgcggattctgacagcgcaccgctgctgaagcaaccgcccggcgaaccgttattcctgatgaaaacgctaattctggatagccagcatcagcctattcattatggagaacagtatatcgtcgccgagcgttacacgtttagtttctga

SEQ ID NO: 137829 - DNA, 1419 bp, Enterobacter cloacae
atgcgtattgcaaaaataaagtgggcgatgccacactgctacgctctgattttcttcattattatattagtagcgctgctgacatggtgtattcccagcggcagttttgattatcactcagtgaccttacccggcggtgaaactaaaacattagtgatcccagggtcttatcatctgctggacaaagtcagcagcgagggcgatttacgtcagggtattaccgccgtactggccgcgccgatggaggggattatcaaggccgcagacgtagtggcgtttgtgctcattgttggtggcgcttttggcattattttacgtactggcgcaattgagcggggtctggtggcgctggctgaacgcctggcaggtaaaggaattttggttatccctatcgcaatgaccttgtttagcctgggaggcgcgacttttggtatgagcgaggaggtgatccccctgtatgcgatctttatctccctgatgttcgcgctgggttatgactcaatgactgcgatcctgattctttttctgggaacccagattggctacgttggcgcaatgaccaatccgttctctgtactcattgcccagggcgtagcgggtattcagggaaatccgcagctttggctacgtgctattgcatggctggtcttcacgctactggcgattgcttacaccatgtggtacgcgcaccgtgttaaacgcactccgcaaaagtcgccggtatatgaaaatgattgtcgcaaccgcgagcagtttttgtcgatacaggatacgtcggtccatttttccatcgccgatcgggtaattatcatcgcctttgtgctggcgctggccgtcatctcatgggggttaatcacgcgtggctggtacatggttgagatcggctctgtgttcctggctctggggctgttttccgggatcgtcgggcgcatgggcattagcgggatggccgacagctttgtcgaagggtgcaaagagtttgtctacgccgccgtagtgataggtcttgcgcgcggtattctggtggtggcggagaacggacgaattatcgatacgttgctatttggtttgtctgaaatgctggaagggttgccgcagtatgcgtttaccactctgatgctattagggcataacgtcatcaccttttttgtgccctcatcttcgggcgaggccgcgctcactatgcccgtgctggcgccgctaggcgatttggttggtatcaataaagaggcgatggtgatggcttatcaatttggcaatggcctgacgaacctggtctctcctaccggcggtgtattgctggctgggttgtctattgcgcgcattgggtttggtcagtggttaaaggccattgcgccgctgtttccggtgctgtggatagttagcgctgcttttgctgcgatttcggcctgggtctga

SEQ ID NO: 137830 - DNA, 1566 bp, Enterobacter cloacae
atgcatagtgatgctgctgatttgattttacgttctgatgctatttttactgctgccagaaatgagctatttagcggatatgtagtcattaaaaacggcgctatcgcggcgatgatagcgaatggggcagatattcaaacctggagaggtgaaagaactcgctttatcgaacttggcgatcgcctgatttgtcccggattttgcgataatcacacgttttttaccggctatatgagcatgcagcgtggcgtcgatctccatgccgcccgcgatagtaatcatgcccttgaactattacaggatgcagaaaagcttctccctgaggagaaaagcctctatggctggggctggtctgctgcccgttggggagcggtgcctgatgccagactattggatgacgctttcccgcagagaccggttgtcgccattaacgatgacaaaagctattgctgggtgaaccgtgccgccgtggagctttatggctttaccgctgaagagtgcagcgcggaagcgagaatcgcattattggatgagatgctgtctgataccgcacagttaaaaaaagaaatgcgggcatttatggcccgacttgccgggcagggaatcacggcaataaaagacgtttgtttcaacgatgcgccgcagttgatgaatgcctgggatgaactggaaaaagaggatgcgctattgctgagagaaagcattgtttctcagcccgtatctgcgcctgtcgatcttgctttcggtgaacaggcccgacgccgctttcattcgccatggctgcggtttcatggctttaaatttatggtcgatggcgttattgccgatcataccggcgatatgatttacccctatgccgatcgtcccggcacgaacaatgaacgacccgttgattataatgccctgcgccagcaggttttgttggctgatgctcgtggattcaactgctgtatgaatgcggagggcgacgccgcaattcgccgctgtattgatatttttgccgaatgccgtaagcgtcacccgcagagcgtggttagacattctctgagcgatctggaatgtccgcatccaaacgatattcccagaatggctgagctcggcctttttgccgaagtttatgcacaaattctgctccttaacccctgcgaagccgaagcctatatgcgcgaacgctatggggaagagcgcgaagcgcaattctacgattatgccgcactatttggggctggcgtgacggtgactattggcaccgatctgcccctgtttattccttctgttcctgactcgatgtatgccgcctgcagtcgtcagttccctgatggttcacccgtgaatggctggtaccgcgaacgcggaatgacccgacaacagctcttaacggcatggacgctgaatagtgctcgacaccacggcatggaagagatgaccggtagccttgagccgggaaaacgcgcggatatcgcggtttttgaccgtaatttgttgagctgcccgaatgatgagttacggacttctaccgttgtactgaccctggtggatggccgtattacccatgaccttctgtaa

SEQ ID NO: 137831 - DNA, 834 bp, Enterobacter cloacae
atgatgaatgtgattggaattggcgataacgtcgtcgataaatatgttcatactcagactatgtatcccggtggaaatgcgctgaactttgccgcttatgcggccatgctggggcacaatgcggcctatttggggatttttggtaatgatgccgctgcggaacacgttatgcaggtgctggataaagttggcgtcaagtggccacactgtctgcaggtggcaggagataacggctgcgcacagctgaaaatcgaagagggagaacggatatttcttggttcgaacgccgggggtattcgcaagacaacttcgatggattttatttttcagcatgagcaatacctgcgtgagtttgatctgatccatagcggctgttatagctacatggagacgcacttacctcagttacgcgagctcaacattcctgtctctttcgatttttcagatgactttgtactggagcaggcgctgccgctgtgccgttacgtcgacttcgccttcttctcatgcgccgactacagcctggcgcaaacacgtgaaattgtgcaacaagcgcaggccagcggaagtcgcattgtctgcgcgacgcgtggagatgaaggcgcgattttatttgacgggcaggattggtatcagcaggcgcccgattacgtcacacccgtcgatacaatgggtgcaggtgatgcttttattaccgctttcatttgccattttctggcccaacctacgggtaacaagcgcgaagcgattaccaatagcctgcaaaaagcagcagctttctcggcacaaatttgcctgaaagaaggggcatttggctacgggactcactactaa

SEQ ID NO: 137832 - DNA, 975 bp, Enterobacter cloacae
atgaatactaaagaaataattaatgccgttgctaaagagatagaagacaaaggcggaatccgccaagtgttccttgttgcctgcggcgggtcattagtggatatgtatccggctaagtacttcctggatagcgaggcgacgaagcttcatgtcggcatgtataccgccaatgagtttgtctacgcgacgccgaaaacgttaggggagaattcgctggttatcgtctgttcgcacgggggcaacacgccggaatccgtcgctgcggctaagcttgctcaacagcatcaagcgcatactattacgctgactcacaacgctcaggcacagttgatcgaatacgccagtcacaacattctctatgcctggggtaacgataccaatgtggtcgataatccgatggcgattatcctcaacctgtgcgttgatacgttgcagcaggtggaaggtttcaataattacgctgatttccaacagggaatgacccaaattaatggcgtcattgctcatggccgtcagcaggttgcggatcgctgccagcgttttgcccaaaaatatcaagatgaaaagctcttctatatcctctccagcggagcttcttatggccatgcttatggttttgctatctgctcactaatggaaatgcaatggctacatgccgcacctattcactccggtgagtacttccacggaccttttgaagttacgaataaagagacgccgtttattttattgatgaacgaaggccgtacgcgggcgatggatgagcgagctttggccttcctcaccaagtatgcagaaaaagtggaagtcgttgatgctaaagaactgggcatcggggttcttcctccgtcagtcgtggagtttttcaacccggtactgttttacagcatcatgtgtgaatatcgttctgcgcttgccgacattcgccagcatccattggatacccgccgctatatggggctggtggaatactaa

SEQ ID NO: 137833 - DNA, 453 bp, Enterobacter cloacae
atgattattggcaatatccaccatctgcagccatggctgcctgccgcgctgcgcgaggctatcgaacacgttatcgctcaggtcagcgaggcgacgccgctgggtaaacacgctatcgacggcgacaacctgttttatctgatttctgaagacaccaccgagccgcaggccgcgcgccgcgcggagtaccatgctcgctatctcgatatccagattgtgctccgcggcagcgaggggatgaccttcagcaccttgccgccaggagagccgcagaccgactggctggcggagaaagacatcgcttttcttgccgaaggccagcaggagaaaacggtgatccttaacgaaggggactttgtggtgttttatcccggcgaagtgcataaaccgctgtgcgccgttggcgccccggcgaaggtgcgcaaagcggtggtgaagatgctgatggtttag

SEQ ID NO: 137834 - DNA, 936 bp, Enterobacter cloacae
atggctaacccgctatatcaaaaacatatcatttccataaacgatctcagccgcgaagacctcgaactggtgctggcgacggcggcaaagctgaaagccaatccacaacccgagctgctgaagcataaggttatcgccagctgtttctttgaagcctcgacccgcacccgcctctcttttgaaacctcgatgcaccgcctgggcgccagcgtggtcggcttttccgacagcgccaacacctcactgggcaaaaaaggggaaacgctggcggataccatctccgtcatcagcacctacgtcgacgccatcgtgatgcgtcatccgcaggagggcgccgcgcgcctggcgaccgaattctccggcggcgtgccggtactgaacgccggcgacggcgctaaccagcacccgacccaaaccctgctcgacctgttcaccattcaggagacccagggccgcctcgaaaacctcaacgtggcgatggtcggcgatctgaagtatggccgtaccgtccactccctgacccaggcgctggccaaattcaacggcaaccgcttctacttcatcgccccggacgcgctggccatgccgcagtacatcctcgatatgctcgatgaaaaaggcatcgcctggagcctgcatagcgccatcgacgacgtgatggcggaagtggatattctgtacatgacccgcgtgcagaaagagcgtctggatccgtcggaatacgccaacgtcaaagcgcagttcgtcctgcgcgccgccgacctcgaaggggcgcgcgccaatatgaaggtgctgcacccgctgccgcgcattgacgaaatcaccaccgatgtcgataaaacaccgcacgcctggtacttccagcaggccggtaacggcatcttcgcccgccaggcgttactggcactggtactgaatagcgagctggcactgtaa

SEQ ID NO: 137835 - DNA, 570 bp, Enterobacter cloacae
atgagaaaactctttttcgcagtatttgcatttgagtgcgatgtcatcagcgcgttttttcactgcaaaactggaagaaaccggttcggcgtggctgatacagttgctgttcgggcagaccagcacgctgtcgatatgatccggcaagctcgggcgggatttgcccaccacttcgtaatcatcaatgcggtttaccgtcgcctgcggggcgtacagcgacagctggttaacctgctcgtcggtcaggaaggtgttctcgattttaatcaaatccttgcggcccatttcgccggagggcaggttcaggccgatggtgatgcgctggtcggtttcggtcagtttgaacagggtgagcagcttaaagccgacctgcgccgggatatggtcaatcacggtgccgcgtttgatcgcttctacctgcagtttattgtcgtgtgtcatctctcattccctcttacagtgccagctcgctattcagtaccagtgccagtaacgcctggcgggcgaagatgccgttaccggcctgctggaagtaccaggcgtgcggtgttttatcgacatcggtggtga

SEQ ID NO: 137836 - DNA, 339 bp, Enterobacter cloacae
atgcatccgagcgatgcgcagggaagggatatccgcgaaggcagcgtggtgaaagtctataacgaccgcggggcgattctggcgggggtgcacctgagcgagcagattttgcccggcgtggtacagatgtccaccggcgcctggtatgacccgctggatccgaaggaagaacggtcgctcgataagcacggtaatcccaacgtattaaccgaggatcgcggcagttcgcgcctgggacagggctgtagcgcccagagctgctgggtggagatcgccccgtggcgagaggagctgccgccgatcaccgcctttgatccgccgaagtttattgaagtttag

SEQ ID NO: 137837 - DNA, 543 bp, Enterobacter cloacae
atgagcgcattaactcttttttccgtgaccgatccgcaaacgccggtctggcacagcaccgacgccaaagcgattcaggatcaacttaacgccaaaggcgtccgtttcgagcgctggcaggccgaccgcgacctcggcgcaaatcccagcccggaaacggtgattgccgcctatcagcatgcgattgataaactggtcgccgaaaagggctaccagagctgggacgtcatcagcctgcgcgccgataacccgcaaaaagaggcgctgcgggaaaagttcctgaacgagcacacccatggcgaagacgaggtgcggttttttgtcgagggcgctggcctgttttgcctgcacattggcgacgaggtgttccaggtgctgtgcgaaaagaacgatctgatttcggttcccgcccacactccgcactggtttgatatgggttcagaaccgaacttcaccgccatccgcatttttgataacccggaaggctggatcgctcagtttaccggcgacgatatcgccagcgcctacccgcggctggcgtaa

SEQ ID NO: 137838 - DNA, 690 bp, Enterobacter cloacae
atgatccgcgccatcgtgaccgacatagaaggcaccaccagcgatatccgcttcgtgcataacgtgctgttcccctacgcccgcgaacgactggccggctttgtgaccgctcagcagcacgctgaaccggttaaaaccattctcgacaacctgcgccgcgaaacagacgcccccgccgccagcaccgccgaccttatcactaccctcttcgcctttatggatgaagaccgtaaatccacggcgctgaaggcgctgcaggggatcatctggcgcgacggctatctcaacggcgactttaccggccatctctacccggacgtactgccggcgctggagcaatggaaagcgcagggtattgatctgtatgtatattcctcaggctcggtggctgcgcagaaattgttatttggctacagcgatgaaggtgatattactcatctgttcacgggctatttcgataccctggtaggcgccaaacgtgaggtgcagtcctaccgtaacattgctgaacacctgggccatgcccctggcaccatcctgtttctgtcggatatccatcaggaacttgatgccgccgaggccgcgggtttgcgcactgtgcagctggttcgcggcgaccgcgacccggcgagccatcaccctcaggttcagcgttttgacgacattcatccggagcagatcccagcatga

SEQ ID NO: 137839 - DNA, 1161 bp, Enterobacter cloacae
atgaacaataaccccttgattccagagagtaaacttcctgcgctcggcaccacgatttttacccagatgagcgccctggcccagcagcatcaggccataaacctgtcccagggctttcccgattttgacggcccgcgctatcttcaggagcgtctggcgtaccacgtggcgcagggggcgaatcagtacgccccgatgaccggcgtgccggcgctgcgcgaggcgatcgccgggaagacggcggagctgtatggttaccagcccgacgttaacagcgagatcacggtcaccgccggcgcgacggaggccctgtatgcggcgatcaccgccctggtgcgccgcggcgacgaggtgatctgtttcgatcccagctatgacagctacgcccccgcggtggcgctagccggcggcgagttacgtcgtattgcgctgcagccgccgcattttcgcgtcgactggcggcaatttgccgccgccctgagcgagaaaacccggctggtgatcctcaacaccccgcacaacccttcggccaccgtctggcagcgcgaggattttgccgccctgtggcaggcgatcgccgaacgcgagatctatgtcctgagcgatgaagtctatgagcatatctgctttgctgagggcggccacgccagcgtactggcgcatccacagctgcgcgagcgggcggtggcggtctcttcgtttggcaaaacctttcatatgaccggctggaaggtcggctactgcgtggccccggcggccatcagcgccgaactgcgcaaggtgcaccagtatctgaccttctcggtgaataccccggcgcagctggcgatcgccgacatgctgcgcgaagcgccggagcattatcgtgagctgccggcgttttatcgggaacgtcgcgatctgtttattgaagcgctgcgcccaagccggctggaaatcctgccctgtgaagggacctatttcctgctggcggactacagcgccatctccgatcttgacgatgtcagcttctgccgctggttgaccactgagatcggcgtggcggcgatcccgctctccgtcttctgcgccgatccgttcccgcacaagctgatccgcttgtgcttcgccaaacagccggcgactctgctggctgcggcggcgcgtttgtgccagctgtag

SEQ ID NO: 137840 - DNA, 627 bp, Enterobacter cloacae
atgcaacaacaactgacgcaggcgctggaagcttacctgcaaaagctggatgacgaggcgcgcattgaggctatcaacgcgtttcgccaggtgctccaccactacagccccttccgctcgcagcccgtcgactgcgtgctgtgggtcaaacaggagctggtcgcccccaacgattacaacccgaataacgtggcgccgccggagaagcgtctgctgcaaacgtcgctggaggccgacggctttacccagccggtcgtcgtcatccagcaacgcccacaggcgtatacgattgtcgatggttttcaccgccatgagctggcctgcagcaaagccgcgctgaaaaaaacgctaaaaggctatttgccggtgacctgcctgacgagtgaagctgcctcgcgtgacgggctgatggcagcgaccatacgccataaccgggcgcgcggtcgccaccaaatccacgccatgtcagagatcgtccgcgagctgacccagctcggctggacgccgcagaaaatcggcaaagagctggggatggatgccgatgaagtgctgcgtctgaagcaaattagcggcctgacagaaatgttcgccggccgccagttctcccaggcgtggacgattaagtaa

SEQ ID NO: 137841 - DNA, 1224 bp, Enterobacter cloacae
atgtcgtttattaaatatcccttaccggaatcggtgctgcaggcaactgagcagcggatccagtgggtcatggataatttttcgcgcatctgtgtctctttttccgggggaaaagactccaccgttatgctgcatttaaccgcccaggcggcgcggttacaggggaaaaaaatctgcgtgttgtttattgactgggaagcgcagttctcctgcaccatcgcccactgtgaaaaactgcgtgcgctgtatgcggatgttatcgaaaccttttactgggtcgccctgccgctcaccacccaaaatgccctgacgcagtataagccgcaatggcaatgctgggagcccggaaccgagtgggtacgccagccgccgccctgggccattacccacccgggctatttttcattttatcaacccggaatgagctttgaagccttcgtcagccacttcgccgagtggttttcgcagcgtcgtcccgccgccgtgctggtgggcattcgcgccgacgaatcgctaaatcgctttatgacgatttcttcacagcgtaaacagcgcttcgccgacgataaaccatggaccacttcagcgccgggcggccatgcctggtacatctacccgctctatgactggaaaaccgccgatatctggacctggtttgccaaaagcggcgagccctataacccgttgtacgatctgatgtatcaggccggggtgccgctgcgctatatgcgcatttgcgaaccgtttggtcccgagcagcgccaggggctgtggctgtatcacgtgctggaacctgagcgctgggccgcgatgtgccagcgagtgagcggcgcgcacagcggcggggtctatgccgggcatgataatcagttctacggtcatcggaaaatcgacaagcccgaccacctgacgtggaaaagctacgccctgttcctgctcgacagcatgccggaaaccaccgccgagcactaccgcaataaaatcgccgtctacctgcgctggtaccagaaaaaaggtatggaggatattccggatacccaacctgcggacattggcaccaaagatatcccatcctggcggcgagtctgcaaagtactgctcaataacgattactggtgccgtcagctttcgtttagcccaaccaaaagcagccactatcagcgctaccgtaaacgcatggaaaaacatcgccaacaatgggggatattatgcaacaacaactga

SEQ ID NO: 137842 - DNA, 933 bp, Enterobacter cloacae
atggcaaatctttacgatctgaaaaagttcgatttgaatttattggttattttcgaatgtatctatcaacatttgagcatcagcaaagcggcggcgatgttatttatcaccccctcagcggtgagtcagtcgttgcagcgtctgcgccagcagttaaacgatccgctatttgttcgtgttggcaaaggaatgacgcccaccaccgcctgcgtcaatcttcattatcatctacagcaaaatctggagcagctggaaaaaaccatcaatcttaataatcgctcagaactgcgtaaacgtattgtgatatatggccccccgctgttctgttcagtcaatagccacgttatgattaaccagctctgtcatcaggcgaacttgcaaattgagcaccataacctgaccaccaccgaatcggctgaggagctgctggcgtatcgccaggcggacctggtgttcacccgcatgcccattaccaaccgcaccacgatctgtcagccctatcagacggtgcagacgctggcggtttgccgggcgggccatccgcgacgcgaaacgcttacctcggtagagtcactggcgcaggagtttttcactcactatattaccaacgatcccgttattcagcgcgtgcagcaaagcagcatcgcctggctgaatccgcgcaatattgcctttcgcagcgactcttttatgaccattcttaacatgattaataaaaccgacttaattggctttttgccttcctatttatatgactttatctcacccactatgcagcttcacgccatcaacatagataatctttttccggatatcacgatctacattaattaccaccatgcatcttcgcaaaatcattttttaactgaattaatcaccatattaatgaatgatcgagaggcatcacggcccaaatttaatcacagcgaataa

SEQ ID NO: 137843 - DNA, 750 bp, Enterobacter cloacae
atgttaaagcgtctgctgttactcagccttttgccgttatgcagccatgcggaggaactccccgctccggtaaaagcgattgaaaaacagggcattaccattataaaaccctttgaggcgccggggggaatgaaaggctggctgggcaaataccaggacatgggggtcgccatctacctaacgccggatggtaaacacgcgatctccggctatatgtatgatgagaacggcagcaacctcagcgagcagctgtttcagaaagaactctataccccggcgggacaagagatgtggaagaagatggccagcgcccactggctgcaggatggtcgcaaggacgcccctatcgtgctgtatgtctttgccgatcccttctgtccctactgcaaacagttctggcagcaatcccgcccctgggtagaggccggtaaagtgcagatccgcactctgctggtgggggtgatcaagccggagagcccggccaccgccgcggcgattctcgccagcaacgatccggcgaaaacctggcatgattacgagcaatcgaatgggaaaatggctctgacgatcccgaaagttattccgccggagaaaatgaaaatgctcaacgtcaaccagcagctgatggacgatctgggagccaacgtgacgccggcgatttattatatgaataaagataatatgctgcagcaggtggtcggcctaccggataaagagaaactgcatattatgatgggtgaaaaagagtaa

SEQ ID NO: 137844 - DNA, 564 bp, Enterobacter cloacae
atgtccttaattaacaccaaaatcaaaccgttcaaaaaccaggcattcaaaaatggtgaattcatcgaagtcaccgagaaagacaccgaaggccgctggagcgtcttcttcttctatccggctgacttcaccttcgtctgcccgaccgaactgggcgacgtggctgaccattacgaagaactgcagaagctgggcgtagacgtttactctgtgtctaccgatacccacttcacccacaaagcgtggcacagcagctctgaaaccatcgccaaaatcaaatatgcgatgatcggcgacccgactggcgccctgacccgtaacttcgacaacatgcgtgaagatgaaggtctggctgaccgcgctaccttcgtcgttgacccgcagggtatcatccaggcgatcgaagttaccgctgaaggtatcggccgtgatgcgtctgacctgctgcgtaaaatcaaagcggcgcagtacgttgcttctcacccaggcgaagtctgcccggcgaaatggaaagaaggcgaagcgacgctggctccttctttagatctggttggtaagatctaa

SEQ ID NO: 137845 - DNA, 1566 bp, Enterobacter cloacae
atgctcgacaccaacatgaaaacccagctcaaggcctaccttgagaagctgaccaagcctgttgagctgattgccacgctggatgacagcgctaaatcggcagaaatcaaggaactgttggctgaaatcgctgaactgtcagacaaagtcacctttaaagaagacaacacgctcgcggtacgtaagccctcgttcctgattactaacccaggttccgaccaggggccgcgttttgcgggctcgccgctgggccacgagtttacctcgctggtgctggcgctgctgtggaccggcggtcatccgtcgaaagaggcccagtcgctgctggagcagatccgcgatattgatggcgatttcgaattcgaaacctactattcgctctcctgtcataactgcccggacgtggtccaggccctgaacctgatggcggtgctcaacccgcgcatcaaacacacggcgattgacggcgggaccttccagaatgagatcaccgagcgtaacgtcatgggcgtgccagcggtgttcatgaacggtcaggagtttggtcagggacggatgacgctgactgaaatcgtcgccaaagtggatactggtgcggaaaaacgcgcagcggaagagctgaatcagcgtgacgcttacgatgtactgatcgttggctccggcccgtccggcgcggcggcggcggtctactctgcacgtaaagggattcgtaccggcctgatgggcgaacgcttcggcggtcaggtgctggataccgtggatatcgaaaactatatttcggtgccgaaaactgaaggccagaagctggcaggcgcgctgaaagcgcacgtcaatgactataacgtcgacgtgatcgactcccagagtgcgaccaaactgacgccggcggcgacagagggcggcctgcatcagatcgaaaccgcctccggcgcggtgctcaaggcgcgtagcgtcatcatcgccaccggggcgaaatggcgcaatatgaacgtgccgggcgaagaacagtatcgcaccaagggcgtgacctactgccctcactgcgatggtccgctgtttaagggcaaacgcgtagcggtaatcggcggcgggaactccggcgtggaagccgccattgacctggcgggcgtcgtagagcacgtaaccctgctggagtttgccccagagatgaaagccgaccaggtgttgcaggataaagtccgcagcctgaagaatgtcgacatcattcttaatgcgcagaccacggaagtgaaaggcgatggcagcaaagtcaccggtctgcagtatcgtgaccgggtgagcggcgatgagcatcatgtcgcgctggcggggatcttcgtccagattggcctgctgcctaacaccacctggctggaaggcgccgttgagcgcaaccgcatgggtgagatcatcatcgatgcgaagtgcgaaaccaacgtcaaaggcgtgttcgccgcgggcgattgcaccaccgtgccgtacaaacagattattatcgcggcaggggaaggggcaaaagcgtcgctgagcgctttcgactacctgatccgcacgaaaaccgcataa

SEQ ID NO: 137846 - DNA, 429 bp, Enterobacter cloacae
atgtataagactatcattatgccggttgatgtctttgagatggcgctgagcgataaagccgtccggcacgcggagtttctggcccagcaggacggggtgatccatctgctccacgtcttaccgggttccgcgagctttaccatgagccgttttaccgccgacctgcggcggtttgaggaacatctgcagcatgaggcggagactcgcctgcagacgatggtcagccacttcagcattgacccgtctcgtatcaagctacatgtccgttttggcagcgtgcgcgatatggtcaacgagctggccagcgaaattaacgccgacgtggcagttattggctcacgcaatccctccatcagtacccacctgctcggctccaatgcctcaagcgtgatccgccatgcccatatcccggtaatggtcgtcaggtaa

SEQ ID NO: 137847 - DNA, 411 bp, Enterobacter cloacae
atgaccagacccgcaatcatcattaatgaactggatgccgaacgtatcgacaggctgctggagcagccggctttcgccaactcaccggttgccgatgccctgaatgaggaactcgaccgcgcgcaaatgctggccccggaagcgatgccgcatgatgtcgtcaccatgaatagcagggtaaaattccgcgatttaaccagcggcgaagagcgcgtgcggacgctggtgtttccgtcacaggtgaccgacagcgccagccagctctccgtcctcgcgccggtgggcgccgcgctgctgggcctgaaagtcggcagcaccattcactgggagctgccgggcggcgcatcgacgcacctggaagtgctggagctattgtaccagccggaagccgctggcgaattccaccgctaa

SEQ ID NO: 137848 - DNA, 798 bp, Enterobacter cloacae
atgttcaggaaggatttcgccgcgattgcccttgtgcttaccgccactcaggccggtgctgaaccgctcaccgcgacgcgatacgctgattttgaccgctacgtccttgccctctcctggcaaaccggattctgtcagagcatgtatgaccgcaatcgcaacgaaccggaagagtgtcgcctgcagcaggacaccgcgaataaagccgactttctgaccgtgcatggcctgtggcccgggctgccaaagtccattgccgcgcgcggagtggatgaacgtcgctggatgcgctacggctgcgccacgcgtccggtgcccaacatgccggaggtaaaagcgaaccgcaaatgccaggcggcggagaccggactgtcgctggagatggccaataaacttaataatgtgatgccgggatcgggcggcacctcctgtctggaacgctacgaatatgccaaacatggcgtctgcttcggcttcgatcccgacagctactttggcgccatggtgcgactaaacggtgaaattaagcgcagcccggtgggggattttctcgcgaagcactatggccaaacggtcagccgcgccgacttcgacgccgccgtggcccgcgcctggggtccgcagagcgtgaaggcgtttaagctaacctgcaacggtaatccggcctatctgacggagatgcaaatctcgctcaacgccgcgaccatcaacgccccgctggccacttccgcttttctgccccagcctcacccgggtaactgcggcgcacagtttatcctcgataaggttggccactag

SEQ ID NO: 137849 - DNA, 681 bp, Enterobacter cloacae
gtgctcgacgtcaacgacatcaccaccaccgccccggcgctgtatgccattctgccgtttaccccgatcatcggcgtgctgatctttgacggtaaatgggggccggagctgcacattatcaccatcctcgttggatgcatgctgctggcggcgatcctcgagttcctgcgcggtttcaacaccaaaaacgtctttagcgggctggaagtcgcctaccgtggaatggccgacgccttcgccggcgtagtgatgctgttggttgccgccggcgtctttgcccaggggttaagcactatcggctttatcaacggtctgatctcaatcgctacctccttcggctcggccagcattattctgatgctggtgctggtgatcctgaccatgctggcggcgatgaccaccggttccggtaatgccccgttctacgccttcgttgagatgatccccaagctggcgcactcctccggcatcaatccggcctacctgtcgattccgatgctgcaggcttctaacctcggccgcacgatatcgcccgtctccggggtggtggtcgccgttgccgggatggcgaagatttccccattcgaagtggtcaagcgcacctcagtgccggtgctcgttggcctgctggtggtgatcgttgctactgaaatcctggtgcccggcagcgcgctccactaa

SEQ ID NO: 137850 - DNA, 1191 bp, Enterobacter cloacae
gtggagaatgtagaattcaacagcgatggggcattaggcatcacggtttaccatcagaaccgcaagggcagcgcctcctccaccgatcttagcccggacgccatcgcccgcaccgtgcaggcggcgctggatatcgcccgctatacctccccggacccgtttgccggcgtagccgataaagatctgctggcctttgacgccccggatctggacctgttccacccggcggaggtctccccggacgacgctatcgaactggccgcccgcgcggagcaagcggccctgaaggccgataaacgcatcaccaacaccgaaggcggcagctttaacagccactacggcattaaagtgttcggcaacagccatggcatgctgcagagctactgctcgactcgccattccctctccagctgcgtcattgcggaagatgacggcgatatggagcgcgactacgcctacaccattggccgggcgatcgaggatctgcagtccccggaatgggtcggggaagagtgcgcccgccgcaccctgtcgcgcctggcgccgcgtaagctgtcgaccatgaaggcgccggtcattttcgccaacgaagtggcgaccgggttgtttggccacctggtcggagcgattgccggcggcgcggtctaccgtaaatcgaccttcctgctcgattcgctgggcaaacaaattttgccggagtggctgaccattgaagagcatccgcacctgctgaaagggctggcctccacgccgttcgacagcgaaggcgtgcgcacagaacgtcgcgatatcgtcaaagacggcgtgctgacccagtggctgctgaccaactactcagcgcgcaagctggggatgaaaagcaccggccacgccgggggcatccacaactggcgcattaacggccgcggtctgagttttgcaaagatgcttaaagagatgggcaccggtcttgtggttaccgaactgatggggcagggtgtcagtggcgtcaccggcgactactcacgcggcgcatccggcttctgggtagaaaacggcgaaattcaatatcctgtcagtgagatcaccattgcaggaaatctgaaagaaatgtggcgtaatatcgtgaccattggcgatgatattgaaacgcgcagcaacattcagtgcggttctgtgctgctgccggagatgaaaatcgccgggcaataa

SEQ ID NO: 137851 - DNA, 387 bp, Enterobacter cloacae
atgcgtaaaaaactgttagcgatgctggctgtctctgcttttgcgctcggttcagcgtcggccttcgccgacctgggcgaagacatggacactctggcagaaaacctgcaagtggtacagaagacctccgacgccggcgagctgaaagcggcgctgaataagatgcgtaccgccgcggtcgatgctcagaaagagaccccgccgaagctggaaggcaaagcggccgacagcgctgagatgaaagattaccgtcacggtctggatattctgatcggccagatcgacggtgcgctgaagctggcgaacgaaggcaaggtgaaagaggcgcaggccgccgcggaggagtttaaaaccacccgcaatacctatcataagaagtaccgctaa

SEQ ID NO: 137852 - DNA, 339 bp, Enterobacter cloacae
gtgaataacggagcggtaataaacgacgtaggggagcaggcggcgcagaccgaacgcctggctgacaagatgttacagcaggtattcgccctgttaagccgtcacgacatcgtccctaacgacgttcaggagcaaatgctgacttcccacgtgcgggccatggcccaccggtcaatcagcggcgaaccgctaccggaagtggatgccagtctgttcgaagaaatttctgaagattcaatgatgctggcccgcgaagtggtcgcacagttcggcaacctgcctgatgaagaggcctggctgctctccgtccacttcgaagtcgcgaaagataacctgtaa

SEQ ID NO: 137853 - DNA, 246 bp, Enterobacter cloacae
  misc_feature (138)..(147): n is a, c, g, or t
atggaacaaatcactgtagtcattggcgaccgtctgggtaaaggccaaaaagtcgccgcaggcgctgaaaaagcgggcgcacgtgctgtggtcgtccctggcgttgcggccgacatgaagcttggcgacataatgaannnnnnnnnncaccttcggcatctccttctgcggcagcggcggcgccggcgccatcaccgcccagaccaaatacggctacaaagcaaaatacggtatgcgctctattga

SEQ ID NO: 137854 - DNA, 129 bp, Enterobacter cloacae
atgcgctctattgatgagggcgtcaccgctatcaacgaaggctgcaacgtgctgggcttcggctttatggataaagaagagctgggcgagcggctggtcgaagcctggaaaaagaaatacggcgcataa

SEQ ID NO: 137855 - DNA, 300 bp, Enterobacter cloacae
atgaaagagcaattcaccaccacggtgagggttgccggcaaaggcgaaagcaaatcacgggccttcgccgatgccctgaaccatgtgcaggctgcggtgatgaaatcatcctcgcgcatcctactgcgtattgagccacaggacgtgacggttgttcatgcgcgcgaagcggtacgaaaagaggcgtttctgttcttctttttgcgccgtgaacgacggacctacagcgtggagctggacgtcaccgtcaacgtgaccgccatcgatctcgataaagtggatttcgtcacgcaaacctga

SEQ ID NO: 137856 - DNA, 699 bp, Enterobacter cloacae
atgtttcatgcccccaccacgcaggggatgggggcgtttcgaaccctgggcgagctgaattcctgtgagggcgatccggcctcccacttctcctttggccttggcttcttctttaacgcctgggcctcttccgttgcagcaggctccttcacccaggatgttgaccaccgcattatccccaactggggcgcggcggcgctgatgctgaaaaatcgtaacgttggcgaaacgctgcacgatccgaaaaaaatggccatctcctgcggcatcatcggcatgattgtcgtcgccttcctcaacctgaccgcctcgtccgtaccggaagcgctgcaggtcaccgccgttaaggtactggtgccggcggcaaacctgctggtgaacaccgtgatgccggtgatcttctggctggcggcgatcgatgccggtaaaaaatcaggcttctgggcgacgattttcggcggcgccgcgcagctgattatgggtaacgccgtaccgggtctggtgctggggatcctgatcggtaaaggcgtcgaagagagcggctggaaccgggtgactaaagtgatgatggtggccatcgtcgcgctgtttgtcctcagcggcttcttccgtggcttcgacatgaagatgatcgaatccttccatctgaccgtgccgaactggctggacatgatccacaactcactcagcggcaagtaa

SEQ ID NO: 137857 - DNA, 645 bp, Enterobacter cloacae
atggaacagaataaaggtttttggtatgccgactggtcgttcccgatctttgttggcctgctctcctccggcgtcttcgccgggacccacatgtactacctgtacggcatcggcgcctttaacgaagtggccttcgtggcgatgctgaagtcggggattgataccggcgtttacggcgcggtggcggcgtttggcgccagcttcctgttcgcccgcatcatcgaagggtcgctggtagggatcctcgatatcggcggcgcgatacagaccggtatcggtcttggcgtgccggcgctgctgctcggcgcgggctttgtcttcccggtggcgaacttcgccgcgtcgctggtcaccggcctggtcctcggcctggcggtgggctacatcatcattctggcgcgtaagttcaccatcaaccagagcgattccacctacggcgccgacgtgatgatgggggccggtaacgcctccggccgcttcctcggtcccttgatcatcctcagcgcaatgaccgcctcgattcctatcgggattggctcgctggttggcgcactgctgttctacatctggcagaaaccgatcaccggcggcgccatcctcggggcgatgatcctcggttccatcttcccggtggcgattagctaa

SEQ ID NO: 137858 - DNA, 1026 bp, Enterobacter cloacae
atgtttgatttactcctgcgccgcgcgcgcctcgtcgacgataccctgactgatatcgccattcaggacgggaaaatcgcggcgctgggcgagattagcgcgccctcccgtaaaaccattgagctgaacggcaaggtttacgtcagcgctggctggattgactctcacgttcactgctacccgaattcaccgatttatcacgatgagccggatagcgtcggcatcgccaccggcgtcaccaccgtgatcgatgccggcagcaccggcgccgacgacgtcgatgacttctatcaactgacccgtaaagcggcgacggaagtttatgcgctgctcaacatctcccgcgtcgggctgattgcgcagaatgagctggccaatatggccaatatcgacgccgccgcggtgaagcaggcggtgcagcgtcatcccgactttatcgtcggcctgaaggcgcggatgagcagcagcgtcgtcggcgaaaacggcattacgccgctggcgcgcgccaaggccattcagcaggaaaacgacgatctgccgctgatggtgcacatcggcaataacccgccgaacctcgatgaaatcgccgatctgctgagcagcggcgacatcattacccactgctataacggcaagccgaaccgcattctgaatcctgccggcgagctgcgcagctctattactcgcgctctgcagcgcggcgtgcgtctcgatgtcggccatggcaccgccagcttcagctttgaggtggcgcggcgggcgattgcgctgggcattctgccgcacaccattagctccgatatttactgccgcaaccggatcgacggcccggtgcgctcgctggcgctggtgatgtcgaaattcctcgccatcggcatgacgctgccgcaggtgattgactgcgtgaccgtcagcgccgccgaaggggcggctggaagtgggcttcgacgccgatttaacgctatttcgcctggagcaccggcccacgctgctggtggatgccgaaaaagagagcctgcaggctga

SEQ ID NO: 137859 - DNA, 1119 bp, Enterobacter cloacae
atgccttcgatttttgagaaataccatttaaaacaggtgattaatacttctggccgcatgacggcgctgggcgtttccacgccgcgcccggaagtggtggaagccgcgatggccggtatgaaccagtactttgaaatgaaagacctggtgaataaaaccggcgagtacatcgccaaactgttggatgtggaaggggcgaccgttgtctcctgcgcgtcggcggggattgcccagtcggtagcggcggtgctggtgaaagacagcgactggctgctggagaacctgcacgttacgccgattgaaaataacgaaatcgtgttgccgaagggccacaacgtcaacttcggcgcgccggttggcacgatggtggcgttgggcggcggtaagctggtggaagcgggctacgccaacgaatgttctgcccaacagctggcggcggcgatcactccgcgcaccgcggcgattctgtacatcaaatcccaccactgcgtgcagaaaagcatgctcaacgtggcgcaggccgcggaagtggcgcgccagcataacttgccgctgatcgtcgatgcggcggcggaagaagatctgcagtgctactaccgcatgggcgccgacctggttatctacagcggcgcgaaagcgattgaagggccgaccagcgggctggtgatcggcaaaacgcagtacgtcgagtgggttaagcgccagtcgatggggattggccgggcgatgaaagtgggtaaagagggcattctcggcctgacctgcgccattgaacactacctgacggcgagcaaagagagcggcgagcagatggtggcgaagatgacgccgtttatcgaacagctcaacgcgcttaacggcgtgaccgcccgcgtggtgtgggacagcgcgggtcgcgatatcgcccgcgccgaaattaaatttgatgaagtcacgaccggcgtgaagaccggcgatctggttaacgcgctgaagcagggtgaatacgccatctacttccgcggctataaagcgaatgaaggcattatcgaagccgatgtccgcagcgtaaacgcccagcagctggaggtggtcgctcgccgcatcgcagaagttctgaataaggagaaacaagcatga

SEQ ID NO: 137860 - DNA, 741 bp, Enterobacter cloacae
atgaaactgaccccaaacttttaccgtgaccgcgtgtgcctgaacgtcctggcgggcagcaaagacaacgcccgtgaaatttacgacgcggcggaaggtcacgtcctggtcggcgtgctctccaaaaactatccggacgtcgccagcgcggtggccgatatgcgcgactacgcgaagctgatcgataatgcgctctccgtcgggctgggggcaggcgatccaaaccagtcggcgatggtgagcgagatttctcgccaggtgcagccgcagcacgtcaaccaggtcttcaccggcgtggctaccagccgcgcgctgctcgggcagaacgagacggtggtcaacggcctggtctctcccaccggtacgccgggaatggtgaagatctccaccggcccgctgagcagcggcgcggcggatggcattgtgccgctggaaaccgccatcgcgctgctgaaagacatgggcggcagctccatcaaatacttcccgatgggcggcctgaagcaccgcgccgagtttgaagccgtcgccaaagcctgcgccgcgcacgatttctggctcgagccgaccggcggtatcgatctggaaaactacagcgagatcctgaaaatcgccctcgatgccggggtaagcaaaatcatcccgcatatttacagctcgattatcgataaagccagcggtaacacccgcccggccgatgttcgccagctgctggagatgaccaaacagttagtgaagtag

SEQ ID NO: 137861 - DNA, 738 bp, Enterobacter cloacae
  misc_feature (716)..(725): n is a, c, g, or t
atgcctgtcgctcgtcatctgcttgtcgcttcactgtccctgtttgccgccgccgcgggcgccgcgcaaacccactatgcctgggtaggcacctataaccccaatggcgaaggtctgtatcgctttaccgtcgatgccaaaaccggcgccctgcgcgataagacgctggtgagctcgttgccgaacgtcgcgcagttaaccgtgtcgcgcgatggcaaaacgctgtatgccgccagtgaagtcgaaaaaggcgtggtgcaggcgtggcgcattgaaaagaacggcgagctgaccgcgctcaaccaggtcgcctccggcggcgccgggccggtgtatctctccctgacgccggacggtaagcatctgctggtggctaactatgtcagcggcagtatcgccgtgctaccggtgcaagaagatggtagcctggctgaggcggtggacaggcatcaggatgaaggcccggcaggcgccgaacgcccggcggcggccgtcgagggtagcttcgccatcagcgatcacaatggccctcacgcccatatgatcgccgccgatcccagtgggaagtttgtttactccaccgatctcgggctggatcggatctatcagtaccggctggatagcgccagcggtaagctgacgccgaacgatccgccgtttatcgccgcctcgtcgccgggagccggcccgcgccacttcgtctttacgccacaggnnnnnnnnnntgtggctgattaa

SEQ ID NO: 137862 - DNA, 294 bp, Enterobacter cloacae
ttgagcaacgatggcaaacagctatacgtcgccaaccgcctgcataacagcattgcccacttcacagtgctggccgacggcagcctgagtcaccaggaagatatctggacgcgtggcgattatccccgcaccctgacgctggataatcaggggcagtggctgtacgtcatgaaccagcgtagcgataatattacccgcttcagcgtggcgccgaaggatggcaaattaacctttgcctccgactatacgccggtcggtagcccatcgcagatggtgatatccgcccaaccctga

SEQ ID NO: 137863 - DNA, 1830 bp, Enterobacter cloacae
atgcgatttcccaaccaacgcttagcgcaactcttcaccctgctgcgaaatgaaacgctgccgcaggatgagctggcgcaacgcctgtcggtttccacccgtaccgtgcgcgccgatattaccgccctgaatacgctgctggcgcaatatggcgcgcagtttatccttaaccgcggcagcggttatcagctgaagatagataatccgacgagtttccaggcgctggaggagaccgcgccgaaggcgcagcacgtgccgcgtaccgcccaggatcgcatcacgtttctgctggtgcgtttcctgacctcggcgttctctatcaagctggaagatctggcggatgagtggttcgtcagccgcgccacgctgcaaaatgacatggttgaggtgcgcgagcgcttccagcgctatcagctgactcttgaaacccgcccgcgccacggcatgaagctgttcggcagcgaggcgtcaattgcggaggtgccagcgctgctggagccggtgctgcaggagacgctcacgcggcatcatattcgcctcaccgacgccggcgagcgctttgtctgcctgtatggcgcggtggtggtgcgccgcgtcagcgaaggctacccgctggccgaattcagcgctgaagatgtggcgcagaacgtccgcgacgccgcgcgcgagctgacgggtgagctgcagcggctggccgggaaacctttatcgcccgccgaagaagagtggctatgcgtgcatatcgcggcccgtcaggtgcaggatgtcgatccggaaactatcagcgccgacgatgatgaagcgctggtcaattacatcctgcgctacatcaacagccagtataactacaacctgctggacgacgcccagctgcatgccgatctgctgacccacattaaaaccatgatcacccgggtgcgctaccagatcatgatccccaatccgctgctggataacatcaaacagcactacccgatggcctgggatatgaccctggccgcggtctccagctgggggaaatatactccgtacaccatcagcgaaaacgaaatcggctttctggtactgcatatcggcgttgggctggagcgccactacaacatcggctaccagcgtcagccgcaggtgctgctggtgtgcgataccagcaatgcgatggtacggatgatcgaggcgatcctgcagcgtaaatatccgcagctggagatcgccgctaccatctcccagcgcgagtacgaacagcgggacgcgatcgaggcggatttcgttatctcaacggtgcggatcggcgaaaaagacaagccggtggtgaccatcgcgccgttccccaccgactatcagctggatcaaatcggcaagctggtgctggtggaccgtacccgtccgtggatgctgaataagtacttcgatgccgcccacttccgggtggtggataagccgatggatcagcaaacgctgttcgccgagctgtgccagcagctgctggaggaaggctttgtcgatgcggagtttcatgcttcggtggtggaacgtgaagcgatcgtcagcaccatgttgggggatggcattgcgctgccgcactccctggggctgctggcgaaaaagacggtggtttataccgttatcgccccgcagggcatcgcctggggcgacgaaaccgcccatctcatcttcctgctcgctatcagcaagcgcgagtatgaagaggcgatggcgatctacgatattttcgtgactttcctgcgcgagcgcgccatgagtcgcctcgccgcgacccgcagcttcgatgagtttaaaacggtggcgatggagtgcgtcagccggttttga

SEQ ID NO: 137864 - DNA, 243 bp, Enterobacter cloacae
atggccacgctcaatgttcgactggacgataaactcaaaaaagaggcttatgccgtgctggagaaactcgatatgacaccaacggaggcggtacgcctgctgtttcaatacattgcggaaaatggccgcatgccggtgaaaagtatgaccatcagtgatggcgaagcggcgttattacgcaccgttcgcgaacggctggaaaacccacggccgggggttaaggtgagtctggatgacctatga

SEQ ID NO: 137865 - DNA, 285 bp, Enterobacter cloacae
atgacctatgaactggagtttgatccacgagcctggcgcgaatggcagaagcctggcgagacggtcaaaaaacagttcaaaaataagctccagcagattgtgcagaatccgcgaattgagtcgaccaggctgagcgatttaccggattgctacaaaatcaagcttaaggcgtcaggttatcggttggtgtatcaagtacgagatagtgtggtggtggtttacgttattgccattggcaaaagagagaaagcggccgtttatcatcaggcgaataaacggctctaa

SEQ ID NO: 137866 - DNA, 465 bp, Enterobacter cloacae
atgaattatcaccagtactaccccgtcgacatcgtcaacggccccggcacccgctgcaccctgtttgtctccggctgtgtccacgagtgccccggctgctacaacaaaagcacctggcgggtgaactccggtatgccgtttaccgctgagatggccgaccgtatcatcgccgacctcaacgacacccgcatcaaacgccaggggctttcgctctccggcggcgatccgctgcatccgcagaacatcgcggatattttaaagctggttcagcgcgtacgcaccgaatgccccggcaaagatatctgggtctggaccggctataaactggatgagctgaatgaggcgcagatgcaggtggtgaacctgattaacgtgctggttgacggtaagtttgtgcaggatttaaaagacccggcgcttatctggcgcggcagcagcaaccaggtcgttcatcatttgcgatag

SEQ ID NO: 137867 - DNA, 453 bp, Enterobacter cloacae
gtggtggaaggggtaaccgacaaaggttactacaccaacagcttccacctcgacgtggagaagaaggtcaacccgtacgacaagatcgatttcgaagcgccgtacccgccgctggccaacggggggttcatttgctacggcgagtacccgaatatccagcataacctcaaggcgctggaagacgtgtgggattacagctatcagcacgtgccgtactacgggaccaatacgccgatcgatgagtgctacgagtgcggttttaccggcgagttcgagtgcaccagcaagggctttacctgcccgaaatgcggtaaccacgacgccgcccgcgtttccgttacccgccgggtgtgcggttatctcggcagcccggacgcgcggccgttcaacgccggcaagcaggaagaggtgaagcgccgcgtgaagcacctgggtaatgggcagattggttaa

SEQ ID NO: 137868 - DNA, 1275 bp, Enterobacter cloacae
atggaaaagttatcttacgcatctgaaagtagtacatctccatggaccacctacctgcgccagatcgaccgcgtcgcgccttatctcggcgatcttgcctactgggtggaaaccctgcgccatccgaagcgcgcgctgatcgtcgacattcctgtgcaaatggacgacggcaccatccgccacttcgagggctatcgcgttcagcacaatctgtcgcgcggaccgggtaaaggtggtgttcgctaccatccggatgtcgatcttaacgaagtcatggcactttctgcctggatgaccattaagtgcgccgcggtcaatattccttacggcggggccaaaggcggcatccgcgtcgaccccttctccttgtcggaaggtgaactggagcgtctgacccgccgttacaccagcgaaatcggcattattatcgggccgcagaaagatattccggcgccggacgtcggcaccaatggcaaagtgatggcatggatgatggacacttactccatgaaccatggcaccaccatcaccggcgtggtcaccggcaaaccgatccacctcggcggctccctcggtcgtgaaaaagccaccggacgcggcgtgtttgtcaccggccgggaagttgcccgtcgcgccggtatcgaaattgaaggcgccaaagtggcgctgcagggctttggtaacgtcggtagcgaagcggcccgcctgttcgccggcgtcggcgctcgtatcgtggttattcaggatcataccgcgaccctgtataacgaaggcggaatcgatatggccgccctcaccgcctggcaggcggagaaaaagcagattgccggtttcccgggcgcccaggagatcgataaagacgccttctggaccactccgatggacatcctgatcccggcggcgctggaagggcaaatcacccgcgagcgcgctgagaagctgacctgcaaactggtgctggaaggggccaacggcccaacctatccggaagcggacgacgtgctggccgagcgcggcgtgatcgtggtgccggacgttatctgcaacgccggcggggtgaccgtcagctactttgagtgggtacaggacatggccagcttcttctggagcgaagaggagatcaacgccaagatggaccgcattatgaccgacgctatcgtgcacgtctgggataaagccgccgagaaagagtgtacgctgcgcaccgccgcctatatcgtggcctgcgagcgcatcctgatggcgcgtaaagaccgcggcatctacccgggctga

SEQ ID NO: 137869 - DNA, 999 bp, Enterobacter cloacae
atgaaaacacgttatcttggaaaagagaagtttcaggtttcagcattaggtctcggatgtatgggtatgagttttgcctatggcggcgctgaaacgtcgcaggcgataaatacgatccatgccgccatggacatgggcgtgaccttcctggataccgccgaagtatatggtcctttcgataatgaagttctggtcggaaaagcgattaaaggttttcgcgataaggtgcagattgccaccaaatttggatttcgtattttgccgaccggccagggtctggagcggatggccggcgttgacagccgtccggcacatattcgcgaatcagtggaagggtcgctgaagcgactgaatgtcgagaccatcgatctgctctatcagcaccgcgtcgatcccgcggtaccggtggaagaggtggtgggcactatggccgatctggttaaagagggtaaaattcgccatatcggtctgtcggaagtatctgctcagacgctgcgccgggcctgcaaggtacatccgatcgctgccgtgcagtcggaatattcgctatggagccgcgagccggaggccggtattctccacacctgccgcgagctgggggtcggctttgtgccatacagcccgcttggccgcggcttcctgacggggacaattaccgatcccggcgttttggcagcggatgatttccgccgccatctgccgcgcttccaggccgaaaccatgcgcaaaaaccagctgctgcttgagcgcctgcagcaggtggccacccgctatgacgcgacccttgcgcagattgcccttgcctgggtgatgagcaaaggcgaggatatcgtgcctatcccgggggcgaggaaaattgctcacctgcgcgacaatgccggcgccgcgaatattactctcgcgccggaggacatcctcaccatcgaacatattttcactgccgacaacgtcactggcttacgctatacccagggcgactttgatttaatcgaaaaataa

SEQ ID NO: 137870 - DNA, 948 bp, Enterobacter cloacae
atgaaaaccttgcccgatctgcaacaaatagaaatattaatactcatagtgaaacatggcagttttcgtcagaccgctaaagcgttaaacctttccccaccggcccttaccgtcgctattaatcatctggaagaaaagttaggcgtgcgcctgctaaatcgctcaacgcgcagtttgtcattaaccgcagtgggtgaggaatttcttaataatataacgccggtggtcaatgattatcgccgggtggtggacagtctgaattatcaccgtctgactccggaaggcgtggtgaaagttaatttaccgcgcattgttattgacctgttttttcaagactattttatcgcctttaaaaacgcctgtcccaatgtgacgctcgaactgtatgccaccgatcggaaagtcaatattatcgagtccggttttgacgccggcattcgctattcgcaggatgtgcccaaagagatgattgccatcccctttggcgagaaactatcgctgatcccggtggccagcccggactatatacgcgaagccggagagcccgacaccccgcagtcattagttaatttccgctgcattaaccgctgttttcctggtggtgagaagtaccgctgggagtttattggccccagcggcgagcttagcgaggtcgcggttaaaggcgatctggtcgtcgatgccgatagcgcaatgatccaggccgcggagagcggattaggcatcgcctttgtctatcagtcgctggtgacgcagcagctgagcgccggcagcctggtccatttgttacccgactaccgctatcctgccgaccatttttgcgtctactacccaagccggaaacatattcccgcccccctgcgggcctttatcgcctgggtgatggcgcagaataaaaatatcctcggtcagcagaccgcacgacacggatcgcggccggaagattaa

SEQ ID NO: 137871 - DNA, 432 bp, Enterobacter cloacae
atggacaatcgacagcttaccttctcccatcttttatacctcaccgcgcaccactggcggctggcggtcaatcgtcggctgaaaaatctcggtctcagccaggccagctgggtggcggtagcgtccatcgcccgccaccagcagccgctgtcgcaaagcgaactggcgcaggagctgggggtggagagcccgaccattgtgccgttgatccatcgtctggtcgccctcggactggtggagcgcatcaccaccgccagcgacaaacgtaagcgactgctggtggtcaccgacaaagggaaggccctctatgaacaggtcaaaacggtggctgacgatctgcgcgaagagatcctgacggcgattaccccacaggagcaggagcaaacccagcgggtgctggaaaagctgttgcgcgaagtggagaagaaataa

SEQ ID NO: 137872 - DNA, 1653 bp, Enterobacter cloacae
atgccccgtcgccaggataacccctacgccccgcatgactgggcgccgcatgaaaaaccggctctgctcggttcgccgtcgacgccgctgcacagtccggcgaaacgccttgcctacggcgtggtcggtctgctggtatgtctcaccggcgcgctgggcaacgcagtggtcaccgccaacctacagctgctgcagggtaccttcgccgcctggtcgacagaaatcgcctggctgccggcggtatacgtgatgaccaacgtctccatcaacctgctgctggtgaaattccgccagcagtttggcctgcgcgctttcaccgaaggctttctggtgctctatgtgctggtcacctttttccacctcttcgtcaacgatctcagctcagcgatgatggttcgcgccgcccatggcatggtggccgcggcgctcagctcgctggggatctactaccaggtacaggcctggcctgcgcgccatcgcctgaaagggctgactatcggcatcaccggctcgtcgctagccattcccctggcgcgcctcttttccaccgaactgctgcagaccgatgaatggcgcggtctctacttctttgaactgggcctggcgctggtgtcgctggcctgcgtcatcgcgctaaaactgccgccaagcgatcgtaaaaaagtgttcgaaaaaaaggatttcattaccttctttctgctggcgcccggcatggcgctggtgtgcgccgtgctgtcgctggggcggctcgagtggtggtttgaagcgccgtggatcggctgggcgctggcggcggcggtaatactgatcgtcgctgcgattaccttcgagcataaccgcagcaaccccctgctcaataccaaatggctctccagcggcagcatcgtgcgtctgggcctgattatgctgttgatccgcatcgtgctggcggagcagaacaccggggtcatcggctggctgcagtacgttggcctgcaaaacgaacagatgactaacctcgcgtggtcgattttcgccggtattctgtgcgggatcattgccagctgtctgacgctcaacccgcagaagctctactggccgaccgccaccgcgctggcgctgatcatgatagcctcgctgctcgacagccagtccaacgccctcacccgtccggaacaattaatgttcagccagtttttactcggcttcggcagcgccttctttctggccccggcgatgctcgccgggattggcggcgtgtttgccgacccgcgcaacctggtcagcttctcggtgctgttcggcatgagccagaacattggcgggctgctcggctcggcgatccttggcaccttccagacctggcgtgagaaattccactccagccagctggcggaccagataaccaccctgaacccgctgatcgtcgagcggctgcagcagtacagccagatgtatcagagccagattggcgacagtacgctgctcaacgttcaggccaccaccctgctgcaaaacgccgcgacgctgcaggccaatattctcgcctggaatgatacctatctgctgacggcggcgatctccgccgggacactagtgtgggttttctggcgcttaattcgcttacgactgactgcccgtatcgcgttgcaacgcgctaccggcagcaaataa

SEQ ID NO: 137873 - DNA, 1086 bp, Enterobacter cloacae
atgagtcagcaggatgcggccaaacaacaggccaacacccggaataatattcgcgtggtttccatttttaccgccgcggcgataggcctcgtcggcgtgctggtgatcctctacgcctggcaactgccgccgttcactcgccatagccagtttaccgacaacgcctatgtgcgcgggcagaccacctttattagcccgcaggtcaacggctatatcaccgccgtcaacgtcaaagatttcgcgattgtccagccgggcgaggtgctgttccagatagacgatcgcatctataaacagcgggtgcatcaggcccaggctaccctggcgatgaaagaggccgcgctgcgcaataacctgcaacagcgcaaaagcgccgaggcgacgatcgccaagaatgaagccgcgctgcaaaacgcccgcgcgcagaatctgaaaatccaggccgatttaaaacgcatccagcagttaaccgccgacggttcgctgtcgatccgcgaacgtgattcggcgcgggccagcgcggcgcaaggggcggcggatattgagcaggcgaaagcggcgctggagatgtcgcgccaggaccgtgaatcgaccatcgtcaatcgcgattcgctggaggccgacgtggccagcgccaaagcggcgcttgagctggcgcagatcgacctgcagaatacccagattatcgcccccaccggcggccagctggggcagatctcggtgcgtcttggcgcctatgtcagcgccggaacccatctgacctcgctggttccgccgcagcactgggtgattgccaacctcaaagagacccagctggccgaagtacgcgttggccagccggtcaccttcaccgtagacgcgctcaacggcgagaccttccacggcaaggtgcagagtatctccccggcgaccggggtggagttcagcgccatctctccggacaacgccaccggcaatttcgtcaagatcgcccagcgcatcccggtgcgtattacggtcaacgacgggcaaaacaacagcgaacgcctgcggccggggatgtcggtgcaggtgactattgatacccgtgcggagaaacaaccatga

SEQ ID NO: 137874 - DNA, 1380 bp, Enterobacter cloacae
atgatccgcctggtcgcccttgctatcgttctggcgctggtcggctgtcaatccgccgatgtgcaacgcgcgcagccgaccctgaccattcctgccgcctggcgggccgacgttggcccggccagcccggtggagggtgtatggtggcgcaattttcatgacagtaccctcaatcagtatgtcgaccaggcgctgcgctataacagcgatgtgctgatcgcccgcgagcgggtgaatgagtatcaggcgcgcgcttacgccgccgacagcagcctgtttccgtcactggacgccagcctcaccggcacccgcgcccggacgcagtccgccgccaccggcctgccgatccacagcacactgtataagggcggcctgaccgccagctatgatgtcgatatctggggagcgaaccgcagcgcggccaacgccgccggggccagccttgaggcgcagaaagccgccgccgccgccgccaatttgagcgtcgccagctcggtggccgttggctacgtcacgctgctgtcgctggatgagcagctgcgggtgacccagcagacgctaacatcaagggaagacgcgtggcgcctggccaaacgtcagtttgaaaccgggtatacttcacgccttgagctgatgcaggcggattcggagctgcggtcaacgcgggcgcagatcccgccgctacagcaccagattgcgcagcaggaaaatgcgctcagcgtgctgctcggcgataaccctggcgcggtaaaacgcggcgagttcgcccagcttaccccgctgcgtctgccgtcgcagctgccgtccaccttgctcaaccgccgtccggacatcgctcaggccgagcgccagctggtggccgccgacgccacgctggcctcgtcgcaggcgcagctgctgccctctattaacctgaccgctaccggcagcctgcaggaccggacgctgccggatctgctggacaacccgctgcggctgtggagtcttggcggcagtattctggcgccgctgctaaaccgccaggcgttaaatgcccaggtggacgtctccatggcccagcgcaaccaggcgctctatagctatgagaaaacggtgcgcagcgcgttcaaagaggtcaatgacagcctggacgccatcagtcgctatggcgaacagttaaccgagcttcaggaacaagagaccgttgcccaggaaaccttacgtattgcacaaaaccgctaccgtaacggctactcttcttatctggatgtgcttgatgcccagcgaacgctgttctccacccagcttagcgtggtgcaggtgaagaacaacctgctgttggcgcagatcgatctgtaccgggcgctgggaggcggctggtctgactcatcagggagctaa

SEQ ID NO: 137875 - DNA, 660 bp, Enterobacter cloacae
atgcaacaacagtggtcggcagtagacaattatttgattaaggccttaattcccggcgatcctgtgctcgatcgggtactggaaaacaaccatcgtgccgggctcccggcacacgatgtcgccgccaatcagggtcagtttctcgccctgctggtacggctaacccaggctaagcggatactggagatcggcaccctcggcggctatagcaccatctggatggcgcgcgagcttcctgcagacggccaactcctcaccctggaggccgacgcgcatcatgcccaggtggcgcgggagaatctgcagctggcgggcgttgaccagcgggtcacgctacgggagggacccgcgctacagtccctggaggcgcttggcgaatgtcccgctttcgacctgatcttcatcgatgccgataagccgaataacccccattatctgcgctgggcgctacgttattcccgcccaggaaccttaattattggcgataacgtggtacgcgacggcgaagtggtcaacccacagagcgccgacgagcgcgttcagggcgtgcgtcagttcattgagatgatgggcgccgagccacggttgacggcaacggcgctgcaaaccgtgggcactaaaggctgggacggctttactctggcgtgggtaaacgcttaa

SEQ ID NO: 137876 - DNA, 3387 bp, Enterobacter cloacae
atgaccgacggtatcctgctggcggagatccagcaggatcgtctgttgatgcagtacgacaccatcattatcgatgaggcgcacgagcgcagtctgaatattgactttctgctcggctatctgaaagagctcctgccgcgccgcccggacctgaaaatcatcattacctcggcgaccatcgacccggaacgtttctcaaagcatttcaataatgcgccgattatcgaagtctccgggcggacttacccggtggaagtgcgctatcggccgatagtggaagaggcggacgataccgagcgcgatcagttacaggcgatctttgatgcggttgacgaactggggcgcgaagggcccggcgatattctgatctttatgagcggtgagcgggaaattcgcgataccgccgatgcgctgaataagctggatctgcgccataccgaagtgctgccgctgtacgcccgcctgtccaacagcgagcagaaccgcgtcttccagccgcacagcgggcgacgcatcgtgctggcgaccaacgtggcggaaacctcgctgaccgtgccgggcattaaatacgttatcgatcccggtactgcgcgtatcagccgttatagctaccgcaccaaggtgcagcgcctgccgatcgagccggtttcccaggcgtccgccaaccagcgtaagggccgctgcggccgcgtttcggaagggatctgtattcgtctttattcagaagacgatttcctgtcgcgcccggaatttaccgacccggagattctgcgcaccaacctggcgtcggtcatcctgcagatgaccgccctgggcttaggcgatatcgccgccttcccgtttgtcgaagcgccggataagcgcaatatccaggacggcgtacgcctgctggaagagctgggcgccatcaccaccgatgcgcaggcaacggcttataaactaaccccgctgggccgccagctcagccagctaccggtggatccgcgtctggcgcggatggtgctggaggcgcagaagcacggctgcgtgcgggaagcgatgatcatcacctccgcgctgtcgatccaggacccgcgcgagcggccgatggacaaacagcaggcctctgacgaaaaacatcgccgcttccatgataaagagtctgatttcctcgccttcgtcaatctgtggaactacctcggcgagcagcagaaggcgctgtcgtcgaatcagttccgccgccagtgccgggtcgattttcttaactatctgcgtgtgcgcgagtggcaggacatctacacccagctgcgccaggtggtgaaagagcttggcctgccgatcaacagtgagccggcggaatatcgcgagatccatactgcgttgctgaccggtctgctgtcgcacatcggcatgaaggatgccgataaacaggagtataccggcgcccgtaatgcgcggttctctattttcccgggttccggcctgtttaaaaagccgccaaagtggacgatggtggccgagctagtggagaccagccggctgtgggggcgtattgccgcccgcattgagccggagtgggtggagccggtagcgcagcacctgatcaagcgctcatacagtgagccgcactgggagcggtcgcagggcgcggtaatggcgacggaaaaggtcaccgtctacggcctgccgatcgtcgccgcgcgtaaggtcaactacagccagatcgacccggcgctgtgccgcgaactgtttatccgccatgcgctggtggagggcgactggcagacgcgtcacgccttcttccgcgataacctgaagctgcgcgcggaaatcgaagagctggagcataagtcgcgccgccgcgacatcctggtggatgacgagacgctgttcgagttctacgaccagcgcatcagccacgacgtcatctccgcccgccacttcgatagctggtggaagcgggccagccgtgaaaccccggatctgctcaattttgaaaagagcatgctgattaaagagggggcggagcaggtcagcaagctggactacccgaacttctggcatcagggcaacctcaagctgcggcttagctaccagtttgaaccgggcgctgacgccgacggcgtgacggtgcatattccgctgccgctgctcaaccaggtggaggaggccggatttgaatggcagatccctggtctgcgtcgcgagctcattatcgcgctgataaaatcgctgccgaagccggtacggcgcaatttcgtcccggctcccaactatgcggaagcgtttcttggccgggcgacgccgcttgagctgccgctgctcgattcgctggagcgcgagctgcgtaagatgaccggcgtgaccatcgaccgcgaagcctggcagtgggatcaggtgcccgatcacctgaaaatcactttccgggtggtggatgataaaaacaagaagctgcaggaagggcgctcgctgcaggcgttgaaagacgccctgaagggcaaagtgcaggagacgctgtcggcggtcgctgatgacggtattgagcagagcgggctgcatatctggagctttggcaccctggcggagagttacgaacagaagcgcggtaactataaggtgaaagcctggccggcgctggtggacgagcgcgacagcgtggccatcaaactgtttgataatccacaggaacagcagcaggccatgtggcgcggtctgcgtcgcctgctgctgctcaacatcccgtcgccgattaagtatctgcacgagaaactgccgaataaagccaagcttgggctctactttaacccgtacggcaaagtgctggatctgattgacgattgcatctcctgcggcgttgataagcttatcgacgaagcgggcggtccggtgtggacggaagagggctttagtcagctgcacgataaagtgcgagccgagctcaacgacacggtggtggagatcgctaaacaggtcgagcagatcctcaccgcggtgttcaatatcaacaaacggctgaaaggccgggtggatatgaccatggcgctggggctgtcggatatcaaagcgcagatggcgggtctggtgtatcgcggctttgtcaccggcaacggtttccgccgtcttggcgatacgctgcgctatctgcaggcgattgaaaagcgtctggagaagatggctatcgatccgcaccgcgatcgggcgcagatgcttaaggtggagagcgtgcagcaggcgtggcagcagtggctgaataagctaccgccgaaccgccgtgaggacgacgatgtccgggagatccgctggatgatcgaggagctgcgggtcagcttcttcgcccagcagctgggcaccccgtatcctatctcggacaagcgagtgttgcaggcgatggagcaaattaccccatag

SEQ ID NO: 137877 - DNA, 2124 bp, Enterobacter cloacae
atgtctgattcgctgattcacctgcaaagcgccggtgccgatgttgtgattaaaacccgccctttcgccgaaattgtctactggggaccgcatttaagccacttttcgccgcaggatgccgacagcctgacgcgcccggtcgccaacggtagactggatgtcgattcgccagtgaccttaatggcggagctgggccatggtctgtttggcgcgccgggcattgaaggccatcgtcaggggctggatgcctctccgctgttcaccaccagcgaagtgcggcacgagggccagacgctgaccctggtcagcgaagatccgcaggccggcctgcgcctgcagagcgagatcgcgttggatgccagcggcgtgctgagcgtgcgccatggcgtgaccaatctgcgcgccagcccatggcaggtggatcgcctggcggtcacgctgccggtcgccgaacgcgctcgcgaggtgatggctttccatggccgctggatccgcgagtttcagcctcatcgcctgacgctggagcacgacagctttgtgctggagaaccgccgcgggcgcacctctcacgaacatttcccggccctgatcaccggcagccgcgcctttagcgagatgcagggtgaagtctggggcgtgcatctggcctggagcggtaaccatcgcctgcgggcggaggtgaaaaccgatggccgtcgctatctgcaggccgaggcgctctatctgccgggcgaaatggcgctggcggaaggggaaaccttgtggacgccgtacctgtatgccagctactcggcgaatgggctgaacggcatgagccagcagttccatcgttatctgcgcgaacggattattcgtttcccgggcaacaaaccgcgcccggtgcatctcaacacctgggaggggatctatttcgaccacgacccggactacatcatgcgtatggccgacgaagcggcggccctgggcgtcgagcgctttattatcgatgacggctggtttaaaggacgcaacgacgactgggcggcgcttggcgactggtatctcgatgagaaaaaatacccctacggcctgacgccggttatcgatcacgtgaagtctctgggtatggaattcggtatctgggtggagccggaaatgattaacccggattccgatctgtaccgggcgcacccggactgggtgctggcgctgccgggctataccccgctgaccggccgccatcagtttgtcctgaacctcaacattcccgaagcgtttgattatctgctggagcggatgagctggctgctgggcgagcatgcggtggactacgtgaagtgggatatgaaccgcgagctggtgcagcctgggcatcagggacgcgccgctgcggacgcgcaaacgcgccagttctaccgcctgctggatacgctggtggcccgtttcccgcacattgaatttgaatcctgctcctccggcggcggacggatcgattatgaagtcctcaaacgcagccatcgcttctgggcgtctgacaacaatgacgcccttgagcgcaacaccatccagcgcggcatgagctacttctttccacccgaggtaatgggcgcgcacattggcaatcgccactgtcatgccaccttccgccagcatagtatcgccttccgcggcctgacggcgctgttcggtcatatgggccttgagctggatccggtgagcgccgatgaagaagagcgcgccggataccgaaaatatgcggccctgcataaacagtggcgcgacgtgatccatcacggcgtgcagtggcgaatagatatgccggatgctaccactcttgcccatggcgtcgtcagcccggataaagcgcaggcgatcttcctcgttagccagctggcgatgccggactacaccctgatggcgccgctgcgcctggcgggcctggaggcgagcgcccgctatcaggtgacgctcctcgatcatccgaacattcagatcaccggcgagggcggccacaccatgcggaagctgccggcatggatgacgacgccgcagacggtgagcggtgagtggctgcagcaggcggggctggcgctacccatcctcgacccggaaagcgccattctgattggtctgcaacgcgtgtga

SEQ ID NO: 137878 - DNA, 996 bp, Enterobacter cloacae
atgtcgctgaaagccattgccaaacaacttgggatctccgtcacgaccgtcagccgggcgttgaacggctacgacgatgtgtcgcaggagacccgcgcccgggttgaggctgaagcgcagcgccggggctatcgccccaacactttcgcccgccgtctgaaaatgggcaccatcgatgccgttggtctcgtcttccctgtccgccccgcgccgctcaacaataacgtttttctcgagatggtcggggagatcagccatgagctggcgcgccatgacattgatttgttgctgatcgccgatgatgagcaggcggataaacatggctatatgcgcatggtgcagggccgtcgcgtcgatgcattaatcgtggcccatactctggatgacgatccgcggctggcgcagctgcaggcctccggctttccgtttctggcgctcggccgtagccgcctggcgcagccctacgcctggtttgatttcgataactatgccggcacctgccgcgccacccgccatctgattcaacagggccaccagcgtatcgctctgctgggcgagaacaacaatcaggcgtttattttgcaacggcgtaacggctacctcgatgccctgcgcgaggcggggttatccgatgcatggctgcgtagcgtgccggcgacgcgccgcggcggctatcaggccacgctggagctgctgcgtctgcctgagccgcctaccgcgattatcaccgactgcaacacccatggcgatggcgccgcgatggcgctcgcccacctggggcgtttaaccggcgacaaccgcgtcgccctggtggtgtacgacgggctgccgcaggacagcatcattgagaccgatgtcgccgcggtgatccagtccacgcgccagggcgtgggaaggcagattgccgatatggtgcgtcgcttaatcgccggggaggatctcgccacgctgcaggtgctatggcagccggaatttttcccgggtgaaaccgcctga

SEQ ID NO: 137879 - DNA, 549 bp, Enterobacter cloacae
atgacacagccaatcagcgttatcgccaaaagtctggtgcgggagcgggcgcggaccgggctttcgctggcggaagtcgcgcgtcgggcgggtatcgcaaaatccacgctatcgcaactggagtccggcaacggcaacccgagtctggaaacgctgtggtcgctctgcgtagcgctggatattccatttgccaggctgcttgagccgcaggtgaacaaaacgcaggtgatccgccgcggcgaggggaccaaagtggtggcagagcaggcgaactatcaggccattttgctggccgcctgtccgcccggcgcgcgtcgggacatctatttgctgctcacccagcccggcgccgaccgcatttcgcatccgcatccgccaggctcggtggaacatattatcgtcacccaggggcgggcgcgggtagggctgacgtcggcgccggaagagctcggcgagggcgactatatctgctacccggcggatcaggagcatgtttttcaggcgctggagccggatacgcaggccctgctgatcgctgagcaaaactga

SEQ ID NO: 137880 - DNA, 690 bp, Enterobacter cloacae
atggaaattcgttcgatatggctaagtgatatgaaacaaactctctctagtctcagcggagacacgataaaagcgattgttttggtctgccttgccgtcggggtggtgggcatgtcctatgggtcgctggcggtggcttacggcttccctttatgggtgccgctcttgctttcggtgtccgtgctggcaggcgcttctgaattcatgtttatcggcattgtcgccagcggcggtagtccgctggccgccgccgccgccggcctgttagtcaatgcgcgtcatatcccgttcggggtgaccgtacgcgaactggttggtcggcgcgccttaagctttatcggatgccacattatgaacgacgagagcgtggtctttggcttgtcgcagcccacccccgcgcagcgcaaagcggcctactggctgtgcggcgctggcgtcgcgctgatctggcccctcggtacgctaaccggcgcggccgtcggcaaactgctgccagcgccggaaaccatcgggcttgatgcggtcttcccggcgatcctgctggcgctggtgatcccggcctttaaaaaccgcactacgctgatccgcgccgccagcggcgccgcgctggcgcttgccgccgtaccgtttgtgcccaccgggctgccggtgctgctttcgctgttcggtttactgtcgaggaaaaaataa

SEQ ID NO: 137881 - DNA, 324 bp, Enterobacter cloacae
atgggcaatatgacgctgtttatcgccggtatcgccatcctgtcgctgggaacctatctgatgcgtctcggcggcgcgaagctcggcaatcggctggcattttccgagcgctcgcaggcgctgctttccgatgcggcgacggtgctgcttttttccgtcgcccttgccaccactttctatgagggcgcacatttcgccggtatggcgcgcgttctgggcgttgctttcgctgtgttcctcgcctggcgcaaggtcccgctgatcggcgtgattatcgccgccgctgtggtgaccgcgctgctgcgcctggcgggtatgccctag

SEQ ID NO: 137882 - DNA, 594 bp, Enterobacter cloacae
atgaacagacatctgaccccaggctgcaaaacggccattttaatcaacggcattccggcgtcggggaagagcaccattacccgtttgctggcggagacctttagcctgccggtattgacgatcgacggcatcaaagagccgtttatggcgcgcctggcccctgtcgaccggccgatgaatcgccagctgggctgcgcggcgtatgaggtgatctggtcgattgtcggcgcatcgcctgccagcatggtctggttgatcgacgcctggttcggctttcagccgcgggagaccttgcagagactgctacagcaggcgggcgtggagcaggtgattgaggtctggaaccatatctctccggagctggccgtcgcgcgctatgcctcgcggctggcgacgcggccgccgggccaccccggagaagagtatttgccggagctggcccagctggccgggcgggcgcagcccatgtcgttaggacctgtactgacgatagaccagcggcacccgctgcaaatcgaaccggttattgagtggcttgaaggcacgatcgccggacagcacagcggttttacagattacgcttactcgtcctag

SEQ ID NO: 137883 - DNA, 438 bp, Enterobacter cloacae
atgaccataaaagaactgcttattgaggccgatgccattcaggttggcgttgtggagtccgactggcagcgggtaataaagctggctgcccgcccgctggaggcaaaaggctttatttcgacggaatatagccaggcggtgatcgacaatactttaaatcatggcgcttattacgtttttgatgaagggattgccatcccccatgcccgccccgaatgcggcgtcagacgcaactgctttagcctggtggtgctggaaaagcctattccctttgcggacagtgaaaaagcggacattgttattatgtttggcgcccgggacagcaatgcgcatatcgaggagggcatccgttccatcgtcgcgctgctggataataatgacaccatggccaaactgcggacggcccgcagccgggaggaggttgtcgcattactatga

SEQ ID NO: 137884 - DNA, 270 bp, Enterobacter cloacae
atgtttgaatcattgaaaacgctgtggaaaaaagagcaaaacccgctgcaggattatgatcaacagtcccgtcagctggcggaagagatcgccagactggaaggcgaattacagcgccagcccgataatagcgacgtgcaaaaaacattgatgttgacttacaaccgggcattatcggtatatgccaaaagtaagagccaccggcaggatatcgatgcgctgtttctgcagattgataatttacgcaatattattcgccgcaatatctag

SEQ ID NO: 137885 - DNA, 843 bp, Enterobacter cloacae
atgagtctgtataattttaatgagattttaaaaatcgctcaggaaagagattttaaagcgattggctcgtttaacttgcactgtattgagatgttaccggcttttttcaaagccgcgcaaaacagccgcagcccattaatgatccaaatatcaaccggtaccgcagagtatctggggtatcggttactggtcgatgccgtgcgttcattagcagacagtgaaaatatcccgacctgcctgcatctcgatcactgctccgatattaaagccatcgagacggcaatgaatgcgggcttttcttcggtgatgtacgacgggtctcacttaagcctcgaggaaaatatcggtaacacgcggattgtggtggaaatggcccggccgcggaatattacggtagaaggtgagctgggggcgatcggcgggtcagaggatggaaaagcggtggctgccgaagatatctgttttactaccgtcgaagacgcgacgcgttttgtgaaggagacacaggtcgatatgctggccgtctccgtgggcactgtgcatggcctgtacacaggtaaagcgcagatacagcatgcgcggctgaaggcgataagcgaagcgacgggcgtgccgctggtgctgcatggcggcacaggtgtcagcgatgaggatatgcggctggccgtcaccgaagggattaataaagtgaacgtcggaacggaaatgaacgtgcagtgggtcgatcgctgtaaatcaacgtttgagaaaggaaaagtaaatgacagcgtacggaaatttttaattcccgccaaccaggcagtgactgccgtattaatggaaaaaatggcgctatttaaatag

SEQ ID NO: 137886 - DNA, 1368 bp, Enterobacter cloacae
atgaatagcttcgttgcgtttatcgttaaggatttactcggccaggcatccattcttattgcttttattgccatgcttggcctgatcctgcaaaagaaatcgccaggcaaaaccgcggaagggacatttaaaacgctgctcggtttcttaattatgatggccgggataaacatcattgtcgccacgctgaccttcctgaatgatatcttcacccagggatttggcatgaaaggctatattaccgatgtggccgccatcgccgggttagcgaatcgggaattaggttcggaggtggcgctgacgctgctggtgatctttgccgtcaatattattatcgcccggctgacgccgctgaaatatatttttctgaccggccaggcgctactgtggatggcgacgatcggcgccgtgattggctataagtccgggctcaccggcgtaccgctgattttaaccgggggcatcttcggcggcgtgatggcggtgttaatgccggccctggcgcagccggtggtcaggcgcattaccgggtctgacgatgtggccctggggcacttctgtactatcggctatctggtgcaggctgcggtcgctaaagttgtcggaaaaggctctcgctccacggaagatctcgaactgcctgataactttaagtttctgcaggatacctatctggccatggcggtggtgatggtgccgatgtatctcatcccggctatcgcggcggggcctcagtacatcgcgcagttctccggcggcattaattacctgatgtatgccttcatgcagtccattcagtttgtcgccggggtctttgtcctctatagcggcgtgcgtttattactcaatgagctggtgccggcttttcgcggtatcgcgatgcgtattgtcccggatgcaaagcccgctctcgattgcccggtgctatttccctatgcgccgaatgcggtgattgttggatttctggcaacgactgtcggctcgattatcggcatgctggttttcccgatgttcggcctggcgatgattctccccgggctgttaaccaactttttcgccggcggtacggcaggggtatttggcaatgcgctgggcggacgtcgcggggcgatgatcggcggggtgattcacggcctgtttatcacatttctgccggccattctggtacccatgctggagagctacggctttacgggcgtcaccttcagcgattcagacgtcattagctccggtctggtattaggccacgccttccagaataactggctctttgtcgccttgtttattgtgtttgtcgccgcattggcatggtttgtaaacggtaaatccgctaagccgaaaggggaaagtgttcatgagtctgtataa

SEQ ID NO: 137887 - DNA, 315 bp, Enterobacter cloacae
atgctgaaaattttatgcgtatgtggctgcggcctcggttcaagctttgccattgaaatgacggcgaaggcagttttaaagaagctggaaattcccgctcatattgaacacaccaccgtttccgaagctggggcttttaaatcggatatgattctgacgcaaaaaacctttgccgacatcttaaccgccgatgccagtgaagaagaaattaaacgtgtcgtggtattgaataaacttactgataaagaggagattgaaactaagatcgtcgcattcttaaaagaacgtcatctgaaggtggctgattatgaatag

SEQ ID NO: 137888 - DNA, 981 bp, Enterobacter cloacae
atgaaaattggcatcgttattagcggcggggatgtttctggaatgaataattttatattccagatagccaggcaggctaatgctgatatcacgctgtttaatggcggtattccagggctactggagaaaagtcatcaggatatggcgtggcgcgatctggttgattattcaattaccgcggtgccgatcattacctcggggcgaaccagtcgcaaactgcagcgcagtgaatatgaaagcattgctaaaaaacttaaatctctgcgtattgatgtgctcattatggccgggggggatggcagcctgcagtttctgaatacccttagtgaatttgagattaattgctttggtgtgggaatgactatcgataatgatgtgtatggcagtgattatacgattggtttttccacggcctgtgagcaaattattaaagaagtctctcgtttaagaaataccggaagagcgctgcccggtcgggtttttatggttgagatattaggaggctattgtggagaactaacgttgcagtccgccattaaatgtaatgcggatattgccctgatcccggaggcacagatgccgttggccgtgctcgcggaacggattacccggaagctgagtacgcagaatagcgtcgttatcctctgctcagaaggctataccaaagagtactctcccggctttcagggggcgattgataccatgattaaacagctggaaccacaaataggtgtccgtatccgtaaaacgatcgtcggctatggtttacgcagcggtgatccaacctgcgaagagatttatcagggcactattatggccagtgaagtggttcgctgtattcagtcaggtatgaaaaataaagccataataattaattccagtaacaaacctattccgattgatttagtcagtatgaaaaaacgtctggtcgatactgaaggacatcattataaacttgccaagcaactcaatattatttga

SEQ ID NO: 137889 - DNA, 213 bp, Enterobacter cloacae
atgaaaagcatcaaaacttttgtcgcagtaatcgctatggccgcctctttcgcttccttcgctgctgaaaccgtgaccgcaaccgcctccacaatggacggcgcggaagcgaaaatcgccgcacaggcgcaggctgccggcgcttcgtcttacaaaatcaccgaagcgtttaccggcaaccgcgtgcatatgactgccgaactgaacaaataa

SEQ ID NO: 137890 - DNA, 837 bp, Enterobacter cloacae
gtgaacaagaagcctctcgaacaaatcaaaaatgtgacgaatgtcacaggatatcgccaggtctccctctggaaacgcgaggatctgcaacaccctcagccagatgagttagcggaagaggtgcccgtcgcgctggtctacaacggtatctcccacgtggtgatgatggcctccccgaaagatctggagcaattcgccgtcggcttctccttatccgaagggattatcgagcaccggcgggagattttcggcatggacgtggtagcggtgtgcaacggccttgaggtgcagattgagctctccagccggcgttttatgggcctcaaagcccggcgtcgcgcgctggccgggcgcaccggctgcggcgtatgcggcgtcgagcagctcaatgatattggtaagccggtccagccgctgccgttcactcagtcgttcgatttagccaatctcgatcaggccctggcgcatcttaacgactttcaaccggttggccggctcaccggctgtactcacgcggccgcgtgggtccggttgacgggcgaactggcgggggggtttgaagacgttggccggcatgtcgccctggataaattgctgggccggcgggcggaagtcggcgaggggtggcagcatggcgccgcgctggtctccagccgcgccagctatgaaatggtgcagaaggcggcgatgtgcggcgtcgagatcctgttcgcggtctcggcggccaccaccttagcagtggaagttgccgagcgctgcaatctgacgctggtgggcttttgcaagccgggcagggcgacagtttacacccatccgcagcgtttaattgcgggttaa

SEQ ID NO: 137891 - DNA, 588 bp, Enterobacter cloacae
atgcaggtcagcagaaggcagttctttaagatctgcgctggcggtatggcgggaaccacggcagcagcgctgggctttgccccggcaactgcgctcgcggagacacggcagtacaaattgctgcgcacgcgcgaaacccgtaacacctgcacatactgttctgtcggctgtgggctgttgatgtatagcctcggcgacggcgcgaaaaacgccaaagcatccattttccatatcgaaggcgatccggatcatccggtcaaccgtggtgcgctctgtccgaaaggggctggtctggtggactttatccattctgaaagccgcctgaaattcccggaatatcgcgcgccaggctccgataaatggcagcaaatcagttgggacgaagcgttcgatcgcatcgccaagctgatgaaagaggaccgcgacgccaactttatcgcgcaaaacgacgccggcaccaccgtcaaccgctggttgactaccgggatgctgtgcgcctccgcctccagtaacgaaaccggctatttaacgcaaaaattcacccgcgccctcgggatgctggcggtggataaccaggcgcgtgtctga

SEQ ID NO: 137892 - DNA, 1101 bp, Enterobacter cloacae
atgtgcggcagcggttgcgccggcgcccaccaggaactggtggagttcgcagccaaaattaaagcccccatcgtccacgccctgcgcggcaaagagcacgtggagtacgacaacccgtacgatgttggcatgaccgggctgattggcttctcttctggcttccacaccatgatgaacgccgataccctgatcctactgggcacccagttcccctatcgcgccttctacccaaccgacgcgaaaattatccagatcgacatcaaccccggcagcatcggcgcacacagtaaggtcgacatggcgctggtgggcgatattaaatcgacgctgaaggcgctgctgccgctgctggaagagaaaaccgatcgccacttcctcgataaggcgctggagcactatcgcgacgcgcgaaaagggctcgacgatctggctaaacccagcgataaagccattcacccgcaatatctggcgcagcagatcagtcattttgccgatgaagatgccattttcacctgtgatgtcggcaccccgaccgtctgggcggcacgctatctcaaaatgaatggtaaacgccgcctgctgggctcgttcaaccacggctcaatggccaacgccatgccgcaggctatcggcgccaaggccactgcgccggagcggcaggtagtggccatgtgcggcgacggcgggttcagcatgctgatgggcgattttctgtcgctggcgcagatgaagctgccggtgaagattgtcatctttaacaacagcgtgctgggcttcgtggcgatggaaatgaaggccgggggctatctcaccgacggtacggagctccacgataccaacttcgcccgcatcgccgaggcctgcggtatcaaaggtatacgcgttgaaaaagcctccgaggtggatgaagcgctgcagaccgccttccgcaccgacggtccggtgctggtcgacgtcgtcgtcgccaaagaggaactggcgatcccgccgcagatcaagctggagcaggccaaaggctttagcctgtatatgctgcgggcgatcatcagcgggcgcggcgatgaggtcatcgaactggcgaaaaccaactggctcaggtaa

SEQ ID NO: 137893 - DNA, 1002 bp, Enterobacter cloacae
gtgatcgatttacgcagtgataccgttacccgtcccgggcgcgccatgctggaggccatgatggccgccccggtcggggacgatgtgtatggcgacgaccctaccgtcaatgaactgcagcgctatgccgccgacctggccggcaaagaagcggcgctatttctacccaccggcacccaggccaacctcgttggcctgctcagccattgccagcgcggcgaagagtatatcgtcggccagggggcgcataactatctgtacgaagccggcggcgcggcggtcctcggcagtattcagccgcagccgatcgacgccgcggcggatggttcgctgcctctggataaagtggcagcgaaaatcaaacccgacgatatccattttgcccccacccgcctgctgagcctggaaaacacccataacggtaaggtgctgccgcgcgactatctgcaggaagcctgggcgtttacccgccagcgcaatctggcgctgcacgtcgacggcgcgcgcatctttaacgccgtggtggcctacggctgcgagttacgcgatatcgcccaatactgcgactccttcaccatctgcctgtcaaaggggcttggcgctccggtaggctcgctgctgctcggcagcgaggcgtacattcgccgcgccgtccgctggcggaaaatggtcggcggcgggatgcgccaggcgggcatcctggccgccgccgggctgtacacgctgaaaaataacgtgcagcgcctgcaggaggatcatgacaacgccgcgtggatggcagagcagctgcgcgctatcggcgccgacgtcacccgtcacgataccaacatgctgttcgttcgcgtcggcgaagagcaggccccggcgctcggcaagtttatgcaggcgcagggggtattgattaacgcctcgcctgttgtccgtctggtcactcacctggatgtcaaccgtcagcagctgagcgaggtggtcgcccactggcaggcttttttacaacgctaa

SEQ ID NO: 137894 - DNA, 1443 bp, Enterobacter cloacae
gtgtcgcaatcagttctggtgctcggcgccagcggctatattggccagcatttagtgcgcgcattaagcgcgcggggctatccggtgctggcggcggcacgccatatcgaccgattgcaaaaactcgctttgcccggcgttacctgccggtcagtcgatctcaatcaaccgcaggacctgcctgcgctactcaccggtatcgataccctttattatctggtccacggcatgggcgaaggcggtgattttatcgcccatgagcggcgggtggcgacgtatgtgcgcgatgccctgcgtcagtcatcagtgcgccaggtgatatttctcagttcgctgcaggccccggcgcaggagcagtccgaccatctgcgcgctcgtcagattaccggcgatctcctgcgtaagtcgggcgtgccggtgaccgagctgcgggccgggattatcgtcggcgccggctccgccgccttcgaggtgatgcgcgacatggtttataacctgccggtgctaacccctccgcgctgggtacgttcgcgtaccacccctgtcgcgctggaaaacctgctcgttgacctggttgagctgctgaatcatccctccgacatgcaccgcgtcttcgaagccgccggtccggaggtgttaagctatcagcagcagttcattcgctttatggccgtcagcggtaaacatcgcccgctcattcccattcccctgccgacgcgctggatctcggtgtggttcctcaatgtcatcacctcggtgccgccgaccatcgccaaggcgctgattcaggggctgaagcacgatctaatcgctgacgatcgggcgctgcgggcgctgatcccgcaaacgctgatccccttcgatcaggcggttcgccgcacgctgaaagaagaagagcagttagtaaactccagcgactggggctacgacgatcaggctttcgcccgctggcgaccggagtacggctactatccgaagcaggcaggttgcaccgtcgccactcaggcaagccgccaggccctgtggcaggtcgttaaccaaatcggcggtgaagaggggtattttttcggcaatctgctgtggaaaacccgcggcgcgatggatctgctggtcggccaccggctggccaaagggcggccgcagcgcgcttatctgcaaaccggcgatacggtcgacagctggaaggtaattatcgtggaggaagaaaaacagctcaccctgctattcggtatgaaagcgcccgggctgggccgattaagctttaccattaacgataaaggcgatcgtcgtgaactggacgtgcgcgcctggtggcacccgcacggtatgccaggcctgatctactggctgctgatgatcccggcgcacctgtttattttccgcggtatggcgcaacgcatcgcccggctggccgaacaaatctcaggcagagtcgaaggataa

SEQ ID NO: 137895 - DNA, 1014 bp, Enterobacter cloacae
atgaaggtactggttaccggtgcgaccagcggattaggccgcaacgcagtggaatatctgcgcaacaagggcatcagcgtgcgagcgaccgggcgcaacgaagcgatgggcaagcttctgagcaaaatgggggcggaattcatcccggcagatttaaccgagctggtctcttcgcaggctaaagtgatgctcgccggtatcgataccctatggcactgctccagctttacctcgccatggggcactcagcaggctttcgatctcgctaacgtccgcgccacccgtcgtctgggcgaatggtcagtggcatggggagtgcgcaatttcgtccatatctcttcgccatcgctctattttgattatcaccatcatcgtgatatccaggaagatttccgtccacaccgcttcgccaacgagtttgcccgcagcaaggcggccagcgaggaggtgatcaacctgctggcgcaggctaacccgcatacccgttttaccattctgcggccgcagagcctgtttgggccgcacgacaaagtctttatcccccggctggcgcaaatgatgcagcattatggcagcgtcctgctcccgcgcggcggcagcgcgctggtcgacatgacctattatgaaaacgccgtacatgcgatgtggctggcgagccagccggcctgcgatcatcttccctccgcccgcgcgtggaatatcagcaacggcgaaccgcgcaccttgcggagcatcgtgcagaaattgatcgacgagctcggcatcaaatgccggatccgctcggttccctatccgatgctggatattatcgcccgcagcatggagcgctttggcgataaaaccgccaaagaacccgcgtttacccactacggcgtctccaagcttaactttgattttacgctcgatatcacccgcgcgcaggacgagctgggctatcagccggtggtgacgcttgacgacggcatcgtgcgcaccgccgcctggcttcgcgaccacggtaaactacaccgctaa

SEQ ID NO: 137896 - DNA, 888 bp, Enterobacter cloacae
atggacgtaatcaatggtcttattaacccggagacgctgccgggcaagggagaagggatgaaacggatgatgcggatcgtgctgctggcgctgctgctgaccggctgcgctggggaaaagggcattatcgatcgcgacggataccagctggacacccgtcatccggcgcaggctgcctatccgcgaataaaggtgttagtgatccactatacggctgacaattttgatgtctcgctggccacgttgaccgataaagaggtcagctcccactatttaattcctgaacagcccccgcgttatcagcataaaccgcggatctggcagctggtgccggaagaggatttagcctggcacgccggggtaagctattggcgcggcagtacgcgcattaacgatacctccattggcattgagctggagaaccgcggctggcagaagacggcgggcgtcaaaagttttaccccctttcatccggaacagattgcggctctgatcccgctggcgcgcgatatcatcgcccgctaccacatcgcgccgcagaatgtggtcgcccatgcggatatcgccccgcagcgcaaagacgatccggggccgttattcccctggcaacagctggcgcagcaggggatcggcgcctggcctgacgagcagcgggtggccttttatctcaacgggcggccggccagcgagccagtggaccccgaaatcgtactggatttgctctcgcgctatggctatcaggtgacgccggagatgacccccgcgcagaagaagcgggtgattatcgccttccagatgcacttccgtccgcagcgctgggatggggtagcggatgcgcaaaccgaagcgatagccgaggcgctgttagaaaaatatggccagggttag

SEQ ID NO: 137897 - DNA, 1140 bp, Enterobacter cloacae
atgttaacaaataagcgagagcgcgcccggcagcagcgagccgcgttgtgggccaccagagataatgtccagcgccatgcgctgtccatgagtatgccctggctcgcctttgtcaatatcgcttttgcgttaatgattttcttccgcaattttatctttacctattttgataagaggctactgacgcaccgggcggttattccttatatcgaagcggcgttgattgcggttattatcatttcggccattttagtgattattgccgtcacgccgcgactggcgcagggacgatatacgttgaatatcatcaccgggctgctgctggcgctcagtctgtgctggtccctgagtaattattgttttatttttttctggaccttgccctttgcctggccgctgctggtgatattaatgactaccggcctcaccgcgctgtatcaccattggcccggcattaccgcttttatgctgccgctatgggtgaccgccttgctggcgggaatacagctccactatcacaccgagatccgctttttgatcctctgggccatttttaccgcgattttgctgtatggccgacgtattttgcagcgctggtatgacgaagcctgggatacccaccaggagaatatgcagcttattcagcggctggaaagtatcgccaaccaggatgccttaaccggaaccgctaaccgtcgggcgctcaatgcttacctggcggcgatctggcagcaaaaaacgccgctggcgctgatgatgatcgatgtcgattattttaagcgctataacgatcgctatggccatcaggctggtgatgaatgcttatcttctgtcgcgcaggtgcttaaaatggcggtccgggctgagggcgatctggtggctcgctacggcggcgaagagtttgtcgtcgtgttgcccggggtgtccttagcgcatgccaccgctattgccgagcgcattcagcagaagatccgcgaggcaggcctaccgcacgccgcttcggcggtggcgtcggaggtcaccgtgagtatcgggatcgtcgcctccgatggcacggtcccgatagagacgctgatcgcccgggcggacagtgcgctgtatcaggcgaaaaataatggacgtaatcaatggtcttattaa

SEQ ID NO: 137898 - DNA, 165 bp, Enterobacter cloacae
atgacgccccccttgttcatttgtttttttaatcagctcttcacgggcatcgttggatgcggtttgaccagtagaggaaatggcgccgattttggtatattgcgtatggactttattaaaagctgttttgttaaaatttctgcggagacggcattggccgcttaa

SEQ ID NO: 137899 - DNA, 516 bp, Enterobacter cloacae
atgcgctacaaactttttgctgtacttctcccttgcgcgctggcgctcagcgcctgtacgaccgtcaccccggcctataaagataatggcacccgcagcggcccctgcgtcgaaggcggccctgacgacgtagcgcaaaaattctacgacacccagatccagaatcgtactcaggatccggcggcgctgcgcccctatctgagcgacggcctggcgcagttactcaatgacgcccgccaggatcccgccaacagcaaattactgcaggctaatccgttctccagcagcagcaccccgacagacagcgccgtggtcgccagcgcctccaccatcccgaaccgcgatgcgcgcaatattccgctgcgcgtcgatctgaaacagggcacccagagctggaaagatgaagtgctgatgatccaggaaggccagtgctgggccgtcgatgacgttcgctatctcggcaacaacagccatgcgccagccgggacgctgcgacagagtctggagaaacgctga

SEQ ID NO: 137900 - DNA, 729 bp, Enterobacter cloacae
atgagtattaaactaaacggcattaattgcttctacggcgcgcaccaggcgctgttcgacatcacgctggattgcccgcagggggaaacgctggtgctgctcggccccagcggtgccgggaagagctcgctgctgcgcgtactcaacctgctggagatgccgcggtccggttcgttatccatcgccggcaaccaattcgacttcaccagagcgccgtccgataaagcgattcgcgagctgcgtcagaacgtcggcatggtctttcagcaatacaacctgtggccgcacctgacggtacagcagaacctgatcgaggccccctgtcgcgtactggggttaagcaaggatcaggcgctggctcgcgcagagaagctgctggagcgcctgcgtctgaagccgtacagcgatcgttacccgctgcatttatccggcggccaacaacagcgggtggctatcgcccgcgcgctgatgatggagccgcaggttctgctgttcgatgagcctaccgcggcgctcgacccggaaatcactgcccagatcgtcagcatcatccgcgagctggctgaaaccggcattacccaggttatcgtcacccacgaagttgaagtggcgcgcaagacggccagccgggtggtgtatatggaaaatggccatatcgtcgagcaaggggatgcctcctgcttcacgcatccgcaaactgacgcgtttaaaaactatctttcacattga

SEQ ID NO: 137901 - DNA, 753 bp, Enterobacter cloacae
atgtttttcggggaaatgacgatgaaaaaagtactgattgccgccctgctcgcaggcatgagcctctccgcttccgccgcgcagaccattcgtttcgccaccgaggcctcttatcctccgtttgagctggtggacgccaacaaccagatcgtcggtttcgatgtcgatctggcgaacgcgttgtgtaaagagatcgacgccacctgtaccttcaccaaccaggcctttgacagcctgatcccgggactgaaattccgccgtttcgacgcggtcatggccgggatggacatcacgccggagcgtgaaaagcaggtgctgttctctaccccgtattatgacaactcggcgctgttcgtcggccagcagggtaagttcaccagcattgaccagctgaagggcaaaaaagtgggcgtgcagaacggcaccacccaccagaaattcatcaccgataaacatccggaaatcactaccgtgccttacgacagctaccagaatgcgaagctggacctgcagaacggtcgtatcgacgcggtctttggcgacaccgccgtggtgaccgaatggctgaagagcaatccgaaactggcggccgtgggcgataaagtgaccgacaaagcctatttcggcaccgggctgggcattgccgtacgtcagggcaacaccgacctgcagcagaaatttaacgctgcgctggaaaaagtgaagaaagacggcacttaccagaccatctataacaaatggttccagaagtaa

SEQ ID NO: 137902 - DNA, 717 bp, Enterobacter cloacae
atgaacgaaatttttccattagcaagcgccgccgggatgaccgtcggccttgccgtttgcgcgctcgtcatcggcctggtcctggcgatgctctttgcggtactggagtcagtgaaatggcgcccggtagcctggcttgcaaccggcatagtgaccatcctgcgcgggctaccggaaattctggtggtgctgtttatctatttcggctcttcccagctgctgctgacgctctctgacggtttcaccatcccgctcgggttcacgcagatcccggtgcagatgcagattgagaactttgacgtcagcccgttcctctgcggggcgatcgccctgtcgctgctgtatgccgcttacgcctcgcaaacgctgcgcggcgcgctgaaagcggttccgcagggccagtgggagtccggccaggcgctggggctgtcgaaagcggccatattcttccgtctggtgatgccgcagatgtggcgccatgccctgcccggcctcggtaaccagtggctggtgctgctgaaggacaccgcgctggtgagcctgatcagcgtcaacgatctgatgctgcagaccaaaagcatcgccacccgcactcaggaaccctttaactggtatatcattgcggcggcaatctatctcgtcatcaccctgttgagtcaatacatccttaagcggattgaccagcgtgcgacgcgcttcgaacggagaccaggctga

SEQ ID NO: 137903 - DNA, 669 bp, Enterobacter cloacae
atgctcgactatttacccgaactgctgaaaggactgcataccagcctgacgctgaccgtggcgtcgattatcgtggcgctgatcctgtcgctgatcttcaccattatcctgaccctgaagacgccggggctggtatggatagtgcgcggctatatcaccttgtttaccggtacgccgctgctggtgcagatcttcctgatctactacggcccgggacagtttccttcgctgcaggagtatccgtggctgtggcatcttatctccgagccgtggctgtgcgccctgatcgctctgtcgctcaacagcgccgcctacaccactcagctgttttatggcgccatccgggcgatccccgacgggcaatggcagtcctgcagcgcgctggggatgagtaaaaaggatactctggcgatcctgctgccgtacgcctttaagcgtgcgctatcgtcctattccaacgaagtggtgctggttttcaagagtacctctctggcctacaccatcacgctgatggaagtgatgggccacggccagctgctgtatggacgcacctacgacgtgatggtgttcggcgccgccgggattatctatctcatcgttaatggactgctgacgctgctgatgcgcctggtggaacgcaaagcgctggccttcgagcgacgtagctag

SEQ ID NO: 137904 - DNA, 732 bp, Enterobacter cloacae
atgaaaaagttagttctggctgcactgctcacctctttcgcgttcggcgccgctgccgcggaaaaaatcagctttggcgtctccgcaacctatccgccgtttgaatcgatggacgctaataaccagattgtcggctttgatatcgatctggcccacgcgctgtgcaaacaaatgcaggcagaatgtacctttaccaaccacgcgtttgacagcttgatcccggcgctgaagttcaagaaatatgatgcggtgatttccggaatggatattacgccggagcggagcaagcaggtggccttcaccgacccgtactacgccaactcggcgctggtgatcgccaaaaaagatgcgttccattctttcgatgacctgaaaggcaaacggatcggcatggaaaacggcaccacccaccagaaatatctgcaggataagcatcctgaggtgaagaccgtcgcctatgacagctaccagaatgcgattatcgatttgaaaaatggccgtatcgacggcgtgttcggcgacaccgcggtggtcaacgaatggctgaaaactaacccgcagctgggggcagccacgccgaaagtgaccgacccgcaatacttcggcaccggactcggcattgccgtgcgcccggataacaaggcgctgctggagaaactgaacgccgcgctgaaagcgattaaggccgacggtacctaccagaaaattagcaaccagtggttcccggactaa

SEQ ID NO: 137905 - DNA, 660 bp, Enterobacter cloacae
atggtcattgtcgatacgcagatcgttgccggcgcgccggcccgcctgctggccgccgggattggcgatgcgctggctacctggttcgaagcccgcgcctgctcccgtagcggcgccaccaccatggcgggcgggaagtgcacccaggcggcgctggcgctggccgagctatgctacaacaccttactcgaagagggtgaaaaagcgatgctggccgccgaacagcacgtggtcaccccggcgctggagcgggtggtggaagccaacacctatctgagcggcgtgggtttcgaaagcggtggtctcgcggcggcgcacgcgattcataacggcatgacggccatccctgacgcccatcactattatcacggggaaaaagtggcgttcggaaccctgacgcagctggtgctggaaaatgcgccggtggacgaaatagagaccgtcgccgcgctgtgccacagcgttgggctgccgatcaccctggcgcagctggatatcaaaggtgatatcccgaccaaaatgcgtctggtggcggaagccgcctgcgctgaaggcgaaaccattcacaatatgccgggcggcgttgattccgaccaggtctacgccgcgctgctggtggccgaccagtatggtcagcgcttcctgcaggaatgggaataa

SEQ ID NO: 137906 - DNA, 882 bp, Enterobacter cloacae
atggcaaggaagagcgatccactggcgtttggcggtttggcgttattaacgctgatctggagctttagctggatcgcgatgaagcaagtgacgagctatatcggcgcttttgacttcacggcgctgcgctgtatttttggcgccgtggtgctatggatagtgatgttgatccgcggtaaagcgctcaagccgacgcctttcggctacaccctggcgatcgcgttattgcaaacctgcggcatggtcggtctggcacagtgggcgctaatgagcggtggcgccggtaaagtggcgatcctgagttataccatgccattctgggtagtggtgatggccgcgttattcttaggtgagcgcatgcggcgatggcagtatatcgccatcggggtggcatgcgtgggcctgatactcgtacttcagccttggcaactcgactttacttccctgaaaagcgccttgctggcgatcctctccggcgtgagctggggggcaggtgcgatcgtcgcgaagcgtatgtatacccggtatccgcaggttgatttgctggcgctaacgacatggcagatgctatatgccgccgtagtaatgagcgtagtggcctggctcgtcccgcaacgggcggtagactggcagcccgacgttttctgggccctggcttacagcgcaatccttgcaacggcgctggcctggagtctgtggctttttgtactgcgtaatttaccggcaagtatagccggtctgagtacgctggccgtaccggtctgtggcgtgctattttcctggtggctactacatgaaaatccaggaaaggtggaaggttgtggcattgcgttgatagtactggcgttggcgatgatcagtatcaagagacgaggggcatag

SEQ ID NO: 137907 - DNA, 888 bp, Enterobacter cloacae
atgagcttttttcacgccaatcagcgggaagccctgaatcagagcctggcggaagtccagggccagattaatgtgtcttttgaattctttccgccgcgcaccagtgaaatggagcaaaccctgtggaaatccatcgatcgcctgagcagtctgaaaccgaagtttgtttcggtaacctatggcgcgaactctggcgagcgcgatcgcacccacagcatcatcaaaggcattaaagagcgaaccggtctggaagcagcgccgcacctgacctgtatcgatgccagccgcgatgagttgcgcactatcgctcaggattactggaacaacggtatccgccatatcgtcgccctgcgcggcgacctgccgccgggcagcggtaaaccggatatgtacgccgccgatctggtgacgttgctgaaagaggtaggcgattttgatatctctgtcgccgcgtatccggaagtgcatccggaggcgaaaagcgcgcaggcggatttactgaacctgaaacgcaaagtagaagcaggggccaaccgcgcgatcacccagttcttcttcgatgtggaaagctacctgcgttttcgcgatcgctgcgtctcggcaggcatcgacgtggaaatcattcccggtatcctgccggtttccaactttaaacaggcgaaaaagtttgcggatatgaccaacgtccgtatcccggtgtggatgtcaaaaatgttcgaagggctggataacgacgccgaaacccgtcaactggtgggggcgaatatcgccatggacatggtgaagatcttaagccgggaaggggtcaaggatttccacttctacaccctgaaccgcgccgagatgagctacgccatctgccatacgctgggcgtacgcccggcctga

SEQ ID NO: 137908 - DNA, 687 bp, Enterobacter cloacae
atgattcaacctctgctggtgctccaggaacgcacgctggcggcattgagtgagctcgccgcccactcgccgcaggctctacgtctgggcgtgacgacggccttcgaacagggcattttcgccgccgttgaggctgcgctgagcgaacatacccgcgcgttgcatatcacccgccacgcctcaccggcgctggttcagcaggtacgcaaaggcaaactcgatgcggcgctggtcgcgttgccgctcaatactgaagggctgcacctgcacccattgccgtatcatgagccgctcatggcggcattacctgcctcctggccggaagccgccaggccagggctgacgttaagcgcgctcaatcatcggccgctgttctggtttaaacgcgagcgtaatcctggtttctttgactacacgcgccgcattttcgaccgggctggctatgccccgacgtatgtggaagagccggccgagcatgatgtgctgctggcgcgtattgcgcgcggggaaggcatgatcctgctgccggcgtccttttccgcgattcagcgtcagggggtggcgttctgcccggtggctgagggcgacgcgatgccgttaagccttggggtgatttatccgcctcaccaggcagagtccgtgcagcaatggctttctctgctggatggcattctggcgactggctag

SEQ ID NO: 137909 - DNA, 372 bp, Enterobacter cloacae
atgtctagcgaacgttacatcatcggtcaggaaatgcttcagcgggtggatggtaagggcggggaagccgtcgtcgacagcctgcgggatatcgcccccgatttcgcccgctatctgattgagttccccttcggcgatatttacgccaggccagggctcgatttacgcagccgggaaatcgccaccatcgccgcgctcacggcgttgggtaacgccgagccacagctgaaagtacacattgccgcgggattaaacgtcggcctgacgcaagaggagattacggaagcgatcatgcagatggcagtctatgccggattcccggcggccctcaacggcctgtttgccgccagggcggtatttgcggcccactga

SEQ ID NO: 137910 - DNA, 1557 bp, Enterobacter cloacae
atgaaactaaaagcaatgagcgcagcacttctgttgactttgcctttctgggcctgcgccaaagatgtcaccataatttataccaacgatcttcatgcccatgtcgaaccttataaagtgccatggatagcggatggtaaacgagatattggtggttgggcgaatatcacgacgatggtgaaacaggaaaaagcgaaaaataacgcgacctggttttttgatgccggggattattttaccgggccttacatcagtagcctgacgaagggcaaagcgataatcgatattatgaatacgatgtcctacgatgcggtgactatcggtaatcatgagttcgatcacggctgggataatacgctgcttcagcttagccaggcgacattcccgattgttcagggcaatattttttatcagaacagcgataaatcgttctgggataagccctataccattatcgaaaaagatggcgtgaaaattggcgtgattggcctgcacggcgtgtttgcttttaatgacaccgtttctgccgcgacgcgagtgggtatcgaagcgcgcgatgaggtgaaatggctacagcattatatcgatgaacttaacggtaaagtggatctgaccgtggccctgatccatgaaggcgtcccggcgcgtcagtcgagccaggggggaaccgatgtgcgtcgtgcgctggataaagatattcagactgcgggtcaggtgaaaggcctggacgttttaattaccggccatgctcacgttggcacaccggagcccattaaagtgggtaatacgttgattctttctaccgatagcggcggcatcgatgtgggtaaactggtgctggattatcaggagaaaccgcaccaattcacggtgaagcactttgagctgaagacgctttatgccgatgagtggaagcctgatccgcagacaaaacaggtcatcgacggctggaataagcaacttgatcaactggtgcagcaggttgtcacgcaatcaccagtcgaactgacccgcgcttatggcgtctcttcgccgctgggcaatcttgccgctgacgccttgctgctggcagcaggtaggagtacgcagctggcgttaaccaactcgggcgggatccgtaatgaaatccccgccggagcggtaagcatgggggccgttatcagcaccttcccgtttcccaacgagctggtcaccatggatctaaccgggaagcagttgcgtagcctgatggagcatggcgccgggttgagcaacggcgtgctgcaggtctcccggggactggaaatgaagtatgacagcagcaaacctgtgggccagcgcgttgtgttattcaggctaaacggtaaaccgattgacgatacgacggtttaccatattgccaccaacagcttccttgcagatggcggcgatggttttgtcgcgtttaccgaggggcaggcgcgtaatacctccggcggctattacgtttcaaatgcggtcgtagactatttcaaagccgggcaaaagataacggatgagcagcttaacgggcagcgcgttgtcgatgtgaagaaataa

SEQ ID NO: 137911 - DNA, 1137 bp, Enterobacter cloacae
gtggatactctctttaccattaatgcctgtaaaacttttggctgccgcaatttaggtttaccgtctgcggctgagtatcatttcccgaattttcggctgggctacccggcgctctactgcgcagcctgcggcagctatccccccctgtttaacgaacgggaattccgcccctggctggcggcttatctgacggatcatgcccgccgctacggctatttttgcccggtatgctatcagcgggatattattcgctacggccgcaatccgcagggtacgcaacgccttcagtgccgccactgtaaaaaggtctggacgccaaaattcccacacatcgtcccaattgaagccccacgacgtatttgcagcgtaccgttgatagcgccattccagggtaatgccgccgggcaaaagctctattttttattaagctttgatgccgtgcgcggtaatgttattcatcttacctctaatttcactcctttcgcggtaggcgaatcattacgctatcactggcgcggcggacaagccgacagggaggagactaacgatattattcaacgtatttctctcactgaaatgcgctttttacaacgcagtcagttcgatgaaatccagtacggcagcgcaatgcaaaagcgccatgcccgcggcaatatattgcgcccggttatcgccgcgcacggtcatttcaaactgctcagccagcggtttccagaggtgaaaacgcacgttattgcgcatgaatgctttttacgcggcgcggcgatcgttgcctgggcgccgctttttcgtcagcggcaaggcgatctatggtatgtggaagaagagataaggaacccagccagcccggctccgtggcagctacaggggaaaacccatcatggctggtggcaaaattcatggcagcgttggacgcaggaagagaatcagaaaatggtctgccggcttgccggcactgcagaagagaacgcctttctaccagaccttgcggccagccgacggtttacaatatggctgaaaaacagacccgcgtttgcgcagagcgccctgtattccgcagggcgcgtaacgcaaatagtggcctcactggttcaagagtataacgcgacgcttacagcagctgcgccaggcggttaa

SEQ ID NO: 137912 - DNA, 1248 bp, Enterobacter cloacae
atggtgggcgcgggagtcacccgtaacccgctgcactgccaccgtttctggcagcagctcaaagggcagccggtggagttcacctggcagtctgaagaggggatcagcctggtggcggtgctacgcgccgggccgacggaaagcctgatccaggggctgcatcagtccttgtttcgcgccgaaaagcgtattggcctgatgctgttcggcaaagggaacattggttcccgctggctggagcttttcgcccgtgaacaaactacgctctcggcgcgtaccggtttcgagtttattctcgccggcgtagtcgacagtaaacgcagcctgctgaattacgacgggctggatgccagccgggcgctggctttcttcaacgatgaagcggtggagcaggatgaagagtcgctgttcctgtggatgcgcgcgcacccgtatgatgatttagtggtgctggacgtcaccgccagcgaacagctggccgaccagtatcttgatttcgccagccatggcttccacgtcattagcgccaacaagctggcgggcgccagcagcagtaataaatatcgtcagatccacgacgcgtttgagaagacggggcgccactggctatataacgccaccgtgggcgccggcttgccggtgaaccatacggtgcgcgacctgatcgacagcggcgatactattctcggcctgagcggtatcttctcgggaacgctctcctggctgttcctgcagttcgatggcaccgtgccgttcaccgacctggtggatcaggcgtggcagcaggggctgaccgagccggatccgcgcgtcgatctgtccggtaaggatgtgatgcgtaagctggtgatcctcgcgcgggaagcgggctatgacatcgaaccggatcaggtgcgtgtggaatcactggtgccggcgcactgtgaagaggggtcggtcgatcacttctttgagaatggcgaagagctgaacgagcagatgctgcagcgtctggaagcggcccgcgagatgggactggtgctccgctacgtggcgcgctttgatgccaacggcaaagcacgcgtcggtgtggaagcggtacgcgaagagcacccgctggcggcgctgctgccgtgcgataacgtgtttgccatcgaaagccgctggtatcgcgataacccgctggtgatccgcgggcccggcgccgggcgtgatgtgaccgccggggcgatccagtcggatattaaccgcctggcgcagctgctgtaa

SEQ ID NO: 137913 - DNA, 1260 bp, Enterobacter cloacae
  misc_feature (1214)..(1223): n is a, c, g, or t
atgagtgtgattgcgcaggcaggggcgaagggtcgtcagctgcacaaatttggtgggagtagtttagcggatgcgaaatgttacctgcgcgtcgcggggatcatgaaggagtattcgcaggcgggggatatgatggtcgtctccgccgctggcagcaccaccaaccagctgatcagctggcttaagcttagccagagcgatcgccttgctgcgcatcaggttcagcagtcgcttcgccgctatcacaccgagctgattggcggtctgctggagcctgcggcggcggatacgttgatagccgcctttatccacgaccttgagcgtctggctggtctgctggacggcggggtttccgaagcggtctatgcggaagtggtcggccatggggaagtgtggtccgcgcgcctgatggcggcggtcctcaatcagctgggtatggaagccgcctggctggacgcgcgcgcgttcctgcgcgcggaacgcgccgcgcagccgcaggtggatgaaggattatcctatccgctgctgcagcagctgatggcgcagcatcctaacaaacgtctggtggtgaccggctttatctcccgcaaccaggccggcgaaaccgtcctgctgggccgtaacgggtctgactactctgccacccagatcggcgcgctggcgggcgcctcccgggtcactatctggagcgacgttgccggggtgtacagcgcggatccgcgcaaggtgaaagacgcctgcctgctgccgctgctgcgtctggacgaagccagcgagctggcgcgcctggccgcgccggtgctccatgcccgcacgctacagccggtttccgccagtgatatcgatctgcagttacgctgcagctacacgccggaacagggttccacgcgcattgagcgcgtgctggcctccggtaccggcgcacggattgtcaccagccatgacgacgtctgcctggtggagttccaggtgccggccggtcacgatttcaaactggcgcataaagagctggacgctctgctcaaacgcgcccagctgcgcccgttagccgttggcgtccatgccgaccgtaagctgctgcagttctgctatacctccgaggtggccgacagcgcgctgaaattgctcgatgaagccggtctgccgggcgagctgcgtctgcgtcagaagctggcgctggtggcgatggtgggcgcgggagtcacccgtaaccnnnnnnnnnncgctggtggcgatggtgggcgcgggagtcacccgtaa

SEQ ID NO: 137914 - DNA, 1161 bp, Enterobacter cloacae
atgacgcgtaaacaggccaccatcgcagtgcgtagcggtttaaatgacgacgagcagtacggttgcgttgtcccgccgattcacctctccagtacctataacttcaccggctttaatgaaccgcgcgcccacgactactcccgtcgtggcaatccgacgcgcgatgtggtgcagcgcgccttagcggagctggagggcggcgccggcgcggtgctgaccaataccggaatgtcggcgatcctgctggtgacgacagtgttccttaaaccgggcgatctgctggtggcgccgcacgactgctacggcggcagctaccgtctgttcgacagcctggcgaagcgcggctgctatcgcgtccagtttgtcgatcaaagcgatgagcaggcgttgcgggcggcgctggcggaaaaaccgaagctggtgttggtggaaagcccaagtaatccattgctgcgggtggtggatattgcgaaaatctgtggtctggcgcgtgaggccggggcaattagcgtggtggacaacaccttcctgagcccggcgttgcaaaacccgctggcgctgggcgccgatctggtgctgcattcctgtaccaaatacctcaatggtcactccgatgtggtggccggggtggtgattgccaaagatccggcaactgtcaccgaactggcatggtgggcgaataatattggcgtcaccggcagcgccttcgacagctatctgctgttgcgcgggctgcggacgctgtctccacggatggaagtggcgcagcgaaatgccctggcgatcgttgagtatctgaaaacccagccgctggtgaaaaagctgtatcatccatcgctgccggaaaaccaggggcatgaaattgcggcgcgtcagcaaaaaggttttggcgcaatgttaagcttcgagcttgacggtgacgagcagacgctgcgccgttttctgagcgggctgtcgctgtttacactggcggaatcgctggggggcgttgaaagcctgatttcccatgcggcaacgatgacgcatgccggcatggcgcctgaagcgcgtgccgccgccggaatttcagaaacgctcctgcgtatatcgaccggtattgaagatggtgaagatttaattgccgacctggaaaatggcttccgggcagcaaacgaggaataa

SEQ ID NO: 137915 - DNA, 318 bp, Enterobacter cloacae
atggctgaatggagcggcgaatatatcagcccatacgctgagcacggtaagaagagtgaacaagtaaagaaaattacggtttccattcctctgaaggtgttaaaaatcctcaccgatgaacgcacgcgtcgtcaggtgaataacctgcgtcacgcgaccaacagcgagctgctgtgcgaagcgtttctgcatgcctttaccggacaaccgttgcctaacgatgaagacctgcgtaaagagcgcagcgatgagatcccggaagcggcgaaagcgattatgcgtgaactgggaatcgacccggatacgtgggaatactga

SEQ ID NO: 137916 - DNA, 213 bp, Enterobacter cloacae
atgaaaaaaggtattcacccaaattacgacgaaattactgctacctgttcttgcggtaatgtcatgaaaatccgctccaccgttggtcacgacctgaacctcgacgtgtgcggcaaatgccacccgttcttcaccggcaaacagcgtgatgttgctaccggtggccgtgttgaccgcttcaacaagcgcttcagcatcccgggcagcaagtaa

SEQ ID NO: 137917 - DNA, 822 bp, Enterobacter cloacae
gtggatacggaattgctcaagactttcctggaagtgagtagaactcgtcactttgggcgagcagcagaggcgctttacctgacacagtcagcagtcagctttcgtattcgtcagctggaaaatcaacttggtgtgaatctgttcacccgtcatcgtaataacatccgcctgacgaccgccggcgaaaagctcctcccctatgccgaaacgctcatgaatacctggcaggctgcgcgcaaggaggtggcacactcttcgcgacataatgaattctccattggggccagcgcctccctgtgggaatgtatgcttaacagctggctcggtaccctctacagcgcaccttacaatctccagtttgaagcccgtatcgcgcagcggcagtcgttggttaaacagcttcacgaacgccagttggatctgctgatcaccaccgaatcgccgaagatggatgaattaagcagccagctgttgggtaattttactcttgccctgtattgcgcatcgcctgcaaaaaacagaaatgaattgaattacttgcgccttgaatgggggcctgattttcagcaaaacgaagtgggactgataggaagcgatgatgttccgctgctcactacctcttcagctgaactgatctatcagcaattatcgcgcctgaacggctgctgttggctacctgctcgctgggcgaaagagaagcatgggttacatacggtcatggacagcgctacgttatcccgtccactttatgcgatctggttacaaaatagcgataagcaggcgcagatccatgagatcctgaaaaaccctattctggaataa

SEQ ID NO: 137918 - DNA, 339 bp, Enterobacter cloacae
atggcggaaagctttacgacgactaatcgttttttcgacaataaaaattatccacgcgggttctcccgtcacggtgatttcaccatcaaagaggcgcaactgctggaacgtcatggttatgcctttaacgaactggaactgggtaagcgcgaacctgttaccgaagatgaaaaacaatttgtctcggtgtgccgtggtgaacgtgagccggtgacggaagcagaacgcgtatggattaagtatatggcgcgtatcaagcggccgaagcgtttccatactctgtccggcggcaaaccgcagatggaaggcgctgacgattacaccgaaagcgatgactaa

SEQ ID NO: 137919 - DNA, 1521 bp, Enterobacter cloacae
atgtcgctcgctatcgtctatactcgcgcggcgctcggtatcgaagcgccattgattaccgttgaggttcatctcagcaacggtcttcctggtctaactatggtcgggctgccggaaaccaccgtgaaagaggcccgcgaccgggtccgcagcgccctgatcaacagcggctacgcttttcctgcgaagaagataaccattaacctggcgccagcggatctgcccaaagaaggcggacgatacgatctgcccatcgctctcgcgcttctcgttgcctcagagcagctcaacacgacgcgactgaatcaatatgagtttgtgggcgaactcgcccttacaggtgggttacgaggcgtaccaggggcaatccccagcgcaatggaggccatcaaagccggccggcgcattgtcgtctcctctgacaatgcggcggaggtcggcctgatcggcggcagcgattgtctggtcgccgaccatctgcaggaggtttgcgcatttcttgcggggcagacatcgctttcgccgcctctcgccgaggcgcctgctcgggatgaacgctacgaagatctgctcgatgttatcggccagcagcagggcaaacgagcgctggagattgtggccgccggtggtcacaacctgctcctgataggcccgcccgggaccgggaaaaccatgctagccagccgactccccggtctcctgccgccattaagcaatcaggaagcactggagagcgcggccatacagagtctggtcaacctccacaccgcaaagacgcggtggcgtcagaggccgttccgcgccccccaccatagcgcctcgctggcagcgatggtgggcggcggctcgataccggtccccggtgagatttccctggcccataatggcgtgctgtttcttgatgaactgccggagtttgagcggcgggtactggatgcgctacgcgaacccattgagtcaggcaagatccacatatcacgctcgcgcgccaaaattgactatccggcgcgctttcagcttattgcagcgatgaatccaagcccgacaggacattatcagggtaaacataatcgtgcatcgccggagcagacattgcgctaccttggacgcctgtcaggccccttcctcgaccgcttcgatctttccttagagatcccattgccaccgccaggaatactgagtcagggctcgcagggcgaagaatcgagcgcaacggtccggcagcgggtgctggcggcgcgtgaacgacaaatgctcaggcaaaataaactcaatgcccatcttgagaatcgtgaaatgaagaactgctgtcgcttaaggcgggaggatgctgtctggctggaacagacgctaacgcagctggggctttctattcgcgcctggcagcgtctgttaaaggttgcgagaaccattgccgatctggcagaggttgaagagattgaacgctgtcatttgcaggaggcgctcagctatcgggcaattgatcggatgctcaaccatctgcagaaaatgatggcgtaa

SEQ ID NO: 137920 - DNA, 1647 bp, Enterobacter cloacae
atgaatggcgcgcagtgggtggtacatgctttgcggacacagggagtcgacacagtttttggctatccgggtggcgcaattatgccggtttacgatgcactgtatgacggcggcgtggagcacctgctgtgccggcatgagcaaggggcagccatggcggccattggttatgcgcgagcaaccggtaaaaccggggtgtgtatcgcgacgtccggcccgggcgcgaccaatctgatcaccggcctggcggacgccctgcttgactctattcccatcgtagctatcaccggccaggtggccgcacccttcatcggcacggatgcgttccaggaagtagacgttctcggtttgtcactggcctgtactaagcacagtttccttgtgcagtctctggacgaactgccgcgggttattgctgaggctttccaggtggcaaactcaggccgtccaggtccggtgctggttgatatccctaaggatattcagatggcgcagggcgacctcgatccccatttctctaccgtcgccgatgagatggcatttccgcaggcggaagtggcgcaggctctgcagatgctggcccaatcgcagcaaccgatgctgtatgttggcggcggggtcggcatggcgcaggcggtaccggctttgcgcgaattccttgcggtgaccaggatgccggcaacctgcaccctgaaagggctgggcgtggtggatgctgattatccctattatctcggcatgctgggaatgcacggcactaaggcggccaacctggcggtacaggagtgcgatctgctgatcgccgtcggcgcgcgctttgacgatcgcgtaaccggtaagctcaataccttcgcaccgcatgccaaagtgatccacatggacatcgatccggcggagctgaacaagctgcgtcaggcgcatatcggtctgacaggcgatctgaactgcctgctgccggcgctgcagcagccgttagctatcgatggctggcgcgagcggagtgccgcactgcgtgccgagcatgcctggcgttacgatcatcccggtgaggcaatctacgcgccgctgctgctgaagcagctttccgaccgcaagccggcggacagcgtggtgaccaccgacgttggccagcaccagatgtggtcggctcagcatatgacctatacccgcccggaaaactttatcacctccagcggcttaggcaccatgggctttggcctgccggccgccgttggcgcccaggtggcgcgccctaacgatacggtgatctgtatctccggtgacggctccttcatgatgaatgtacaggagctgggcaccgttaaacgcaagcagttaccgctgaagatcgtgttactcgacaaccagcggttagggatggttcgacaatggcagcagctgtttttccaggaacgttatagcgaaaccactctgactgataaccctgatttcctcacgctggccagcgccttcggtattcctggccaacacatcacccgtaaagaccaggttgaagcggcactcgacaccatgctttcgagccaggggccatacctgcttcatgtctcaatcgacgaacttgagaatgtctggccgttggtgccgcccggcgccagtaactctgaaatgctggagaaattatcatga

SEQ ID NO: 137921 - DNA, 258 bp, Enterobacter cloacae
atgatgcaacatcaggtcgctttacaggcacgtttcaacccggaaaccttagagcgcgtgctgcgcgttgtccgccaccggggtttccacatctgcgcaatgaacatggaaaccgcgccggacgcacagaacataaatatcgaattgaccgttgccagcccgcggcccgtcgaattactgtttagtcaattaagcaaactggtcgacgttgcctgcgtcgagatccagcaacccacatcacaacaaatccgcgcctga

SEQ ID NO: 137922 - DNA, 930 bp, Enterobacter cloacae
atgacgacgaaaaaagctgattacatttggttcaatggcgagatggttccgtggggcgaagcgaaagttcatgtgatgtcccatgcgctgcactacggtacctcggtattcgaggggatccgttgctacgactcgcacaaaggcccggtggtgttccgtcatcgcgaacatatgcagcgtctgcatgattcagccaaaatttatcgtttcccggtctcccagagcgtcgacgaattgatggaagcctgccgcgaagtcattcgaaccaataatctgaccagcgcttatatccgtccgctggtgtttgttggcgatgtcggcatgggggtaaacccgcctccgggttacaacactgacgtgatcatcgcggcgttcccatggggagcctacctcggcgcagaagcgcttgagcaggggatcgatgcaatggtctcttcctggaaccgcgcggcgccgaacactatcccgacggcagcgaaagccggtggtaattatctttcctcgctgctggttggcagtgaagcgcgtcgccatggctatcaggaaggtatcgccctcgatgttaacggctatatctccgaaggcgcaggggaaaacctgtttgaagtgaaggatggtgtactgttcaccccgccgtttacctcttccgcgctgccgggcattacccgcgacgccattatcaagctggcgaaagatcttggtatcgaagtccgcgagcaggtgttgtcccgtgaatccctgtatctggcggatgaagtcttcatgtccggcactgcggcggaaatcaccccggtacgcagcgtggacggcatccaggtcggcgcaggccgtcgcggtccggtaaccaaacgcattcaggaagccttctttggcctcttcaccggtgaaacagaagataaatggggctggttggatccggtaagtaagtaa

SEQ ID NO: 137923 - DNA, 1851 bp, Enterobacter cloacae
atgcctaagtaccgttccgccaccaccacacatggccgcaatatggcgggcgcccgcgcgttgtggcgcgcaaccggaatgaccgatgccgatttcggcaaaccgattatcgccgtcgttaactcctttacccagtttgtccccggacacgtgcacctgcgcgatctcggcaaactggttgccgagcagattgaagccgccggtggcgtggccaaagaattcaacaccatcgcagtggatgatgggatcgctatgggccacgggggtatgctctattcactgccatcccgcgagctgatcgccgactcggtggagtatatggttaacgcccactgcgctgatgccatggtttgtatctccaactgcgacaaaatcaccccggggatgctgatggcttccctgcgtttgaatattccggtgatctttgtgtccggcggcccgatggaagccgggaagaccaagctgtcagataaaatcatcaagcttgacctggtggatgcgatgattcagggggcggatccgaaagtgtccgacgagcagagtaatcaggtggaacgctccgcctgcccgacctgcggctcctgttccgggatgttcacggcgaactccatgaactgcctgaccgaagcgctgggcctgtcacagccgggcaacggctctctgctggcgacccacgccgatcgtaaggagctgttcctaaacgccgggaaacgtattgtggagctgaccaaacgctattacgagcaggatgacgcttccgcgctgccgcgcaatatcgccagcaaggcggcctttgagaacgctatgacgctggatatcgccatgggcggctccaccaataccgttctgcacctgctggcggcggcgcaggaagctgaaatcgacttcaccatgagcgatatcgataagctctcccgcaaagtgccgcagctgtgtaaggtggcgccgagcacgcagaaataccatatggaagatgtgcatcgcgccggcggcgtgctgggcattctgggcgagctggaccgcgccgggctgctgaatcgcgaggtcaaaaacgtccttggcctgacgctgccgcagaccctggaacagtacgatgtgatggtgacccaggacgacgcggtgaaaaaaatgttccgcgccggcccggcgggcatccgtaccacccaggcgttctcgcaagactgccgctgggataccctggatgacgatcgcgccgaaggctgtatccgttctctggaacacgcttacagcaaggacggcggcctggcggtgctgtacggcaatttcgcggaaaacggttgtatcgtgaaaaccgccggcgtggacgacagcatcctgaaatttaccggtccggcgaaagtatatgagagccaggacgatgcggttgaggctatcctcggcggtaaagtcgtggaaggcgacgtcgtggtgatccgctacgaagggccgaaaggcgggccggggatgcaggagatgctttaccccaccagcttcctgaagtcgatggggctgggcaaagcgtgcgcgctgatcaccgatggccgtttctccggcggcacctcagggctctctatcggtcacgtctctccggaagcggcgagcggcggcaacattgcgctcattgaagatggcgacatgatcgcgattgatattccgaaccgcagcatccagctgcagctgagcgatgcggaaattgcggcgcgtcgtgaagcccaggaagcgcgtggcgaccaggcgtggacgccgaagaatcgccagcgtcaggtctcctttgcccttcgcgcctacgccagcctggcgaccagcgccgacaaaggcgcggtacgcgataaatccaagctgggtggctaa

SEQ ID NO: 137924 - DNA, 1545 bp, Enterobacter cloacae
atggcggattcacaacccttgtccggcgctcctgagggcgccgagtacctgcgagcagtgctgcgcgcgccggtttatgaagcggtgcagaaaacgccgctgcaaaaaatggataagctctcgtcgcggctggataacgttattctggtgaagcgtgaagatcgccagccggtacacagctttaagctgcgcggcgcttacgcgatgatgtccagcctgactgccgaacagaaatcccacggggtgatcaccgcttcggcgggcaaccatgcccagggcgtggcgttttccgcatcgcggctgggcgttaaggcgctgatcgtgatgccggtagcgaccgccgatatcaaagtcgatgccgttcgcggctttggcggcgaagtgctgctgcacggcgccaactttgacgaagcgaaggcgagagcgattgagctggcgcaacagcagggttttacctgggtgccgccgttcgatcacccaatggtcatcgccggacagggaaccctggcgctggagctgctgcagcaggatgcccatattgaccgcgtattcgtcccggtgggcggcggcggtctggcagcgggcgtggcggtgctgatcaagcagctgatgccgcagatcaaagtgatcgcggtggaggcggaagattctgcttgcctgaaggcggcgctggacgcaggccatccggtggatctgccgcgcgtcggcttgtttgccgaaggcgtggcggtcaaacgcatcggcgatgaaacgttccgtttatgccaggagtatctggacgatatcatcaccgtcgatagcgatgctatctgtgcggcgatgaaagatctgttcgaagatgtgcgggcggtggcggagccttccggcgcgctggcgctggcggggatgaaaaagtatatcgcccagcataacatccgcggcgagcgtctggctcatattctgtccggggccaacgtcaacttccacggcctgcgctacgtgtccgagcgctgcgagctcggggaacagcgcgaagcgctgctggcggtgacgatcccggaagagaaaggtagctttttgaagttttgccagctactggggggccgctcggtgacggagttcaactaccgctttgccgatgccaaagacgcctgtatttttgtcggggtacggctgagtcgtggcctggaagagcggaaagagatcctccagttactgaacgacggcggctacagcgtggtggatctctctgatgatgagatggctaagctgcatgtgcgctatatggtcggcggccggccgtcaaaagcgctgcaggagcggctgttcagcttcgagtttccggaatcgccgggggcgctgctgaaattcctgcataccctaggcacccactggaatatttcactgttccactaccgcagccacggcactgactatggtcgggtactggcggccttcgagttgggcgagcacgagccggactttgaaactcgtcttaatgagctgggctatgagtgccacgacgaaacgcataacccggcattccgctttttcctcgcgggttag

SEQ ID NO: 137925 - DNA, 891 bp, Enterobacter cloacae
gtggatttacgcgatctgaaaacctttctgcatctggcggaaagccgccattttggccgcagcgcgcgggccatgcacgtcagcccgtcgacgctttcgcgccagatccaacgcctggaagaggacctcggccagccgctgttcgtgcgagataatcgcacggtgacccttaccgaagccggggaagagttacgtacctttgcccagcaaactttattgcagtaccagcagcttcgtcacgtcatcgatcagcagggcccttcgctctccggcgagctgcacatcttctgctctgtcaccgccgcctatagccatctgccgccgatcctcgaccgctttcgcgccgcgcacccctcggtggagatcaagctctcgaccggcgacgccgccgacgctatggagaaggtcgtcaccggcgaagccgacctggcgattgccggtaagccggagactctgccagggtcggtggcgttttcgatgctggagaacctcgccgtggtgttaattgccccggcccttccctgcccggtgcgcaaccaggtgaccgtcgagcgccccgactggtcgacagtgccctttatcatggccgaccaggggccggtacgtcggcgcatcgagctgtggtttcggcggcataaaatcagcaatccgtcgatctacgccaccgtcggcgggcacgaagcgatggtgtcgatggtcgccctgggatgcggcgtggcgctgctgccggaagtggtgctggagaacagtccggagccggtacgcaacagggtgatgatcctggagcgcagcgatgagcaaacgccgtttgagctgggcgtttgcgcacaaaaaaagcggctgcatgagccgcttattgatgctttctggaaaattcttcccaaccactaa

SEQ ID NO: 137926 - DNA, 405 bp, Enterobacter cloacae
gtgctgtttgtccggcgtcaggttaaccaccaggtccgcctgcgggatcagctcttcataagtgccgactttgaagccgttttcagtcgctttacgccaggaggcgcgcttctcagcgatcgcttctttacgcagcgcataggagatatccaggccggagtcacgcatgttcagaccctggttcaggccctgcgcgccgcagccgacgatgaccacttttttaccctgaaggtagcttgcgccatcggcgaattcgtcgcgcgccataaagcggcatttgcccagctgtgccagctgctggcgcaggttcagtgtattaaagtagttagccatgtctgtaactccgtgatgttgtgtcgtgcttattgttcggttcgcttttgcgagaatgaacttactatatga

SEQ ID NO: 137927 - DNA, 429 bp, Enterobacter cloacae
gtgaacccgcagggccgctttaacccttatcgtgataacaacgagatcctgccgcaggcgatctatgacattgccgccaatattcgcgataactacggcaatattaagtggtatctcgcggaaatcggcatcgcgatggatcgacaatcagagggcgagcccggggcggacggggtgatagacgatactttccgcatccagctgatggaggagcatctggtgcagctgcatcgggcgatagccgacggcgcgaactgctttggcgtgcaccagtggacgtttatcgacaactggtcgtggatcaatgccttcaaacgacgctacggcttctggcgactggatctggagaccggcgagcgacagataaaacgcaatgcgctgtggtttgccgaactggcgaccagcaacggttttaccagcgataaatag

SEQ ID NO: 137928 - DNA, 2073 bp, Enterobacter cloacae
atgtcgtatacaccgatgagcgatctcggccagcaggggctgttcgatatcacccggcttttattacagcagcccgacctggccgcgctaagcgaaaccctgacccgtctggtgcaacagtccgcgctggccgatgaggcggccatcatcctgtggaacgcgggtaatcaccgcgcggccaggtacgcctgcgatgaggccggccatccggtaagctacgaggatgaaaccgtcctggcccacggtccggtgcgtcgcttactctcccggccggatgccctgcattgcgatcatgaaacctttgccgatacctggccgcagcttatccgcagcggactgtatcgtccgttcggttactactcgctgctgccgctggcggcggacgggcggatctttggcggttgcgaattcctccgccgtgacaaccggccgtggagcgagaaagagttccagcggctgcataccttcgcgcagatcgtcgccgtcgtcaccgaacagattcagaaccgggtcagcaataacgtcgattacgatctgctgtgccacgagcgcgacaactttcgcatcctggtggcgatcaccaacgcggtgctctcgcgactggatatcgacgagctggtcagcgaggtggcgaaagagatccatcgctacttccggatcgacgccatcagcgtggtgctgcgcagcgaccgcaaggggaagctcaacatctattccacgcattatcttgacgccagccacccggttcacgaccagagcgaggtggatgaagccggcaccctcaccgagcgcgtgttcaaaagcaaagagatgctgctgcttaatctgcacgaacatgacactctcgcgccgtatgagaaaatgctcttcgagatgtggggcaataagatccagaccctgtgcctgctgccgctgatgtccggcaataccctgctcggggtgcttaagctggcgcagtgcgacgaacaggtcttcaccaccaccaatctcaagctgctgcggcagatcgccgagcgggtgtcgatcgctatcgataacgccctcgcctaccgcgaaattcagcgcctgaaagagcggctggtggatgagaacctcgccctcaccgagcagctcaataatgttgagagcgaattcggggagattatcggccgcagcgaggcgatgaacaatgtgctcaagcaggtagagatggtggcgcagagcgacagcaccgtgctgatcctcggcgaaaccggcaccggtaaagagcttatcgcccgcgctatccacaacctcagcggacgcaacggtcggcggatggtgaagatgaactgcgccgcgatgcccgccgggctgctggagagcgatctgttcggccacgaacgcggcgcgttcaccggggccagcgcccagcgtatcggccgcttcgaactggcggacaaaagctccctgttcctcgatgaagtgggcgatatgccgctggaactgcagcccaaactgctgcgcgtcctccaggagcaggagttcgaacgtctggggagcaacaagctgattcagaccgacgttcgattgatcgccgccaccaaccgcgatctcaagcagatggttatcgacagggaattccgtagcgatctctactaccggctcaacgtgttcccgatccacctgccgccgctgcgcgaacgtcccgacgatatcccgctgctggtgaaggcgtttacctttaaaatcgcccgccgcatggggcgcaatatcgacagcattccggcggaaaccctgcgcactctgacgcgtatggagtggccgggcaacgtgcgcgagctggaaaacgttatcgaacgggcggtattgctcacccgcggcaacgtactgcagctctccctgccggagcgggatatcgtggaagccccgcggacgccggcggtcctgcctgaggaaggtgaggatgaatatcagctgatcgtccgggtgctgaaggagagcaacggcgtggtggccgggccgaaaggcgccgcccagcggctggggctcaagcgcaccacgctcctgtcacgcatgaagcggctgggtattaataaagacgaactggtgtaa

SEQ ID NO: 137929 - DNA, 1011 bp, Enterobacter cloacae
atgaaaagcgtccagttagcccacggtagcgggggacaggcaatgcagcagctgatcggcgacctgtttatgcaggccttcgccaacccctggctggcggagcaggaggatcaggcgcgcctcgatctggcggcgctcgccgcccagggggaccgcctcgccttctccaccgacagctacgtgattgacccgctgttctttcccggcggcaatatcggcaagcttgccgtctgcggtaccgccaacgatgtggcggtcagcggcgccatcccgcgctatctttcctgcggctttattctcgaagaggggctggagatggccaccctggaagcggtggtcgccagcatggccgacaccgcccgggcggcagggatcgccatcgtcaccggcgacactaaagtggtgccgcgcggcgcggcggataagctgtttattaacaccgccggcatcggctccatcccggcggacgttcactgggggacgcagcagattagcgccggtgatgtgctgctggtcagcggcacgctgggggatcatggcgccaccatccttaacctgcgcgagcagatggggctggacggcgcgctgtccagcgactgcgcggtgctgacgccgcttatccagaccctgcgcccgctgagcggagtgaaagccctgcgcgacgccacccgcggcggggttaacgcggtcgcccatgagttcgccgccgccagcggctgcggcatcgaactgcaggaggcaacgctgccggtcaacgacacggtgcgcggcgtctgcgagctgcttggtctggacgccctgaacttcgccaatgaaggcaagctggtgctcgccgtcgcccgcgacgaggcggaaaacgtgctggcgcatttgcggtctcacgcgttaggacgcgatgcggcgataatcggcgaagtggtcgcccgcccgggcgtacgttccgttgggctgtacggcgtgaagcggacgctcgatcttccccacgccgaaccgctgccgagaatttgttaa

SEQ ID NO: 137930 - DNA, 975 bp, Enterobacter cloacae
atgcgttacgtagatgaataccgcgcccccgaacaggtgatgcagctggtggcccatcttcagcagcgtgcgcgtctgctgccgcacaccgccgcgcgaccgctgcgcatcatggaggtctgcggcggccatacccatgccatttttaaattcgggctcgaccaactgttgccggagaacatcgaatttattcatggtcccggctgcccggtgtgcgtcctgccgatggggcgcatcgacgcctgcattgagattgccagccgcccgggagtgatcttctgcaccttcggcgacgccatgcgcgtgccgggtaaaaacggctcgctgcgtcaggcgcgagagcgcaacgtcgataacttctactttttctgccagcacatcaccctgctgccgaccctgcgcagcctgctggaccagccggagaacggaatcgacgcctttctcgccccgggccacgtcagtatggtgatcggcaccgaggcctacggctttatcgccagcgactatcaccgtcctttagtggtcgccggtttcgaaccgcttgatctactgcaaggcgcggtgatgctggttgagcagacaatagcgcagcgcagcgatgtggaaaatcagtaccgtcgcgtggtgccggatgagggcaacccgctggcgcaggcggcgatggccgacgtcttccgcctggatggcgacagcgaatggcgcggcctgggggtcatcagcgactccggcgtgcagcttacgccagcctatcagcgcttcgatgccgaggcgcattttcgcccggcgccgcagcgcgtgtgcgacgacccgcgcgcccgctgcggcgaggtgctgaccggccgctgtaaaccgcaccagtgcccgctcttcgccagcacctgcaatccgcaaagcgcctttggcgcgctaatggtctcctctgaaggggcctgcgccgcctggtatcaatatcgcagtcaggaaaatgaagtatga

SEQ ID NO: 137931 - DNA, 273 bp, Enterobacter cloacae
atgtgcataggcattccgggacaaatttgcgccatcgacggcgtgctggcgaaggtggaagtttgcggtattcagcgcgacgtcgacctgacgctggtcggcgccatagatgagcagggccagccgcggctcggccagtgggtgctggtgcacgtcggcttcgccatgagcgtcattaatgaagccgaagcccgcgacaccctcgaggcgctgcaaaatatgtttgacgtggagccggacgtcggcgcgctgctgtacggcgaggagcgataa

SEQ ID NO: 137932 - DNA, 846 bp, Enterobacter cloacae
  misc_feature (188)..(206): n is a, c, g, or t
atgtgtacaacatgcggctgtggcgaaggcaacctctatattgaaggagacgaacgaaacccgcattccgcgttccgcagcgcccccttcgcgcccgccccacgccagacgatgaccatcaccggtgtcaaaatcgaccacttcgcccccacccgcacgccagagggcgacctgcattacggccacgnnnnnnnnnnnnnnnnnnnggaagtggagatcgacgtgctggataaaaacaaccgcctggcggcacgcaaccgcgcacgcttcgcagcaaaacagcagctggtgctaaatctggtttccagccccggctccggcaaaaccaccctgctcaccgaaactctcacccggctgaaaggacgcgccgactgcgcggtgattgaaggcgatcagcaaacggtcaatgacgccgcccgcattcgcgccaccggcaccccggcgattcaggtcaataccgggaaaggctgccatctcgacgcccagatgatcgccgatgccgccccgcgcctgccgctggctgaccgcggcattctgtttatcgaaaacgtcggcaacctggtctgcccggccagctttgatctcggcgagcgccataaggtggcggtgctgtcggtcaccgaaggcgaagacaaaccgctgaagtatccgcatatgttcgccgccgccagcctgatgctgctcaacaaagtcgacctgctgccgtatctcaatttcgacgttgagcagtgcctggcctgcgcccgcgaggtcaatccgcatattgaaattattcttgtctccgccaccagcggcgaaggcatggagcagtggctcacctggctggagacgcagcgatgtgcatag

SEQ ID NO: 137933 - DNA, 345 bp, Enterobacter cloacae
atgcacgaaatcaccctcagccagcgggcgctggaaattattgaacaacaggcgcagcaggccggcgcgcggcgggttaccggcgtgtggctcaaggtcggcgcattttcctgcgtggaagccagcgccctgaccttctgctttgagctggtctgccgcggcacgctggcggaggggtgcgaactgcatatcgccgaacaacaggctgaatgctggtgcgatcgctgtcagcagtacgtccatcttgtctcgcagcacgttcgccgctgcccgcactgcaataacgaccaactgcagatcgtggcggatgatggcttacagattcagcgtttagaattggagtaa

SEQ ID NO: 137934 - DNA, 450 bp, Enterobacter cloacae
atgactatttgggaaataagtgaaaaggcggattacatcgccgaccgtcaccggcagcagcaggagcagtggcacatctactgtaactcgctggttcaggggatcaccttgtcgaaggcccgcctgcatcacgcgatgagctgcgcgccggacaaagagctgtgcttcgtgctgttcggccattttcaggtgttcgtcgccctcgcggaaggcttcaacagccacaccatcgagtactacgtcgaaaacaaaaacggcggtgataagtatctgattgctcaggccaccctcgcaatggatggcacggtggacggccgcatcagcaaccgctcccgcgaccaggtgctggagcactatctggcgattatcgccaccgtctatgaccgtctgtatgacgccatggaacaagaccaaccggtggatttaagccatctggcgctgacccactga

SEQ ID NO: 137935 - DNA, 609 bp, Enterobacter cloacae
gtgaaccgttttgtaattgctgactccactgtctgtatcggctgccgcacctgcgaagccgcctgctctgagacgcatcgccagcacggcctgcaggctatgccgcggctgcaggtgatgcgtaatgaaaaagaatcggcaccgcagatgtgccaccactgtgaagatgctccctgcgccaccgtctgcccggttaacgccatccagcgcgtcgatggcgcggtccagctcaacgagagcctgtgcgtaagctgcaaactgtgcggcattgcctgcccgttcggcgccattgaattttccggcagccgcccgctggatatcccggcgaatgccaatacccggctggcgccccccgcgccgccggcgccggcgcgcgtcagctcgctgctcgactgggtaccgggcgtgcgcgctattgccgtgaaatgcgacctctgccacttcgatgaccagggcccggcctgcgtgcggacctgtccgaccaacgcgctgatgctggtggatagccgtgatatcgcccaggccagcaagcgtaaacgccagctgacctttaataccgaccttggcgacttgtcgctgttccaggcgcaacagggggagagggaatga

SEQ ID NO: 137936 - DNA, 1827 bp, Enterobacter cloacae
atgagtgtaattggattagtgaatcaggcggtggcgtggtatgccgccagcgccgtactggcctttctgtttgccatgcgcaaaccgctcagcggcgccattgccgggatcggcggcgcggtggccagcgccatgctggtggtcgccggcggcgccgcgctgctgatgccggagcggatccacggcggcatgctgcagtttctccacctgacgatacgggtggggggcgtcaacgcgctgtggctgctggccatcggcctgtcggcgctgccggtgtcattgtttaatattagctggcatcgccacccgcaggtgaaggccaacggcccgctggtcaacctgctgctggccgccgcgacctgcgcggtggtggtgaccaatatcggttcactggtggtgatggcggagatcatggcgctctgcgcggcgtttctcaccggctgcgccgcctccggtaagctgtggtttgccctggggcgtctcggtactttgctgatggcctggacctgctggctggtgtggtcaacctacggcaccctcgagctggcgcagatcaaccttcaggcggtggatatgatgcagaacccgctgctctggctgccgggtctggtggggttcgccctgctggccggggcgatcccgctgcacggctgggcgccgcaggcccacgccggggccagcgcgccggccgccgcgctgttttccacggtagtgatgaaagtcggtctgtacggcatgctgaccgtttcgctggccggcggcgtgccgccgctgtggtggggcgtgatgctgctggcgctggggatgatcaccgcctttatcggcggactgtatgcgctgatggagcataacattcagcgcctgctggcctatcacaccctggagaatatcggcattatcctgctggggctgggcgccttcgtcaccggcgtggcgacccgcaacagcacgctgatggtgctgggctttatcggcggcatgtatcacctgattaaccacagcctgttcaaaaccacgctgttcctcggtgccggagcggtgtggttccgcaccggccatcgcgatatcgagaagctgggcggcatcggtaaaaaaatgccgctgatctccctcgccatgctggtggggctgatggcaatggcggccctgccgccgctgaacggcttcgccggcgaatgggttatctatcaatccttcttcaaaatgagcactggcgacctgtttatcggccgtctgctggggccgctactggccgttggcctggcgatcactggcgcactggcggtgatgtgtatggcgaaagtctatggcgtgaccttcctcggcgcgccgcggacgaaagaggcggaaaacgccacctgcgccccctggctgatgaccctgagcgtggtgctggcggcggtgttctgcctcgttggcggcatcgccgcgccgtggctgctgccgctggtgagcggcgccttcccggtgcaggctcaggtatcgagcgtggtgtcgcagccgatgatcgcgctgctgcttattgcctgcccgctgctgccgttcctgctgatgatcttctttaaaggcgatcgcctggcggcgcgctcgcgcggcgcggcgtgggtctgcggttacgaccacgagcagtcgatggtggtaacggcccacggctttgccatgccggtgaaagaggcctttgcgccgctgctgaagctgcgtcactggctgaacccggtgcgtctggtgccgggctggcaatcggcctcggcgccggcgctgctgcgcgggatcgcgctggttgagctggcggtgctggtggtgattgtcatttcgcgaggagcctga

SEQ ID NO: 137937 - DNA, 924 bp, Enterobacter cloacae
atgagtctgttaattgcattgctacaggcgctggtgctgtttgccgtcgcgccgctgttgtccgggatcgttcgcgtcgcccgcgcgcggctgcataaccgccgtggaccgggggtactgcaggagtatcgcgatatcctgaaactgctgggccgccagagcgtcggtcctgacgcctcgggctgggtgtttcgcctgacgccgtacgtcatggtgggcgtgatgctgaccatcgccaccgcgctgccggtggtgacggtagactccccgctgccggtgctgggggatctcatcaccctgatctacctgttcgccatcgcccgtttcttctttgccatttccggtctggacaccggcagcccgtttaccgcgctgggcagcagtcgcgaagcgatgctcggcgtgctggtggagccgatcctgctgttgggcctgtgggtggcggcgcaggtcgccggctcgacccatatcagcgccatcaccgataccctttaccactggccggcggcgcgcagcattccactgattctggcgttatgcgcctgcgccttcgccacctttatcgagatgggcaaactgccgttcgatctggcggaagcggagcaggagctgcaggaagggccgctgtcggaatacagcggcagcggctttggcatcctgaagtggggcatcagcctcaaacagctggtggtgctgcagatgtttgtcggggtcttctttccgtggggccagatgaccagtttcagcgtcggcggcctgctgctggcgctggtggtcgccatcgttaagctggtggttggggtgctaattatcgcgctgtttgaaaacagcatggcgcgtctgcgtttttgtgccacctcccgcgtcacctgggccgggtttggtttcgcctttttagctttcgtctccttgctggtggcgtga

SEQ ID NO: 137938 - DNA, 1710 bp, Enterobacter cloacae
atgtctgaagaaaaaatcggtcaacactaccttgcggcgctgcaccaggcctttcccggcgtggtgctggacgaagcctggcagaccaaagaccagttaaccatcaccgtgaaggtcaactacctgccggaagtggtggagtttctctactaccagcagggcggctggctgtcggtgctgttcggcaacgatgaacgtaagctcaacggccactacgcggtctattacgtgctgtcgatggagcagggcaccaaatgctggatcaccgtgcgcgtggaagtggacgccaacaaaccggaatacccgtcggtgacgccgcgcgtcccggcggcggtatggggcgagcgcgaagtgcgtgatatgtacggcctggtgccggtcggcctgccggacgaacgccggctggtgctgccggacgactggccggacgaactctatccgctgcgcaaagacagcatggattatcgccagcgtccggcgccgaccaccgacgccgaaacctacgagtttattaacgagctcggcagcaagaaaaacaacgtggtgccgattggcccgctgcacgtcacctctgatgaacctggccacttccgcctgttcgttgacggcgagaacattatcgacgccgactaccgcctgttctacgtccatcgcggaatggaaaagctggcggaaacccgcatgggttataacgaagtgaccttcctgtcggaccgggtgtgcggcatctgcggcttcgcccacagcaccgcttacaccacctcggtggagaacgcgatgggcatcgtggtgccggagcgggcgcagatgatccgcgccattctgctggaggtggaacgcctgcactcgcacctgctgaacctcggtctggcctgccactttaccggctttgactccggctttatgcagttcttccgcgtgcgcgaaacctcgatgaagatggcagagatccttaccggcgcgcgtaaaacctacggcctgaacctgatcggcgggatccgccgcgacctgctgaaagaggacatgatccagacccgtcagctggcgcagcagatgcgtcgcgacgtgcaggagctggtggatatgctgctcagcacgccgaatatggaacagcgtaccgtcggtattggccgtctggacccggaaatcgcccgtgacttcagcaacgtcggcccgatggtgcgcgccagcggccacgcccgcgacacccgcgccgaccacccgtttgtcggttacggcctgctgccgatggaagttcacagcgaacagggctgcgacgtgatatctcgcctcaaggtgcggatcaacgaggtttacaccgcgctgaatatgattgatttcggtctcgataacctgccgggcggcccgctgatggtggaggggttcacctatattccgcaccgcttcgcgctgggcttctccgaggcgccgcgcggcgacgatatccactggagcatgaccggcgacaaccagaaactgtaccgctggcgctgccgggcggcgacttacgccaactggccaaccctgcgctatatgctgcgcggcaacaccgtttccgatgcgccgctgatcatcggcagcctcgacccgtgctactcctgtactgaccgcatgaccgtggtcgatgtacgcaagaagaagagcaaagtggtgccatacaaagagctggagcgctacagcatcgagcgtaaaaactcgccgctgaaataa

SEQ ID NO: 137939 - DNA, 1416 bp, Enterobacter cloacae
ttgctcttccagcagcgcgctgaagtcggccagggtcggcagctcgagtttctcagtgaacttcggctgacgagtcggcagatagccgttcagcttctgacgctgagcgtgcaggtaagtgtgctcttcggaaccttccgggaaggttacgtacggcagtttttcgagatcggcatccgccaccggcacattgaaacgatcgcggacgtagcgaacaccgtccatgttcattttcttaacctggtgcgcgatgttcttaccttcagcggtatcgcccataccataacctttaatggtatgcgccaggatcacggtcggctgacctttggtctcctgcgctttcttcaatgcagcgtagactttcttcggatcgtgaccaccgcggttcagagcccagatctgctcgtcagtccagtcagcgaccagggcagcggtttccggatatttgccgaagaagtgctcacgaacgtaagcgccgtctttggatttgaaggtctggtagtcgccgtcaacggtttcgttcatcagctgaatcagcttaccgctggtgtctttacgcagcagctcatcccaacggccgccccagataaccttgataacgttccagccagcaccaccgaagatgccttccagttcgttaatgattttgccgttaccggtgaccgggccgtccagacgctgcaggttgcagttgatgacgaagaccaggttgtccagtttttcacgggtggcgatggtgatagcgcctttagattccggctcatccatctcgccgtcgcccaggaaggcgtaaacggtttgttcggaggtgtctttcagaccgcgatgttccagatatttcaggaatttggcctgatagatagcgcccaacggccccagacccatggatacggtcgggaactgccagaattccggcatcagtttcgggtgcggataagaggacagacccttgccgtgaacttcctggcggaagttgtccatctgctcttcggtcagacggccttccaggaacgcacgtgcatatacgcccggagagatgtgaccctggaagtacaccagatcgccgccatctttctcagtgcgcgcacggaagaagtggttgaagcagacttcgtagaaggtcgcggaagactgataggacgccatgtggccgcccagttcgagatcttttttcgacgcgcgcagaacggtcatgatggcgttccagcgaatcgcagaacgaatgcgacgttccagatccagattgcccgggtattccggctcatcttcaacggcaatagtgttgacgtagttgccggcggaagcgcctgcagcaaccttcactccgcctttacgggcttcagaaaggagttggtcaatcagatactgagcgcgctcaacaccttcttcacggatgaccgattcgatcgcctgtag

SEQ ID NO: 137940 - DNA, 741 bp, Enterobacter cloacae
gtgatagagcagcagctggagtttctgattcttgaggggaccttgcgccccggtgaaaaactcccgccagaacgcgaactggctaaacagttcgacgtttcccgcccctcgctgcgtgaggcgattcaacgcctcgaagccaagggcttgttgcttcgtcgtcagggaggtggaacgtttgttcagagccgcctgtggcagagcttcagcgatccgctggttgagctgctgtccgatcaccctgaatcccaattcgatctgcttgagacccgtcacgcgctggaaggcatcgcggcctattacgcggcgctgcgcagcaatgatgaggatcgcgaccgtatccgtgagctgcatcaggctattgaacgcgctcagcagtcgggcgatttggacgctgagtccggcgccgtcgtccagtatcaaatcgccgtcaccgaggcggcacacaatgtggtgttgcttcatctgctaaggtgtatggagccgatgttggcgcaaaacgtgcgtcagaactttgaattgctgtatgcccggcgggaaatgctcccgttggtcagcaaccatcgcactcgcattttcgaggcgataatggccggggagccggagcaggcgcgtgaagcgtcgcaccgtcacctggcgttcattgaggaaattttgctggatcgtagtcgtgagcagagccgtcgagagcgctcactgcgtcgtttacagcaacgaaaggacgagaactccggttcttaa

SEQ ID NO: 137941 - DNA, 1371 bp, Enterobacter cloacae
atggaaggtcaacagcacggcgatcggctgaagcgcggcctgaaaaaccgtcacattcagctcatcgcgctgggcggggctatcggcaccggcctgtttctggggagcgcgtccgtcattcagtccgccggcccgggtatcattcttggttacgctatcgccggttttatcgctttcctgatcatgcgtcagctgggcgaaatggtggtggaagagccggtggccggctcatttagccactttgcttacaaatactggggcggttttgccggcttcgcctccggctggaactactgggtactgtatgtcctggtggccatggcggaactgaccgccgttggcaaatatatccagttctggtggccggaaatccctacctgggcctcggcggcggtctttttcatcgccatcaacgccattaacctgaccaatgtcaaagtgttcggtgaaatggaattctggttcgcgattatcaaagtggtcgccgtagtggcgatgattttgttcggcggctggctgctgttcagcggcaacggcggcccgcaggcgacggtacgtaacctgtgggaccaggggggcttcctgccgcacggcttttacgggctggtgatgatgatggcgatcatcatgttctcctttggcggcctggagctggtggggatcaccgccgcggaagcggataatccggagcaaagcattcctaaagccaccaatcaggttatttaccgtattctgatcttctatgttggttcgctggcggtgctgctctccctgctgccgtggacccgcgtcaccgcggacaccagtccgttcgtcctgatcttccatgaacttggcgatacgctggtggcaaacgctctgaacgtggtggtgctgacggcagcactgtcggtttataacagctgcgtgtactgcaacagccgtatgctgttcggccttgctcagcagggcaacgcgccaaaagcgctgctcagcgtcgacaaacgcggcgtgccggtgaataccattctcgtctcggccctggtcactgcgctgtgcgtgctgatcaactacctggcgcctgaatctgctttcggtctgctgatggcgctggtggtctcagccctggtcatcaactgggcgatgatcagcctcgcgcatatgaaattccgtcgcgccaaaaagcagcagggcgtggtcacgcgtttcccggccctcttctatccgctgggcaactggctgtgcctgctgtttatggcggcggtgctggtgattatgctgatgaccccggggatggcgatttccgtctggctgatcccggtatggattgcggtgctgggcgtgggctacctgtttaaagagaaagccgccgccaccataaaagcacaataa

SEQ ID NO: 137942 - DNA, 1407 bp, Enterobacter cloacae
atggcagagaacacgctttcaataagagaaaagattggttacgggatgggtgatgccggatgcaatattatctttggcgccatcatgctgtttgtgaactatttttacactgatatattcggacttgcgccggcgctggtcggcgtacttctgctctcggtgcgagtcatcgatgcggtaaccgaccctatcatgggcgctcttgccgaccgcacccgtagtaaatatggtcgctttcgtccatggctgctgtggatcgccttcccctacgccctgttcagcgtcctgatgttcaccactcctgagtggacctacaatagcaaagtcatctatgcgtttgtgacctactttctgctgtcgattacctataccgcgattaatattccctactgctcgctgggaacggtgatgaccgccgatccgaaagagcgtgttgcctgccagtcttatcgtttcgtcatggtgggtatcgccacgctcctgctgtcattgacgctgctgccaatggccgactggttcggcggcgccgataaagcgaagggctaccagatggcgatgaccgtgctggcctttatcggtatgtgtatgttcctgttctgcttcgccaccgtgcgcgaacgtatccgcccggcggtgcagacgaatgacgaactgaaaaaagatctgaaagacgtctggaaaaatgaccagtgggtgcgcatcctgctgctcacgctgtgcaacgtctgtccgggctttatccgcatggccgccaccatgtactacgtcacctgggtgatgggacaaagcacccattttgccaccctgtttatcagcctcggcgtagttgggatgatgattggcagcatgctggcgaaagtcctgaccgaccgctggtgcaaactgcaggttttcttctggaccaatatcgtgctggccgtgttctcctgcgccttctatttctttaatccacacgccaccacgctgattatggtgctctacttcctgctcaacattctgcatcaaatcccttccccgctacactggtcgctaatgtccgacgttgatgactacggcgaatggaaaaccggcaagcgcatcaccggtatcagcttctccggtaatctgttcttcctcaaggtcggcctggcggtcgccggggcaatggtcggtttcctgctgtcatggtacggctacgacgccggcgcgaaagcgcaaagcgcctccgcgctgaacggtatcgtgctgctattctcagtcattcccggcgtcggctatctgatcaccgccggcgtggtgcgcctgctgaaggttgaccgtaccctgatgcgccagattcagagcgatctggagaagcgccgcagcaactacagcgagctgaacgaataccaggaactgaaaaccagtgaacacgtaaggaaagcctga

SEQ ID NO: 137943 - DNA, 951 bp, Enterobacter cloacae
atgaacaactggccaaacccctttattgaacagcgtgcagacccctttatcctgcgccatcttagccactactactttattgcctcggtgccggaatacgaccggctggagatccggcgcgcggtaacccttgaaggattacgcgatgctgagccggtcgtggtttggcgcgcgccgcaaagcgggccgatgagccagctgatttgggcgccggagctgcatgaaatagacggtaagtggtatatctattttgccgccacccatactcacgatctggatgcgctggggatgttccagcatcgcatgttcgttctcgagtgcgctgacagcgatccgctgaccggccgctggcaggaaaaaggccaggtggtcacgcctttcgataccttcgccctcgatgccaccacttttacccatcaggggaaacgctggtatctgtgggcgcaaaaatccccgcatatcgaaggcaactcaaacttgtatctcgccgaaatggctaacccgtggacgttaaaaggcgagccggtcatgctgagcaagccggagttcgactgggagtgccggggatttaaggtcaacgaagggcctgcggtactgatgcatggcgataagctatttatcagctattccgccagcgccaccgatgaaaactactgcatggggttgttatggatcgaccggcaggccgatccgctgcagccggcaaactggcataaagctccgcagccggtgttccgcaccagctatgaaaaccgccagtatggcccgggccataatagttttacccaaacgccggaaggggaagatgtgctggtgtatcactcgcggaattacaccgagatagaaggcgacccgctgtatgatcccaatcgccatacgcggttaaagctggtcagctggcgggaagacgggatgcccgacttcggtattccaccggcggatacgctgtag

SEQ ID NO: 137944 - DNA, 855 bp, Enterobacter cloacae
atgacgctgtttacgacgctgttggtgcttatcgccgaacggctgtttaagctgggcgaacactggcagcttgatcatcggctggaggtggtgtttcgccggataaaacatttctcgttaccgggcacgctgctgatgacgctggtggccgtcgcggtcgtgtatatcattcagcgtctgctgcaggggcagctgtttaacataccgctgctggtgttctggattttactgggcctgctatgcattggcgccggcaaagttcggctgcactaccatgcctatctgaaagcggcgtcgcgcaatgacagtcgcgcctgcgatgccatggccagcgagctgacgcttattcacggcgtgccgccgggctgtgatgagcgtgagtaccttagcgaactgcaaaatgcgctgctgtggattaactatcgatactatctggcgccgcttttctggtttgtcgtggggggggcctggggcccgctgacgcttatcgcctacagcgtactgcgcgcctggcagacatggctggcgcgctaccagacgccgcaccaccggttgcagtccgggatcgatggtatcctgcatattgtggactggctgccggtgcgtctggtgggggtggtctatgccctggtgggccatggtgaaaaagcgctcccggcgtggtttgcttcgctgggcgaccgccattcgtcgcagtatcaggtgttgacccgcctggcgcagtattccctggcccgtgagccgcacgtggataaagtagcgacgccgaaggctgcggtatcgatggctaagaagacttcgctggtggtagtggtgattatggcgctgctgacgatttacggtaccctggtttaa

SEQ ID NO: 137945 - DNA, 564 bp, Enterobacter cloacae
atgcagttgaacgaggggtggttggtcggcgcgcgtcgggttccctcgccgcaccatgactgccgtccggatgaagagaccccttccttactggtggtgcataacattagcctgccaccgggggaatttggtggtccgtggattgatgcgctgttcactggtaccctggatccgcacgcgcatcctttctttgccgagattgctcatctgcgcgtttcggcgcattgtctgattcgccgtgatggcgaaatcgtgcagtatgtgcctttcgataagcgggcgtggcatgcgggcgtctcctgttatcagggacgcgaacgctgcaatgacttttccatcggcatagagctggaaggcaccgatactctggcgtataccgacgcgcagtaccggcagctggcggcggtgacggatctgctgatcgcgctttatccggctatcgccgaaaacattgcgggccacagcgatatcgcgcccgtgcggaaaaccgatccaggaccggcctttgactggataaaataccgtgcgctgctcagcgccccgtcagaaaaggagacctcatga

SEQ ID NO: 137946 - DNA, 894 bp, Enterobacter cloacae
atgtcgcctcgtcgttacaaccccgaccgccgccgtgacgtgctgctggaacgtattaatctcgatattaccgatgctgtcgcacactccctgcgggaagatctgggcggcgaagtcgacgccaacaacgatattagcgcgcaattattgccgcaggatgcacgctcccatgcggtggtcattactcgtgaagatggcgtcttctgtggcaaacgctgggtggaagaggtctttattcagctcgccggtgacgacgtgaatatcacctggcacgtggccgacggcgatgcggtcaaagccgaccagccgctgttcgaattggaaggcccgtcgcgtattctgctcaccggcgaacgcacggcgctgaactttgtgcaaaccctctccggcgtcgccagcgtcgtccgtcgctatgtcgacctgctcgccggcaccaaaacccaactgctggatacgcgcaaaacgctgccagggctgcgtaccgcgctgaaatacgcggtactctgcggcggcggcgccaaccatcgactgggcctgttcgacgcgttcctgattaaagaaaaccacattatcgcctccggatcgatccgtcaggcagtggaaaaggcgttctggctgcatcctgatgtgccggtggaagtggaagtggaaaccctggatgaactggagcaggcgttaaaagccggggccgatatcattatgctcgataacttcaccaccgacctgatgcgcgaggcggtgaaaattaccgcaggccaggcggcgctggaggtctccggcaacgttacctttgacaccatccgcgaattcgccgataccggcgtcgactatatttccgtcggcgccctgaccaaacatgtgcaggcgctcgacctgtcgatgcgcttccgctga

SEQ ID NO: 137947 - DNA, 432 bp, Enterobacter cloacae
atggataaacaacgaggttttaccctgattgaactgatggtggttatcggaatcatcgccattcttagcgccatcggcatcccggcctaccagaactacctgcgtaaagccgccctcaccgacctgctgcagacctttgtcccttaccggacagccatcgaactttgcgcgctcgatcatggcggcctaacgccatgcgacggcggcagcaacggcattccctcgccgacaaccacgcgctacctctccgccatgagcgtggccaaaggggtcgtcaccctcaccggtcaggagagtctgaacggactgggggtcaccctgacgccgacctgggacaatgccgagggcgtcaccggctggcagcgcgtctgcaccatcaccggcaatagcgcgcttcagcaggcctgcgaagacgttttccgggtgaagtga

SEQ ID NO: 137948 - DNA, 1386 bp, Enterobacter cloacae
atgaaaacagaacagctgatccctctctgccgtcgctaccacgccatgctgctgcatagcgatgaacagacaatctctattgcggtggttaataccccgccggcggagttgatggaggcgctacgcttcgcgacgcaaaagcggatcgacattgaatgctggagccaggagcagatggataagcgtctgcaggcccaggaaaagcaggcgcaactggcgcagaacgacgggccggaaaatatcgccgaacgggtcaaccagatcctcgaacaggccctgcgtcagcgggcgtctgatattcatatcgagcccacggaaacgcacttacgcatccgcctgcgggtcgatggcgtccttcacgccctaccgttgctggctcccgaactggccgcaccggttatcgcgcgactcaaggtcctggccagtctcgatatcgccgagcaccgtttaccgcaggatggccagttcgcgctgaatcttgcgggacgaccgctctcttttcgcatcgccactctgccctgccgctatggcgaaaagattgtcctgcgccttctgcatcaggttgaccaggcgctggatctggaagcactcggactctcatcctcccagctggcggcctttcgccaggcgctgaaccagccgcagggtctgctgctggtcaccggcccaaccggaagcgggaaaacggtgaccctctacagcgccctgcaggccagaaaccgtgagcaagtgaatatctgtagcgtggaggatccactggagatccccatcgccgggatgaaccagacgcaaatcaatccccgcgccggactcacttttcacagtgtgctgcgcgccctgttacgccaggatccggatattgtcatggtgggcgagatccgcgatgccgagaccgctgaaatcgcgctcaaagccgcccagaccggtcatctggtgctatccaccctgcacaccaattccaccagtgaaaccctgacccgcctgcagcaaatgggcatcgcccgctggatgatttcctctgcgctctcgctggtcatcgcccagcgtctggtccgcaagctgtgtccccactgtcggcgtaatgccggcagcgccgccgacctgccgcacagcctgtggccccgcccgctgccacgctggcaggcagcgggctgcgaacattgttaccacggatattacggccggctggcgctgttcgaagtgctgcctgttacccccgggctacgccaggggatagtccagggacttaacgccattgagattgaatctctggcgcgagccgcggggatgatgacgctttttgaaagcggctgtcaggctatcgaacagggattgaccagcctcgaagaggtggtgcgggtgctggggatcccccatggcgactaa

SEQ ID NO: 137949 - DNA, 654 bp, Enterobacter cloacae
gtgattaatttaaatggaaattcatcatcttctcgtcaggtaacctttattacccacccgtctattcaaagcaaagcctttgccagctatctgagcgaaaccctgatggcaccggtggttttacaaaatattaataaaccgctggcgcagcgtttggcaaaagattctgtaatattatttgatattacagtgtcaaataagaaattaaacggggtgtggcgggatattattcgcctgcaggcagataatcctcgtttgttgattattaatagcgcacaaaagtatgagctatacgaaatggcgcagtggccggctttatatggcgtgttccgtcatgacgatgatgaatcgcgcttaattgagggcgttaaggccgtgctgaacggcgagcagacggctgaattgagcgtgatgcacccggcgatgtacgctgcggaccatgcatcgactccagtagagaactcgccgctgaccgagcgggaatgcgagatcctcaacgaactgcgctgcggcgcaacgaacctggatatcgcccgcgcgctgtttatcagcgagaacacggtgcggacgcacctgtacaatgtgtttcgtaaactgagcgtgaaaaatcgcacccaggcggtgagctgggctaacgaacatctgcgccactaa

SEQ ID NO: 137950 - DNA, 417 bp, Enterobacter cloacae
atgagcggaacctttctcggctttgactttggcaccaaaagcatcggcgtggcggtgggacaacgcatcaccgcgaccgcacgaccattaccggcgctgaaggcgcaggacggtaaaccggactggaacgtcatcgaaaaactgcttaaagagtggcagcctgaggcggtaatcgtcggcctgccgctcaatatggacggcaccgagcaaccgctgacggcgcgcgcgcgtaatttcgccaataaaattcatggccgctttggcgtcgcgatccttctccacgatgaacggctgagtacggttgaggcccgcgcgggcctgtttgaacacggcggctaccgggcgctgaataaaggcagcgtcgattcagcctctgccgtagtcatactggaaagctacttcgagcagagcttttaa

SEQ ID NO: 137951 - DNA, 564 bp, Enterobacter cloacae
atgaatttacagcatcactttctgattgccatgcccgcgcttcaggaccccattttccgccgctccgtagtctatatctgcgagtacaacgacgagggtgccatgggcattattatcaataagccgctggaaaatctgcaggtggaagggatccttgagaagctcaaaattgtcccggagccgcgcaatccagagatccgtctggataaaccggtgatgctgggaggcccgctggcggaagaccgcggcttcattttgcataccccgccctctgacttttcctcgagcattcgcatctcggataacacggtgattaccacctcgcgggatgttcttgaaaccttaggaaccgatcggcagccgggcaacgtgctggttgcgttgggctactcttcgtgggagaaagggcagctggagcaggagattttagataatgcctggctcaccgccccggcggatcagaatattcttttccgtacgccgatcgccgatcgctggcgcgaggcggctaaactgattggtatcgacattgtgacgatgccaggcgtcgcggggcatgcgtga

SEQ ID NO: 137952 - DNA, 951 bp, Enterobacter cloacae
atgatcaagctcggcatcgtgatggatcccatcgcaaccatcaacatcaagaaagacaccagcttcgctatgttgctggaggcgcagcgtcgcggctatgaactccattatatggagatgaacgacctctatttgatcaacggcgaagcccgcgcccggacgcgcacgctgagcgtcgaacagaactacgataaatggtatgacttcaccggcgagcaggatctgccgctggcggaccttgacgtcatcctgatgcgtaaggatccgccgtttgataccgaatttatttatgccacctacatcctggagcgggcggaagagaaaggcacgcttatcgtcaacaagccgcagagtctgcgcgactgtaacgagaagctgttcaccgcctggttctctgaactgactccggaaacgttggtcacccgcaataaagcccagctgaaagccttctgggaaaagcacagcgatatcatcatgaaaccgctcgacggcatgggcggcgcctctattttccgggttaaagccggcgatccaaacctgggggtgattgccgagacgctgaccgaactgggcagccgctactgcatggcgcagaactatctgccggccattaaagatggcgacaagcgcgtgttggtagtggatggagagcccgtgccttactgcctggcgcgaattccgcagggtggcgagacccgcggcaatctggccgccggcggccgcggcgaagcccgcccgttgaccgaaagcgactgggaaatcgcccgccgcgtcggcccgacgctgaaggccaaaggccttatcttcgtcggcctggatatcatcggcgaccgtctgacggaaattaacgtcaccagccccacctgcgtacgcgaaatcgaagccgccttcccggatatttcgatcaccggtatgctgatggacgctatcgagagacgtatcgataaataa

SEQ ID NO: 137953 - DNA, 732 bp, Enterobacter cloacae
atgcgcattcctcgcatccatcatccagaacgcctcattgtcggcagccagatcgcgctgagcgatgacgcggccaaccacgtcggccgcgtcctgcgcatgaccgccggtcagcacctacagctttttgacggcagtaaccaggtgtttgacgcggtcatcaccgaggccggtaagaaaaacgttacggttgaggtgctcagtggcgaacctgacgatcgggaatcgccgctgcatatccatttaggccaggtgatgtcccgcggcgaaaaaatggaattcaccatccagaaatcgatcgaactcggggtaagcctcataacgccactgttttccgagcgctgcggcgttaaactggatgccgaacgtttgcagaaaaagatccagcagtggcagaaaatcgctattgccgcctgcgaacagagcggtcgtaacgtggtaccggaaatacgtccggcgatgcagctggaggcgtggtgcgccgagcaggacagcgggctgaagctcaacctgcacccgcgcgccagcgccagcattaacacgctgccgctgccggttgaacgcgtccgtctgctgattggcccggaaggcgggctgtcggctgaagagatagcgatgaccgcgcaataccagtttactgatatcctgttgggaccgcgcgttctgcgtacagagactactgcgctcaccgccatcaccgccctacaggtgcgttttggcgacttaggttga

SEQ ID NO: 137954 - DNA, 174 bp, Enterobacter cloacae
atgcgcgaccgctatcagctgaatctttcccgccagcaaactcagctgtttaccgcctggaataaacagtacccggtcaccgcctgggaatgtgaacgtgatgagcgtatcgcgaaagtgcagggcaaccataatccgtatgtccagcaggcttgccaggcgcaaaagagctaa

SEQ ID NO: 137955 - DNA, 459 bp, Enterobacter cloacae
atgcgcagcctgcgggagcatctcgccaatgcgaatcgcaagctggaacgccgctatgcggaaccgacgctggtctaccagcagcgtggtacttccgccggcaccgcctggctggagaaaaacgaaattcgtttaaacccggtgctactgctggaaaatcagcgggagtttatcgatgaagtggtgccgcatgagctggcgcacctgctggtctggcagcatttcggccgcgtcgcgccgcacgggaaagagtggaaatggatgatggagagcgtccttggcgttcccgcgcgtcgcacccaccgctttgaactcgcttcggtccgccagaacaccttcccctatcgctgtcgctgtcagcagcaccagctcaccgtccgtcgccataaccgggtggttcgcggcgaggccacctaccgctgcgttcgctgcggcgatctgctggtggctgaaaaataa

SEQ ID NO: 137956 - DNA, 1395 bp, Enterobacter cloacae
atgcctgacaacaaaaaacaagggcgttcgaacaagactatgacgttcttcgtctgtttcctcgccgcgctggctggcctgctgttcggccttgatatcggtgttattgcgggtgccttaccctttattgccaatgagttccagatttccgcccacacccaggagtgggtggtcagctccatgatgttcggagctgccgtcggcgcggtcggcagcggctggctctctttcaaactgggccggaaaaagagcctgatgatcggcgccatcctcttcgtcgccggttcgctgttctctgccgccgcgccaaacgtcgagatcctgctggtttcccgtgtgctgctcggcctggcggtgggcgtcgcctcatatacggctccgctgtatctgtcggaaatcgcgccagaaaaaattcgcggcagtatgatttccatgtaccagctgatgatcaccatcgggatccttggcgcctatctctctgacaccgctttcagctacagcggcgcatggcgctggatgctcggggttatcatcattccggcggtattgctgctgatcggcgttatcttcctgccggacagcccgcgctggttcgccgccaaacgtcgctttgtcgatgcggaacgcgtgctgctgcgcctgcgcgataccagcgccgaagcgaaacgcgagctcgatgaaatccgtgaaagcctgaaggtaaaacagtccggctggtcgctgtttaaagacaacagcaacttccgccgcgcggtgttcctcggcatcctgctgcaggtgatgcaacagttcaccgggatgaacgtcatcatgtactacgcgccgaagatctttgagctggcgggttatgccaacaccactgagcaaatgtgggggacagtgatcgtcggtctgactaacgtgctggccacctttatcgccatcggtctggtcgaccgctggggccgtaaaccgacgctgatccttggctttatcgtgatggccgcgggtatgggcgtcctgggtaccatgatgcacatcggcattcactcctctaccgcccagtacatcgccgtcctaatgctgctgatgttcatcgtcggtttcgccatgagcgccggcccactgatttgggtactgtgctccgaaatccagccgctgaaaggccgcgacttcggtatcacctgctccacagcgaccaactggattgccaacatgattgtcggcgccaccttcctgaccatgctcaactcgctgggcagcgccaataccttctgggtgtacggcggtctgaacgtgctgtttatcctgctgacgctgtggctgatcccggaaaccaaaaacgtctcgctggaacatattgaacgtaacctgatgcagggtcgtccactgcgcgagatcggtacccgcgattaa

SEQ ID NO: 137957 - DNA, 1155 bp, Enterobacter cloacae
atggcaaaacacctttttacgtctgagtccgtatcagaagggcatcctgacaaaattgctgaccaaatctccgatgccgtgctggatgcgatcctcgaacaggatccgaaagcgcgtgtcgcatgtgaaacctatgtcaaaaccggcatggtgctggtaggcggcgaaatcaccaccagcgcatgggttgatatcgaagagatcacccgcaacaccgtccgcgaaattggctacgtgcattccgatatgggctttgacgccaactcgtgcgccgtactgagcgccattggtaaacagtctccggacattaaccagggcgttgaccgtgccgatccgctggaacagggcgccggcgaccaggggctgatgtttggctacgccactaacgaaaccgacgtgctgatgccggcgccggtgacttacgctcaccgtctggtgcagcgtcaggctgaagtgcgtaaaaacggcaccctgccgtggctgcgcccggatgcgaaaagccaggtgaccttccagtatgacgacggcaaaatcgtcggcatcgacgcggtcgttctgtcgactcagcacgcggaagatatcgatcagaaatccctgcaggaagcagtgatggaagagatcatcaagccgattctgccgaccgaatggctcaacgcgtccaccaaattcttcatcaacccgaccggccgtttcgttattggcggcccgatgggcgactgcggtctgaccggtcgtaagatcatcgttgatacctacggcggcatggctcgccacggcggcggcgcgttctccggtaaagatccatctaaagttgaccgttccgcagcctacgcggcgcgctatgtggcgaagaacatcgttgccgcaggcctggccgatcgttgcgaaattcaggtttcctacgctatcggcgttgcagaaccgacgtccatcatggtggaaacctttggcaccgagaaagtgccttctgaacagctgaccctgctggtgcgcgagttcttcgacctgcgtccatacggtctgattcagatgctggatctgctgcacccgatctacaaagaaaccgcagcctacggtcactttggtcgcgaacatttcccatgggaaaaaaccgacaaagcggcgctgctgcgggaagcggccggtctgaaataa

SEQ ID NO: 137958 - DNA, 1806 bp, Enterobacter cloacae
  misc_feature (1718)..(1727): n is a, c, g, or t
atgagctcccaggaagccagcaagatgctgcgtacttataatattgcctggtggggcaataactattatgacgtcaacgaactgggccacatcagcgtttgcccggatccggacgtcccggaagcgcgcgttgacctcgcggaattagtcaaagcccgcgaggcgcaagggcagcgcttgccggcgctgttctgcttcccgcagatcctgcagcaccgcctgcgctcgatcaacgccgccttcaaacgcgcgcgtgaatcgtatggctataacggcgattacttcctcgtctacccgatcaaggttaaccagcaccgtcgcgtgattgaatcgctgatccattccggcgagccgctgggcctggaagccggttcgaaagcggaactgatggccgtgctggcgcacgccgggatgacccgcagcgtcatcgtctgtaatggttataaagaccgcgaatatatccgtctggcgctggtgggcgagaagatgggccacaaggtctatctggtcattgagaagatgtccgagatcgctatcgtactggaagaggccgagcgcctgaacgtggtgccgcgccttggcgtgcgtgcgcgtctggcctcgcagggctccggtaaatggcagtcctccggcggcgagaagtccaagttcggcctcgcagcgacccaggtgctgcaactggtcgaaattctgcgcgaggcaggccatcttgagagcctgcaactgctgcacttccacctcggttcgcagatggctaacattcgcgatatcgccaccggcgtgcgtgaatcggcgcgtttctacgtcgaactacataagctgggtgtcaatattcagtgcttcgacgtcggcggcggcctgggcgtggactatgaaggcacccgctcgcagtccgattgctcggtgaactacggtctgaacgaatacgccaacaatatcatctgggcgatcggcgatgcctgcgaagagaatggcctgccgcacccgacggtgatcaccgagtccggccgcgcggtgaccgcgcaccataccgtgctggtttccaacatcatcggcgttgagcgtaacgaatacaccgaggcgaccccgccggcagaagacgctgcgcgtccgctgcagagcatgtgggaaacctggctggagatgcacgagaccggcaaccgccgctcgctgcgcgaatggctgcacgacagccagatggacctgcacgatatccacatcggctactcctcaggcaccttcaacctgcaggagcgcgcgtgggcggaacagctgtatctgaacatgtgccatgaggtgcagaagcagctcgacccgagcaaccgcgcccatcgtcccatcatcgatgagctgcaggagcgaatggcggataaaatctacgtcaacttctcgttgttccagtcgatgccggatgcctgggggatcgatcagctgttcccggtgatgccgctggaagggctgaacaagtcgccggagcgccgcgcggtgctgctggacatcacctgcgattccgatggcgccatcgatcactacgtggacggcgacgggatcgccaccaccatgccgatgccggaatacgacccggagaacccgccgatgctgggcttcttcatggttggcgcctatcaggagatcctcggcaacatgcacaacctgttcggcgataccgaggcggtggacgtgttcgtcttccctgacggcagcgttgaggttgagcnnnnnnnnnngataccgaggcggtggacgtgttcgtcttccctgacggcagcgttgaggttgagctgtccgacgagggcgataccgtag

SEQ ID NO: 137959 - DNA, 219 bp, Enterobacter cloacae
gtgttcgtcttccctgacggcagcgttgaggttgagctgtccgacgagggcgataccgtagcggatatgctgcagtatgtgcagctggatccgaacacgctgctgacccagttccgcgatcaggtgaaaaataccggtctggacgatgcgctgcagcagcagttcctcgaggagttcgaggcgggactgtacggctatacttatctggaagacgagtag

SEQ ID NO: 137960 - DNA, 444 bp, Enterobacter cloacae
gtgagcatcgaagtgcaccagcgccattttaccaaagtgcttggcatgggcgcgcagcagcggcagggtaacgaagtggtcgccgccaaaggagagcatacgtttgccggccgccagcagcttctcggcgtgagcctgcagcttctcgctcatttcgcgcgcgtcgccgaaggcgtacaccagatccccgcagtccaccacgttcaggcgctcgcgcatatcgaagttccacgggaaacggttgtgctcccaggcaaggttagtggaaacctgacggatcgccgccgggccatgacggccgcccgcgcgcccggaggtcgccatatcgaacggcacgccggtgatgacccagtccgcatcgctttcatacggcataaagttcattggcaaacgcagaaagccaaaggcattggataccagggagttatcgtattgatgacctaa

SEQ ID NO: 137961 - DNA, 231 bp, Enterobacter cloacae
atgacccgccataccgattttgtggtgcgcaacctgttcgacatgggcccggattacgcccgcaccctggcccactggcggcagcgttttacccacgcctggcaggatattgaaaagctcggctttgatgagcgtttccgccggatgtggctctactacttcggctactgcgaagccggatttaacgcccgcaccatcagcgtggtgcagctcaccgcggagcgggtatga

SEQ ID NO: 137962 - DNA, 486 bp, Enterobacter cloacae
atgacacgcccggcgcagcacttgctgatggccctcgcgttcgatgtttactggacgctggtggtgatgttgcgcgagcgcggcctgctgatctggctgacgctggccatcttcgcctggctgcggttgccggcgaccagtcgtccgcccgccctgctgctggccgcggcgggctgcgggctggacgcctgctgggcgctggcggggctgattgattttcccagcgacagcctgctgcccctgtggatggtggccctgtggctgatgttcgccgtcgtctggacccgactgacccgcaccgcgacgcttcccggctgggtgctggccacggcggcgaccctcggcggcccggtggcctacctgatcggcgctcgcctcggagccatgaccctgctggtgccgacggcgcttgctgtggccgccatggcctgcggctggctggtgctcatgctgctgttccatctggggatggggaggcaaaaatga

SEQ ID NO: 137963 - DNA, 525 bp, Enterobacter cloacae
atgagattcgccctgttactgctatggctgaccgtcctcgccccggcggcccacgccgccgactggctggcgtggcgccgcgtcggcgaggcgaccctcacctgggggccgttcaccgtctatcactcgcagctgcgtacgcccaatggccggtatgacggcccgcagcaggatcgggcgctgatcatcacctaccggcgcgacatcgatcgcgaggcgctggtggaggccacccgcgaccagtggcaggcgcagggcattctgcagcaggaaccgcgcagcgacgcctggctacgtatgctgcaggggatctggccggacgtcgcgccgggcagccagctggcgttcgtggttcgcggcggcgaggggcagttctggtaccgcgccagcgccgcgcagaccgcctttaccccgctcggcccgcgccagtcggcggcgttcagcacccgctttctcgccatctggctcgatccgcgcaccacttatcccgaactgcgtcagcagttgatcggaggtacaccatga

SEQ ID NO: 137964 - DNA, 552 bp, Enterobacter cloacae
atgaaacgcattctgacccttggcctggcgctgctgatgctgatcctcgccggctgcagcaccgaggtcacggagtaccggcagcagcagcccgccctcgacatctttcactattttcaggggcgaaccgaggcgtgggggatggtgcaggatcgcagcggcaagcagctgcgccgcttccatgttgagatcgatggcgacgtcgtcggcgacaccctgaccctccatgagcgctttgtctatgacgacggtgagaagcagcagcgggtatggcgcattcgccgcaccggcgataaccgttatcagggcacagccggggatatcgaaggcgtggccagcggccaggcggcaggcaatgcctttcactggcgctacagcatgaacgtcgaggccagcggcagccggtggctgctgcactttgacgactggatgttcctgcaggacggcagccatttatttaacaaaaccgagatgaagaaattcggcattacggtcgccaccgtgacccttttctttacccgaaccacagcagaagagaggacagcgccatga

SEQ ID NO: 137965 - DNA, 960 bp, Enterobacter cloacae
atgaacacgcaacctgtcattgggatcagcggatgtttaaccggctcagccgtgcgattcgacggcgggcataagcgtatgggctttgtgatggatgagctcgcgcagtgggtggcgtttaaacccgtctgcccggagatggcgatcggcctgcccgttccccgcccggcgctccgcctggtgcagaccccggtcggggagatccgcatgcgcttcagccacgccccgcatgaggatgtgacggagaagatggctgatttcgccagcgcccacctcgcaaccctgggtgagctgtcgggctttatcgtctgcgccaaatcgccgagctgcgggatggagcgcgtgcggctgtatgatgaaaaaggcaatcgcgggcgtaaggaaggcgtggggctgtttaccggcgccctgatggcgcgctacccgtggctgccggtggaagaggatggccggctgcacgatccgctgctgcgggagaattttgtcgagcgcgttttcgccctgcatgaactcaacgccctgcgcgcccgcggcctgacccgtcacggtctgctggcctttcacagccgctacaagctgcagctgctggctcaccaccaggcgggctaccgggagatcggcccgttcgtcgcctcgctgcatgaatgggaggatctggaggctttcttcgaggtttaccgcgagaagctgatagcgatcctcaagcggcccgcctcgcggaaaaaccacactaacgtgctgatgcatattcagggttatttccgcgaccagctgaacagccgccagcgcggcgagctgcgggaggtgatcctcaactatcgcgccgggctgctgccgatcctcgccccgctgacgctgcttaagcactatctggccgagtatccggatcgctacctgcaggcgcagaactattttgacccctacccgcaggatctggccctgcgcctgacggtgaactga

SEQ ID NO: 137966 - DNA, 1383 bp, Enterobacter cloacae
atgacaatgataaaaaaacttccattaaccatggcggttatcgccgcgttttttccgcttacctctgtaatggcccaagaatttactcaggaacagatcgacgccatcgtcgccaaagccgttgataaagcgctggccgaccgccaggcaaaaatcgacgccgcggccaacaaaaaggtcgacgtgattactaacccggaaaccaccgccgcctcgccggatatggccattccgttcggcctcaagttcagcggctatgcccgctatggcgcccacttccagactggcgaccagaaatatgtcggcgtcgacggctcctataacggcgcctcggcgatcggccgtctgggcaacgaaagcaacggcggcgaattccagatcagcaaggccttcaaaagcgcgcagggggctatctgggatcttaacgtgatgttcgaccactggagcgacgaagttaacctgaagaaggcctacgtcggggtcaccaacgtgctggaatccaaccccaacgcctatatctgggccggccgcgacttccaccagcgtccgcaacaggggatcaacgactacttctggatgaaccacgacggccagggcgccggggtgaagaactttgatatcggcggcgtgcagttcgacgtggcggcggtctcgcaggtgaaatcctgcagtccggaagtgatggccgacgagaccaacccgtcgcgcatcacctgtaccggcagctccgacaccggcgacaacggccactacgcgctgaccaccaaaacccacaacatcaaggccgggccgatcgacgtcgaggtgtacgccaactacggctttgattcgaaggcggtggacagcgacgcgcgtctcgaagcctggcagggcgggctggtgctgagccacaccaacgacagcggggtaaacaaggtgatcctgcgctactccgacaactcggataacagcgtctacaacaaaaccgacgacctgaccacggtctacgccagcttcgagggcagccataagttcacccagcaggcgcagatcgaatacctgctggctttccacgactacgacaacggcaaagataataccgacaaccgcaaaaactacggcgccatcgtccggccgatgtacttctggaacgacgtgcactccacctggctggaagcgggctaccagcgcgtggattacgaccagggcggggataaccacggctggaagctgacgctgtcgcagaacatcgccatcggcatggggccggagttccgtccgatgctgcgcttctacgtgaccggcggccaggtggacaacgagcacaccgcgaaggtaaacggcacccaggaccagcagctggattcgctgaacgtcggcgggatgtttgaggcgtggttctga

SEQ ID NO: 137967 - DNA, 1359 bp, Enterobacter cloacae
  misc_feature (438)..(447): n is a, c, g, or t
atgcaaacctatttcgaccaggttgatcgcgttcgctttgccggacccaaaaccgataatccgctggcgtttcgccactataatccggatgaaatcgtgctgggaaaacgcatggccgatcatctgcgttttgccgcctgttattggcataatttctgctggaatggcgcggatatgtttggcgccggctcgtttgagcgtccctggcaggccgcgggcgatgcgctggaaatggccaaacgcaaagcggacgtggcgtttgaatttttctacaagctcaacgtgccgtattactgcttccatgatgtcgacgtctcgccagaaggcgcgtcgctgaaagagtatttgcataatttcgccatcatgaccgaggtgctggcggagaaacagcagcaaaccggcgtgaaactgctgtggggcaccgccagctgctttacnnnnnnnnnnctgctgtggggcaccgccaactgctttacccacccgcgctatggcgccggggcggcgaccaaccccgacccggaggtgtttgcctgggcggccacgcaggtggtgaccgccatgaacgctacccaccagctcggcggcgaaaactatgtgctgtggggcggccgcgaaggttacgagtccctgctgaataccgacctgcgccaggagcgtgagcagattggccgcttcctgcagatggtggtggagcacaagcataagattggctttggcggcgcgctgcttatcgagccgaaaccgcaggagcccactaagcatcagtacgattacgatgtcgcaacggtgtatggtttcctgaagcagtttggtctggaaaatgagatcaaggtgaacattgaagccaaccacgccactctggcggggcactctttccaccatgaaatcgccagcgccatcgcgctgggcattttcggctccgttgatgccaaccgcggcgatgcgcagctcggctgggataccgatcagttcccgaacagcgtggaagaaaataccctggtgatgtatgagatcctcaaagccgggggattcaccaccggcggcctgaactttgacgccaaagttcgccggcagagcaccgacaaatacgacatgttctatggccatattggcgccatggacgtgatggcgctgtccctcaagctggccgcgcgcatgattgaggatggcaagctcgatcagggtctggcaaaacgctatgccggctggcagggcgagctggggcagaaaattatgagcgggcagatgtcgctggataatattgcccgatacgctgagcagcataatctgaatccgcagcctcagagcgggcgtcaggaattactcgaaaatctcgtcaatacctatatctttggttaa

SEQ ID NO: 137968 - DNA, 1455 bp, Enterobacter cloacae
atgagtaaaaacataatgcacagtcggcatgatgaatatcataaattaacccgtggagaacgaattggttatggcatgggcgactttgcgcaaaacctggttttcggcacaattgggggttttctggctttgcatatgctgacggtaaataccatcagcacggcaacggcaggctttatttttctttttgtccgtatcattaatgtgttttgggatccgatggtcggaacctatgtggataagcgaacctcgaaagcagggaaatatcgcccctggctgttacgagccggcgtgccgctagtgatcctgtcggcattactgttcgcgccaattcctggggtgaaaggttcggtggctttcgcctttattatttatctggcgctggacctggtttattccttagtcaatattccctatggctcgctgaatgcgtcgctgacccgcgacccggaatcgatcgataagctgaccagtacccgcatgatgctggccaacagcgccaacctgctggtctataccctgttcccgatgtttgtgcagatggcggcgccgaaagatcgcagcctgaaagacaccggcttttttggccttgagctgaatctcggcaactataccgatccgtcagcgaactacgcctggtttggcgtgtacgccatctatatgatcatcggcgcggtggccctgtttatctgttataaattcaccaaagaacgcgttgtcgcgaccgccgagcagaccgccaacgtcaaaactaccgaccttttccacgagctcagacataaccgtccgctggttattctcggcatgttctttatgctggcctttaccttcatgttcttcatgaacaccgttaacggcttcttcaaccagttcgtcgtcggccactccgaatggatgggcgccgtgggtctcgtcgcgtctattcccggcatcgccttcccggtgttctggccgaaactgaaaaaaatctttggtaaaaaaggcttcttccatctgttcctcgccatgttcatcgtcggcgaactgctgacctacgtctggtcccgcgaagggatgcacgacgccctgtggctggcctacatcgccacctttattaaacagtggggcttaacctccgccaccggttttatgtgggcgctggtaccggaagttatcgcgtacggcgaattaaaatcgggcaaacgcaatgccgccattatcaatgccattatgggactcttcttcaagatcggcttcaccatcggcggcgcgatcccgctgtggctgctggcggtgtatggatttaatgaaagcggcgccgtgcagagcgccagcgccatcgatgggatcattatgaccgcggtgtggatcccaatcgcgctggccgctatttcgatggtgatcatgcaggtttatccgatctccgataaacatgttaccgacatcaaccgtcagctggatgagatccgcgtgtag

SEQ ID NO: 137969 - DNA, 1680 bp, Enterobacter cloacae
atgtcacttattcaaaacccgatattacgcggctttaatgccgaccccagtattattcgcgtcgaggatacgtactatattgctaactcgacgtttgagtggttccctggcgtgcgtttacatgagtcgaaagacctgaaaaactggaacctgctgccttcgccgctctccaccaccaccctgctggacatgaagggcaacccctcctccggcggcatttgggcgccggcgctctcctgggccgatgggcaattctggttggtgtataccgatgtgaaggtcaccgaaggcgcctttaaagacatgaccaactacctgaccaccgcgaaggatattcgggggccgtggagcgacccgatcaagctgaacggcgtcgggtttgacgcctcgctgttccatgacgacgatggccggaaatatatcgtccagcaaacctgggatcaccgggagtaccatcaccccttcgatggcattaccttaacggagctggataccaaaacgctgaagttaatgccggaaaccgcgcgcaccatctaccgcggcaccgccgtggcgctggtcgaggggccgcacctctataaactgaacggctactactatctgtttgccgcccagggcggcaccgtgtttacccaccaggaggtggtggcgcggtcgaaaaccctcgaggccgacagcttcgaaaccgagccgggcgacgtgttcttaaccaacgtcgataccccggacagctacatccagaaacagggccatggcgcgctggtctccactccggaaggcgaatggtattacgcttcgctctgcgcccggccgtggaatcgcccgggggaatccatctacgacccgcgcggctggtcaaccctcggtcgggaaacctcgatccagaaagtgtactgggacgatgagggctggccgcgtattgaaggcggtcacggcgggaaaaccttcgtcgaagggccaaaagacgccatcttcaccgaaagcgccagcgataatagccagcaggatgactttacctcgccagcgctcgacccgaactggaataccctgcgggtgccgtttacggccaaaatgggcaccaccggcgacggcaaattaaccttaatcggccagggttcgttagccaatacgcatgacctgtcgctgattgcccgccgctggcaggccttctattttgacgccgcggtgaaggtgaaattcgagcccttcagctaccagcagatggccggattaacgaattactataacgaccgccactggagctttgtcttcctgacctggaatgaaattaacggcaaagtcatcgaagtcggcgaaaataaccgcggaaaatacacgtcgtacctgaaagataacgccatcaaggtgccggacggcgtggaatacgtctggttccggaccaaggtccgcaagcagacctacagctatgaatatagcttcgatggcgtgtcgttcaccgagatcccggtcctgctggatgccgcggtactgtccgatgactatgtattgcagagctacggcgggttctttaccggggcgttcgtcggcctggcggcggtagactacgccgggtacggcacccaggctgagttttatcagttcgagtatcaggagctgggcgataggttagcggccgatgggagctataactgggaggctggcgagacgcgggataagtaa

SEQ ID NO: 137970 - DNA, 1113 bp, Enterobacter cloacae
atggattcccaatctgaatgccttgaacttcgtggttcacagcgcctgctactggaactgatccgcaggcacgcgccggtgacgcgtgccgaactggcgcgattgtctggattgacggcgggagcgatcacccagcagtgtcgggaactgatgttcttaggtctggtggttgaaggagaacgtaataccggccagcgcggtcagccatcgctgccattgcgtcttaatcctggaggaggctgtgccataggattgtcgtttagtcccggcttcatcgatatgacagtcgtcgatctcagcggtcgccagttgttgtcactttccgaagcgcaccttgaaaatcagccgttgtccgccacactcgtgcagatcaaaaccttggtggagcagacgctgaaaaagcgccagctccagcacgcgcgtattctcggcattggctatgcggtgccgggctttctgaaagccgatggacgcaaacgccactgcgtgccctctttggagagctggcgcgatgcggatttacagcagacatttgctgacaatctgccgtggccgacgtgggtggagaataatgccaacgcagctgcggtaggtgagctatacagtggtgaatggaatgcgtacagcgatctgacctttatcgatcttggctacggtattggcgcagggattatctccgggcataaaatgctgcgcggcgggttctgcaatgctggtgaagttggaatggcgtttccatcaggtacgccgcgaccctcatataaggatctgcttgccacactggatcgcgaagggtttactgaaaaccagctgccggagttgatcgccgagcagcatccactactggaaagctggtttgaacgctgtagaggtcaggtggagcagactgtgtttggctgtgtacagtgggtggacccgcagataattgtgcttggtggagtgatgccaaaaccgattatcagccgactggtggaggagctgaaccagcggctagaaactcgtttcgatcctaaccgtccgcgagtgaggttggctgcgtcttcaatgggagtgcagagcgcatcaaggggggcggcgatgatcccgttgtatcaggtgataaatgaggggtga

SEQ ID NO: 137971 - DNA, 831 bp, Enterobacter cloacae
atggcatttaactttcatcgggcggcagagggaatagtactggccaacagtcaccgtgggttttccacttgcgcaccggaaaatacctttccagcatttgaggctgcacgcctggcgggaactcactgtattgaaatcgacgttcacctgacggtggataaccagttggtcgtcacgcatgatcaccgtatcgaccgggtgtcctctggtgatggctttgtcgaggagatgacgtaccttcaattgctggcatgcgactttggcatgaaattccatccctcatttatcggaacacacattcccctactggcggacgtattgtgctgggcggtggaaaatgatatggggctgattgttgaggtgaaacagcgtaaccgacacgataaatttgtttctgtactggtcgagctacttcacgagcaaccggaagccatcaaccatatccagttgttaggcttcaatcatgtgttaataaatcaggtgaaggcacaaattccacaactggcattacaggtggtaacgctggagcgttacaataaccaattggcggcggtgcaacaatcaaacgcctcatgtgtctgttttgaatttgagttcgcccatattggcgacctacgagcttacaaaaaagccgggctcggaatacggatgtttctgcatgaagtgagaaatggcatgactccgctggagcagtacgactataaattcggctgcgacagtcgttcgatgattatcggctggatgcaggcggggctgattgatatgctcagccacgacgatattccttacctgcaggggcttattgaagaagctggcctgcgctggggttag

SEQ ID NO: 137972 - DNA, 1338 bp, Enterobacter cloacae
atgaagctggcaattcacaacgaggtcgcggtaagcaatgacgaagttcggcaattagatcgcgcctatgtgtttcattcatggtcgatgcagggcaatctcaacccgctggtcatcgccggggcgcaaggctgcgagctatgggattatgaggggaacacctggctcgatttcagcagccagctggtgaacgtcaacattggctatcagcacccccgggtactggcggccatgaaggcgcagctggaaaccctggtcaccatcgcgcccgccaccgccaaccttgcccgcggcgaagcagcgaagcgcatcgtcgacctggcgccggcgggcttcagtaaggtgttcttcactaacgccggggcggatgccaatgagaacgcgattcgcatggcgcggctctataccgggcgcgacaaggtgctgtcggcctatcgttcctatcatggcaacaccggcagcgcgatcgccgctaccggcgactggcgccgggtgccgaatgagttctcccgcggccacgttcacttcttcaacccctacctttaccgcagcgagttcaacgccgcgactgaggaagaggagtgccagcgcgcgctggcgcatctgcggcggatcattgaatgcgaggggccgacggccatcgcggcgatcctgctggagtccatccccggcaccgccgggatcctcgtgccgccggcaggctatatgcagggcgtgcgcgccctggccgacgagtttggcatcgtgctgatcctcgatgaggtgatggccggctttggccgcaccggcagctggttcgccttcgagcaggatggcgtggtgccggatctggtgacctttgccaagggggttaacgccggctacgtgccggcgggcggggtgctgattagcgagccgattgcccgctactttgacgaccacttctttgccggggggctgacctactccggccatccgctggcgatggcggcgattgtcgccaccatcgacgcgatgaaagaggagaaggtggttgagaacgcggcctctatcggcaacgaggtgctgcgccccggtctcgaggcgctggcggagaagcacgccattatcggcgaggtgcgcggtcgcggcctgttccaggcgctggagctggtgagcagccgtgaacaaaaaacgccgctgaccaccgccgacatggccgcgatcaaaggggccttaaccgaggccgggctgttggcctttgtggtggagaaccgcattcacgtggtgccgccgtgcaccattactgctgagcaggtggcgcaggggctggcgatttttgatgcggtctttgctcgctttgccagcctggcgaagtag

SEQ ID NO: 137973 - DNA, 765 bp, Enterobacter cloacae
atggcaacgagcaacgtagtgtttatcaccggggcgacctcgggttttggcgaagcggcagcgcaggtgtttgccgacgcgggctggtcgctggtgctgagcgggcgccgctatccgcgactgaaggccttgcaggacagactcgccgccagggtgccggtgcatattattgagcttgacgttcgtgacagcgaggcggtggctgccgccgtggcgtcgctgcccgccgatttcgccgatatcaccaccctgatcaacaacgccgggctggcgctgtcgccgctgccggcgcaggaggtggcgctggaggactggaaaacgatgatcgacaccaacgtcaccggtctggtgacagtcactcacgccctgctgccgacgctgatccgccatggcgccggggcgagtattatcaatatcggctcgatcgccgggcagtggccctatcccggcagccatgtgtatggcgccagcaaggcgtttgtgaagcagttcagctataacctgcgctgcgatctgcttggcaccggcgtgcgggtcaccgatctggcgccggggattgccgagaccgaattcaccctggtgcgtaccaaaggcgaccaggcggcatcggataagctctatcgcggcaccacgccgctgagcgcgcacgatatcgccgagcagatgttttatatcgccacgttgccggcgcatatgaacattaaccgggtggaggtgatgccggtgcgtcaggcatggcagccgttcgccatcgatcgggattaa

SEQ ID NO: 137974 - DNA, 762 bp, Enterobacter cloacae
atgcctgagtctattgccgtaagcgtcaaaaacgtctccaaacagttcgataatgtggaagtcctgcgggatattaacctgacggtggagaaggggaccgtggtgagtattctcggctcgtccgggtcgggaaaatccaccctgttgcgctgtatgaactggctggaacagccggaccgcggtgaaattcatatcggcggtcagcggctggggattgatgaacagcgcggccgggcgatgtcgcaccgccagctggccaaaatccgcgagcgggtggggatggtctttcagagttttaacctgtggccgcatctgaccgtgcagcagaacgtcagcgaggcgctgctgcgcgttaagggcatgaaacgagacgaggcgaaggccatggccatgcagcagctggagaaagtgggcatggcgcacaaagccgatgtttacccgatcactctctccggcgggcagaagcagcgggtggcgatcgctcgttcgctggcgatgtcgccggaagttattctcttcgatgaaccgacgtcggcgctggatccggagctggttaatgaggtgttgggggtaatgaaagcccttgccgccgagggctacaccatggtggtggtgacccacgagatggattttgcccgccaggtgtccaatgaggtggtgtttctggagaaggggctgctgatagagaaggcgccgccggagaagttcttcactcagcctgactccgaacgcgtcaggcagtttctgcaaagcagccgttag

SEQ ID NO: 137975 - DNA, 666 bp, Enterobacter cloacae
atgaatcagtggggcgttatctggtcggttcgcgatagctttattgccgggttattcgcgaccctcgaactgtttattaccgccgccctgggggcgctgattatcggtattgcgctgtgttattttagcgaatatcaaaagaaagtaattaaccggattattattggtttcgtcagcctgatgcgcgcgatcccttttttgatcttcgcttatcttctgtattacggactgccgcagctcggtattagcatggagccgtggaccgccggtttactggccctgattatttatcatggcgcctatttctttgaaatattgcgcagccagcggcgggtattttccggcggatatattgaagcggcgattgctcagggcttttctcgctatgccatttttcggcggattattttacccaatatcgtctcttccgccttaccgctgatcggcaatcagctgattatttgcctgaaggacaccgctttcctgagcattattaccgttcaggagatcaccgccgccgccaacagcgtccaggcgacctattttattccgtttaacgcctttatcgtcgccattgggctttactgggcgatcagcattctgctggagctgctgattaagcgcctgaccgcctggggagccaaaagaggaatgagccatgcctga

SEQ ID NO: 137976 - DNA, 642 bp, Enterobacter cloacae
atggatgcaatttcctggcagttattaatcgaaggcgcatggacgaccctctggatttcggccatcgctatcgccttcggggtggtggctggcctgctgatcgccctggtacggatgctgcgcctgccggtgatcgaccagctgctggtggtctatatcagtctggcccgcgcgacgccgctggtgacgctggtgctatttctgttcctttccctgcccacgatgggcattaacctcgacaagaacgtggccgccatcgtggcgctgacgcttaacacgtcggcgtttaacgctgagatctggcgcaatgccttccgcacctttccgcgcgaacagcgggaggcggcggagtcggtagggatgcgccgctggacctacttccgctacatcatgctgccgcagatgtggatcgagagcctgccggcgctggtcaatgagatgtcctttttgatcaaaggtagcccggcgatcgccgtgattggcgtggtggatctcacccgggtcaccaaccgtatctcctcggtcacctacgagccgctgtcgccgatcctcgccgccggcctgctgtatgtggcgatcatcggctgtttgttgaagctgcagggtatcgcggaacgtaaagccaggcgtctggcgcgctag

SEQ ID NO: 137977 - DNA, 852 bp, Enterobacter cloacae
atgaaaaaatcattggcatcaatgtgtctgagcgctgtattaacggtcgctttttcttatcacgccgtcgcggccgatcttccggaaatagaaaaatccggcaccctgaaagtggcgacggaagatgattatgcgccatttaactttatgaataatggccaggccgatggctttaacaaagatatgcttgaggaattacgtaagtacgccaaattccatgtcgaccagagcatattaccgtggaccggattattagcggctgtctccaccgggcaatacgatatggccttaaccggggcggttattaccgatgagcggctgaaggtctttgatttcaccccaccgtgggcctccgcgcagcactatttcgtcaaacgcgctggcgatacctcgctaaataccattgccgatctcagcggcaaaaaagtggggttacaggccgggagcgcgctgctggcgcgtttgccggagctgaaggcgatgctggagaagaccggcggcaagctgggaccggtggtggagtatccctcctatccggaagcctacgccgacctggcgaataagcgactggattacgtgattaacgtcgtcatctcggtaaacgacctggcgaaagccaaaccgaaggtcttcgccaaagggctggccgtctccggaccggggtatatggcgtggccgatcccgaaaaactcgccgcagctgctggcctatatgaccaggtttatgaaccacatgaaggagaccggcaagctcgccgagctgcagaaaaaatggttcggcgaaacctatgacaacctgccgaccgaggcgatcaccagcccggaacagtttcacaaactcgccggactgtaa

SEQ ID NO: 137978 - DNA, 1464 bp, Enterobacter cloacae
atgatccgtcacctgttacacgttgattttcagcctggccgcggtttgcaggaacaggtgcgagagacgctggtgaatgccattctcagcgggatcttcgccgccgacaccccgctgccctcctgtcgccagctggccagccagcttcgcgtctcgcgcaacaccaccgcgctggtgtttgaaagtctggtcaacgagggctacctgattagccgcccacgaagcggttactacctgcatcccgactatcatgaggcttcgcctgccgccgtcgagagtgcaccgcagcgcgaagccgctgcaccacgctggggcgaccggctgcagatgacccccagccagcaggagtcgatcctcaaaccggcgggctggatgcactaccgctacccgtttatctacggccagcccgatacccggcagttcccgctggccacctggcgctcggcggcgaactggctgcacggcggggtgcgcgacccggcgtgggtcatcgaccatattgaccaggatgtgccgatgctgatcgagcagatccgcacccgggtgctgcccaagcgcggcattgtcgccgcgccggatgaaattctcatcacccttggctcgcaaaatgccctctacctgctgacccgactgctgctctcttccaccacccgcattggcgtcgaaaacccctgcttccgcgaagccatcaacacctttctgctcgccgacgccgaggtggtgccgcacccggtggatgaagaggggatcgtgcttaatgagcgtccctgcgattactactatgtcactccaggtcatcaggtgcccaccggggtgaccatgagcagtgcgcggcgtcgccagctgctggagcatgccgcccgccatgacgcggtcattattgaagatgattatgactcggagagtaactttaccctcaacccactgccggcgctgaaggccagcgatcgcagcggccgggtggtgtatgtcagcagcctgtcaaaagcgctgtcaccggggctgcggttggggtttatggtcgccgacccggacctaatcgacgaggcgcgcgccctgcgccggctggtctatcgccatccgccgaccaacattcagtaccagatggcccacttccttgcccagggccattatgaaacccatctgcggcgctaccactatgactccgcccagcgctgggaacgcctgcatgccgccctgcagcgctatctgccgtcgtgtcgcgctctggcggggagcgaacatgctaacgccttctggctgcagaccccggcgcagatcaacacccagcaactcacctggcgcgccgcccacgccggcgtgctgattgagcccggagcgcgccattttctcagcgccgcgccgccggataactattttcgcatgggattccacgccattaaccccgacgccatcgcccagggggtggaggtcctgcgcggccagctggagcagatgggttag

SEQ ID NO: 137979 - DNA, 1335 bp, Enterobacter cloacae
atgaaagcccgatataaagccgttgtcgaccgatatgcgcaggcgatccgcagcgggcagctgcccgccggcacccgtctgccgacgcaccgtacccttgccgccggggagcgcatctcgctggccaccgccacgcgcgtctatcgtgaactggaagagatggggttggtcagcggcgaaaccggccgcggcaccttcgtgcgcgacctctcgctgccgccggggcacggggtcgatcagcaggtggtggccgccgatgtcgtggatctcaatttcaactacccttcgctgccggatcagggcgatgcgctgcgcgaggcgctcaggcagctggcgatggcgggcgatattgactcgcatctgcgctatcagcctcacgccgggcggctcgccgagcgggacattatcgcccgccatttgacctgccagcactttgcgccggacgcggaaaatgtcctgatcgtcaacggcgcacagcacgggctggcggtgaccgtcatggggctgttacgtccgggggatgtggtggcggtggatgcgctgacctattcgggcttcaaggttctggcggcgctgtatcatctggagctggcggcgatcccctgtcgaccggagggaccggacctgcaggcgcttcagacgctgtgccagcagcggcgggtgcgggcggtgtataccatgccgacgctgcacaatccgctgggctgggtgctcaacaccgggcagcgacaggcgctggccgatctcgcgcgccagcacgatctgctgattgttgaggatgccgcctatgcccggctggtgagccatccgccgccgccggtggtcagctatgcgccggaaagaacggtgtatgtcaccggattttcaaaaaatatcgccaccggactgcgcgtgggggtggtgatttctccgccgcgctatcggccggagattgagcgcgccatccgggccacgacgtggaatacgccgacgctgataagttcgctgatctgcgcctggattgaagatggcacggtggcgcgctttgaaacgcagaaacgccaggatgcgcgacagcggcagcaggtggcccgcgaggtgctttgtgggcttcccgtcgtcagtcatcccgattcgtacttcgtctggctgccgctgggtgaagagagccgggccgatcgactggcgaatgcgctgatggaacgccgtatttcggtgtcgaccgccgagccgttctgcgtctccgccacgatcccgcaggcgctgcgcatcgcgctcggatcggtgcctttcgacagtctgcgcccggcgctgctcagcgtgcgcgacgccgttgagtatgaacaataccgctaa

SEQ ID NO: 137980 - DNA, 924 bp, Enterobacter cloacae
gtggtagattcagcaatggataaatcggcgcccggtccctggtccggatgggttcatggtttactgggggtgatcattttcagcggttcgctgcccgcgacgcggctggcggtgcaggatatggatccgttgttattgacctttctgcgcgcctctatcgccgggctgcttgccatcgcgctgctggtgggctttcgccagaaacgcccgcgcctggcgcagcttgtgtccctgatcatcgtctcatccggggtggtgctcggctttccgctactcacggcgctggccctgcagcgcatcacctcggcgcattcgattgtgtttattggcctgctgccgctgatgaccgccctctttggcgtactgcgcggcggcgaacgcccgcggcgggctttctggatcttttcgctgctgggcagcctgctggtggtgggattcgccctgacgcaaaatgcggcggcctcactcagcggcgatctgctgatgctggcggcggttatcgtctgcggcctcggctatgcggaaggggcgaagctgacgcgggagctcggcggttggcaggtgatctgctgggcgctggtgattgccctgccgttgatgctccccgcctcgctgctggttcagcccgcatcctggcatgccatctcggcctcctcctgggcggcgctcggctatgtgtcgctgttcagcatgctgatcggtttcatcttctggtacaaagggctggccgcgggcgggatcgccgccgtcggccagctccagctattacagccgttcttcggacttggcctgtcggcggcgctgttgcacgaaaccgtcagccctttgatgctggcggttacgctgggcgtggtgctgtgcgtggtgggctcgcgcaaatttggccgccagcgggttggcgaagagaacgggggcaacaattga

SEQ ID NO: 137981 - DNA, 1116 bp, Enterobacter cloacae
atgcctttagccgattttcaccgctccgatccttttaccctcggtatcgaactggagctgcaggtggtgaacccgccgggttacgatctcagccaggatgcctcgacgctgattgccgacgtccagcatgagctgaccgtgggagaagccaaacacgacatcaccgagagcatgctggagatcgccaccggggtgtgccgcgacatcagccatgcgcaaatccagctcagcgccatccagcaggcggtccagcgcgcggcgctgcgccatcatctgcagatctgcggcgggggttcccacccctttcatgcctggcagcgccagcaaatcagcgataacccgcgctatgtcaaaaccgtcgagcattttggctatctggcacagcaggcgacggtctttggccagcatgtgcacgtcggctgccagagcggcgacgacgccatctatctgctgcatggcctgtcgcgctttgtaccgcacttcatcgcccttaacgccgcctcaccgtggtttgacagcaccgacagccgcttcgcctgttcgcgcctgaaccgcttctcctcctatcccgacaacggtccgatgccgtgggtggccgactggcaggggtttcgtcgcctgttccgccagctgagctacaccagcatgatcgacagcatgaaggatctgcactgggatattcgccccagcccgcagtttggtaccgtcgaggtgcgggtgatggacacccccttgacccttgcccaggcgatccacatcgccggctttattcagaccctggcctgctggctgttgacggagcgtccttttaagcaccagcctgatgattatctgctgtacccctttaaccgctatcaggcctgccgctacgggctggacgggaccctcaccgacgtgcgcagcggggagcagcgcagcatccgccaggagatcctgcagctcgccgaccggctggcccctttcgcccatcagctgaaggcgacggcagcgctggaggcggtggttcgccaggcgaaatcgccgcaaagcgaggcgcagcagatgcgcgactttatcgccaacggcggttcgctttccgggctggtgcaaaaacactgtgagatttgggcggcataa

SEQ ID NO: 137982 - DNA, 432 bp, Enterobacter cloacae
  misc_feature (365)..(374): n is a, c, g, or t
atgttattacgttgcctgctccctctggcgctgctgcccctggccgccgtcgccagcgccgcctgtaccctcaccgacccgacgctgaccctgcagagctatcgggtggatgcgcagaaagagcgcattgcgatgtactggcaggatcggcacggcaaagcctggggttccctgcgttcgctgctggcgggtatcgatggcgacggccgagtgcagatggcgatgaacggcggcatttacgataaggcctacgcgccgctggggctgtatatcgaagacggcaaacggctgacgccggtcaaccgctccgccggcggcgggaacttctttatccgccccggcggcgtattcctggtggaaaacgnnnnnnnnnnccggcgtacaaaccctctcccgccatccgctatgcggtgcagtccggcccgatgctga

SEQ ID NO: 137983 - DNA, 282 bp, Enterobacter cloacae
atgctgattgaaaatggcgtcatcaactggcgactgaagccctccgccagttcgcgcaagctgcgcaacggggttggtatcgataagcagggccgggtggtgtttatgctcagcgatcgcgagaccaacttttacgattttgcctgctatgcgcagtcaaagcttggcgtgcggcagatgctttatctcgacggcaccctgtcgaagatgtaccgcaaaggcggcagcgtgccgtggcagtatcatccgttcgtgaccatgataacggtggagagaaaatag

SEQ ID NO: 137984 - DNA, 789 bp, Enterobacter cloacae
atgggaagacaaaaagcagtgatcaaagctcgtcgtgaagcaaaacgtgtgctgagacgggattcacgcagccataagcagcgtgaagaagaatcggtcacatcgcttgtgcaaatgagtggcgtagaagcaattggcatggcgcgggacagccgtgatacttccccaattgaggcgcgcaatgaggctcaggcgcattatttgaatgccatcgacaataagcagctgattttcgctaccggcgaagctggatgcggcaagacctggatcagtgcggcgaaggcagctgaagccctgatccataaggatgtggacagaattattgttacccgtcccgttctgcaggccgacgaagatctcggcttcttaccgggagatatcgccgagaagttcgctccctatttccgaccggtttacgatgtgctggtgaaaaggctgggggcttcctttatgcagtactgcctgcgtccggaaataggcaaggtggaaatcgcgccgttcgcctatatgcgcggacgtacctttgaaaatgcggtggtgattctggacgaggcccagaacgtgaccgcagcgcagatgaagatgtttttaacccgcctcggggagaacgtgacggtcatcgtcaatggcgatatcacccagtgcgacttgccctctggcgtgagatctggcctgagcgatgcgctggcgcgttttgaggaagacgagatgatcggcattgtgcgtttcaccaccgatgactgcgtgcgctcggccctctgccagcggacgctgaaagcctattattaa

SEQ ID NO: 137985 - DNA, 1284 bp, Enterobacter cloacae
atggcacagcagaaaccccacgacgtgaacgagccgtcacgtcgtcgcttactgaaagggatcggcgcgcttggcggcgcgctggccatcaccggtggctgcccggtagcgcatgcggcaaaagcggaaagttccccggggacgctcacacccgacgcgcgccaggaaaagcagccattctttggccggcatcaggcgggcattctgacgccgcagcaggcttcgatgatgctggtggccttcgatgtgctggcggctgataaagccgacctcgagcggctgtttcgactgctgacccagcgtatcgcctttttaacccagggcggcccggcgccggacacgccgaatccgcggctgccgccgatggattccggcatcttggggccgtggattgcgccagataacctgaccatcaccgtctcggtcggccattcgctatttgatgagcgctttggcctggcggataaagcaccgaaaaagctgcagccgatgacccgcttccccaacgattcgctggatgccgcgctgtgccatggcgacctgctgctgcagatctgcgccaatactcaggatacggtgatccacgccctgcgtgatgtcatcaaacatacgccggatctgctgagcgtgcgctggaagcgggaagggtttatctccgacagcgcggcgcgcagcaaaggcaaagagacccccatcaacctgttggggtttaaggacggcaccgctaacccggcgagccacgacagcgcgttgatggataaggtagtgtgggtgacagccgatcaggacgagccggcctggaccgtgggcggcagctatcaggcggcgcgaattatccagtttcacgtggagttctgggatcggacgccgctcaaggagcagcagacgatctttggtcgcgacaagcacaccggtgcgccgctggggatgaaaaacgaatacgataccccggattacagtaaagatcctaacggcgaagtcattgcgctggatagccatattcgtctggccaatccccgcacgccggaaacccagtccagcctgatgatgcgccgcggatacagctattcgctgggggttactaacgccggacaactggatatggggctgttattcgtttgctatcagcacgatctggaaaagggttttctgacggtgcagaaacgacttaacggcgaggcgctggaggagtatgtcaaaccgatcggcgggggctacttctttgttttacccggcgtagttgatgaaaaacactatctgggagagtcgctgctgcaggcctga

SEQ ID NO: 137986 - DNA, 1128 bp, Enterobacter cloacae
atgatgattcattttcgccgtaatgcgctgcgggtgaccgtggccgcgctgctcagctctgcattcggtgctcaggctgcggatatcccgcaggtcaaagtcaccgtcaacgacaagcagtgcgagccgatgcaggtgaccgttaacgcgggtaaaacccagtttattattcagaaccacagccagaaagcgctggagtgggagattctgaaaggggtgatggtggtggaagagcgcgaaaacatcgcgccgggctttactcagaagctcaccgcgaacctgcagccgggcgaatatgacatgacctgtggcctgctcaccaacccgaaaggcaaactgatcgtcaccggcgccgccaccaaagacgcggcgaaagcggatgcggtgctgagcctcggcgacgcgatcaccgcctataaagcctatgtgacggcggaaaccgcgcagctggttagcggcaccaaagcctttaccgacgcggtgaaagccggcgatatcgaaaaagcgaaagcgctgtacgccccgacgcgtcagcattacgagcgcatcgagcccattgccgagctgttctctgaccttgacggcagcatcgacgcccgcgaagacgacttcgagaaaaaagcggaagatccgaaatttaccggtttccaccgtctggaaaaagcgctgtttggcgataacagcgtcaaggggatggaaaaatatgccgatcagctgaacagcgatgtgctggagctgcaaaagcgtatcagcgagctggcgttcccgccgtcaaaagtcgtgggcggcgcggcaggattaattgaggaagtcgcggccagcaagatcagcggtgaagaagatcgctatagccataccgatctgtgggacttccaggccaacattgacggcgcgcagaaaattgtcgacctgctgcgcccgcagctgcaaaaagagaacagcgcgctgctggcgaaagtggacgccaactttaagaaagtggacagcatcctcagcaaatatcgcaccaaagacggtttcgaaacctacgataagctgaccaccgccgaccgtaatgcgctgaaagggccgatcaccaccctggcggaagatctggctcagctgcgcgggatcctggggctggactaa

SEQ ID NO: 137987 - DNA, 1218 bp, Enterobacter cloacae
atggcggccttattgacttgcgaaaagaacaacatgactgcattttttcatttcctgctggcgctggcggtgatcctcgccctggcctggcttgtcagctacgacagacaaaaaattcgtattcgttatattctccagttgattattatcgaaatagcgctcgctttctttttcctgcacgccgaaagcggcctgtggctggtaaaaaatatttccggcttttttgcttcgctgttaggctttgccgccgaagggaccaatttcgtctttggcggcatgagcgaaaaaggcttagcctttattttcctcggcgtcctgtgtccgattgtgtttatttccgcgctgattggtattctccagcactggcggatcctgccgatttttattcgcgtgattggcaccctgctgtcgaaagtaaacggcatgggtaagctggaatctttcaacgccgtcagctcgctgatcctcggtcaatcggagaacttcattgcctacaagggcgtactgggcgacctctcctcacggcgactgttcactatggcggcgacggccatgtcgaccgtatcgctgtcgattgtcggcgcctatatgaccatgctggacgccaaatatgtcgtcgcagcgctgatcctcaatatgttcagcacctttatcgtgctgtcggtaattaacccgacgcggccgggcagcgagcaggaaataaaactcgagaagctgcatgaatcgcagagtttctttgaaatgctcggggaatatattctggccggctttaaagtggcgatgattattctggcgatgctgatcggttttatcgccctgatcagcgccattaacgcgctattcgccaccctgtttggtctcagcttccagcagatcctcggctacgtcttttatccgctggcgtggcttatcggcatcccgctgagcgatgcgctaaacgccggcagcatcatggccaccaaactggtcgctaacgaatttgtggcgatgattgagctgcaaaagattgccgccagcatgacccctcgcgggctcggcattctctcggtattcctggtgtcgtttgccaactttgcctcgatcggcattatcgccggggcgatcaaaggcctgaatgaaccgcagggcaatatcgtctcccgcttcggcctgcggctggtgtatagcgccaccctggtaagcctgctttccgccagcttcgccgggctggtgctgtaa

SEQ ID NO: 137988 - DNA, 435 bp, Enterobacter cloacae
atgacgttcagacagggtgcaatggcgctggtgctggcagggttactcagcggctgcgtggcgggtggaagttcatcgaccagcgcgctgaagcccggcgtctgcccggcggataagtccatggtgcaaaccacgctttacttcggtctgagccgcccggcggggaaagacatcaccgctgaagagtggcgacagtttgtcgaccgtgacgtcacgccgcgctttcgcgacgggctgacggtgtttgatgcccacggccagtggcttggccagaatggtcaggtggtgcgggagcagagcaaggcgctgatggtgatccatgggcatgacgcgcagagcgaggccggtattgaggctctgcgccagggctataaatcacgcttcgcgcaggagtcggtgatgcgtgtcgaccagccggtctgcgtgcagttctga

SEQ ID NO: 137989 - DNA, 1509 bp, Enterobacter cloacae
atggctattagcacaccgatgctggtgacatttattgtttatatttttggtatggtattgatagggtttattgcctggcgttcgaccaaaaacttcgatgattatattctcgggggaaggagtctggggccatttgtgaccgcgctttccgcaggggcgtcggatatgagcggctggctgctgatgggcctgccaggggcgatttttctctccgggatttccgaaagctggatcgccattggcttaacgctgggggcgtggattaactggaagctggtggccggtcgcctgcgtgtgcataccgaggtgaataataacgccctgacgctgcccgattattttaccggccgttttgaagataaaagccgggtgctgagaattatttcggcgctggttattctgctgttctttaccatctattgcgcttcaggaattgtcgcgggggcgcgtctgtttgaaagcaccttcggcatgagttatgaaaccgcactgtgggccggggcggcggcgacgattatctataccttcgtcggcggcttcctcgccgttagctggaccgataccgtgcaggccagcctgatgattttcgcgctgatcctcaccccggtgatcgtgattatttccgtcggcggctttggcgattcgctggaagtgattaagcagaagagcatcgaaaatatcgacatgctgaaagggctgaacttcgtggcgattatctcgctgatgggctgggggctgggttatttcggtcagccgcatattctggcgcgctttatggcggcggattcgcaccacagcatcgttcacgcacgtcgcattagtatgacctggatgatcctctgcctcggcggggcggtggccgtcggcttctttggcatcgcctacttcaataacaacccgagcctggcgggcgcggttaaccagaacgccgagcgcgtgtttatcgaactggcgcaaatcctgtttaacccgtggattgccgggatcctgctgtcggcgattctggcggcggtgatgtccaccctgagctgtcagctgctggtctgctcgagcgcaattaccgaagacctgtataaagccttcctgcggaaaaacgccggtcagaaagagctggtgtgggtgggccgtatgatggtgctggtggttgccctggtggccattgccctggcggccaatccggaaaaccgcgtgctgggtctggtgagctacgcctgggctggcttcggcgccgcctttggcccggtggtcctgttctcggtaatgtggtcgcgcatgacccgtaacggcgcgctggccgggatggtgattggcgccctgaccgtgatcgtctggaagcagtttggctggctgggcctgtatgaaatcattccgggctttgtcttcggcagcatcgggattgtggtctttagcctgctggataaagcgccgtcggccagcatgcagcagcgctttgccgaagcggatgcccactaccatacgccgccgccggtacgcgccacggctgagtaa

SEQ ID NO: 137990 - DNA, 2013 bp, Enterobacter cloacae
ttgaataacgcccggcggcacgccggcttccagcagaatcgccacgccctgggcggcgataagcggcgtctgctcggcaggtttcgccagcacgctgttgccggccgccagcgcggcggcaatctggccggtgaagatcgccagcgggaagttccacgggctgatacagaccaccggacccagcgggcggtgagtttcattatcgaaatcgtcgcgcacctggccggcgtaatagtgcaggaagtcaacggcttcgcgcacttcagcgatggcgttgctgaaggttttacccgcctcgcgcaccaggatccccatcagggtcggcatttggctttccatcagcaccgcggcgcgctcaagaatggcggcgcgctcctgcggcggagtggcgaaccagatcggcgcattgttgatagcgctggtcagcgcctgctgcacttcagcgtcgctggcttcgcggacgtagccgacgatatctttcggctctgccgggttaaccaccggctgcatctcgccttcggccaccggctgctccagcatcggcaatgcctgccatttatgcagcgcgctgttgagcagggaagaggagagggaggccagacggtgctcgttcgccagatcgagaccggcggagttgctccggccgctgccgtagagatcgcgcggcagagggattttcggatgcggcaggccggcctggccttcctgctgcgccagtttttctaccgcgctgaccgggtcggccaccagctcgtccagcggcagggtattgtccgcgatacggttgacgaaagaggtattggcgccgttctccagcagacgacgcaccagatacgccagcagcgtctcgtgggtgcccaccggggcgtagatgcggcacggacggttcagcttgccgtcagcgaccttgcccaccacctgctcgtaaagcggttcacccatgccgtgcaggcactggaactcatactggcccgggtagtagttctggcccgccagctggtagatagcagccagagtatgggcgttatgggtggcgaactgcgggtaaatcaggttcggcaccgccagcagcttcttcgcgcaggcgaggtaggagacgtcggtgtaaaccttgcgggtgtataccggatagccttcgagaccttccatctgcgcgcgtttaatttcgctatcccagtaggcgcctttcaccagacggatcatcaggcgacggcggctgcgggtggcgaggtcaatcaggtaatcaatgacaaatggacagcgcttctggtaggcctgaatcacgaagccaatcccgttccagccggccagttccggctcgaagcacagtttttccagcaggtcgagggagatctccagacggtcggcctcttcggcgtcaatattgatgccgatgtcatactggcgcgccagcagggtcagcgatttcagccgcgggtaaagctcttccatcacccggtcatactgcgcgcggctgtagcgcgggtgcagcgcggagagcttaatggagatacccggaccttcataaatgccgcggccgttggaggctttgccgatggcatggatcgcctgctgataagagaccatataggcctgggcgtcagcggcggtcagggcggcttcgccgagcatatcgtaggagtagcggaaccctttttcttccagcttgcgggcgttggccagcgcttcggcgatggtttccccggtgacgaactgctcgcccatcaggcgcatcgccatatccacgcctttgcggatcagcggttcgccgctcttgccgatgatgcggttcagggagcgggagaggctggtctcgttatgggtcgacaccagttttccggtgaacagcagcccccaggtggcggcgttgacgaacagcgacgggctgcggccgatgtgcgactgccagttgccgttgctgattttgtcgcggatcagcgcatcgcgggtggctttatccggaatacgcagcagggcttccgccaggcacatcagcgccaccccttcctgtga

SEQ ID NO: 137991 - DNA, 2955 bp, Enterobacter cloacae
gtgcttcgcctgtctggtaagtcagaccaagcagtgtttgagcttacccaagccatgggtggcggtaaaacccacatgatgattgcgttaggcttgcttgcaaaacacacacatttgcgtcccgaggtcttatcccctgatcttaatgagcgcttagattttggtaatgcaagaattgctgcatttaatggtcgaaataatcctgataattacatctggggggatattgcaacccagctcggtgagtcagataaaattaaacagcactggattaatgggcctaaatctgttgaccaacaaaagtggaaggagatcattggcaatactccaacattgataatgattgacgagttgcctccctatcttgataacgcaagtacccaagtatacggctcaggtacactcgccaacatggtagtgtacagccttagtaccttaatgagtgcggcattagaactcccaaattgctgtatcgtcattgccaacctatctggtagttatgatgctcaaactaaaacactcaaagacgcaatttcaaacctgcagcaagaaacccgcagacaatcgatgaccatcaccccggtacaactatcgggtaatgaaatttatgagattcttaaaaagcgattgattgatgagttgcctgatgagcaaaccattaatgaagttgctgaggaatacgcacagcaaatcaaaaaggcagaagacggtgggtacattgttgcagcaagtatcgaacaaatcgctgaacaagttagagagacttaccccttccatccatcgtttaaacatttagttgctttgtttaaagaaaacgaggggttcagacagactcgtggcttgatgcagtttacagctcgactattaaaaagtgttgaacaacgccaagaggatgatgttttccttgtcggtactcagcatttggacctcaacgatgagcaagttaaggatgaaattgagcgaatttcaccaaaactgattccagccgtcactcgagatattgcagataagggggatgcgattgccgaaaatatcgatagcgaaatcagtaacgacgcagcttgccaattaatgacgttgcttcttgcatcgtcattatctcgtgctgtagggggacgtattggtctgtcggaaagtgaaataattgaattcttggctgcgcctaatcgtaaagcagatgagttcttagatgctcttcaaaagctgcgtgaacaagcatggtatctgcaccgtgaagaccagcggttttatatcaaggaaacagaaaatctttctcgccagattgagcgtaacgctaaggaaattcctcagccaaaaattgatcaagctttaatcaatcggctcaaaggaattctacagcctactcgtcgtaacgtttatcaagaagttcagattcttccacgcatagatgaactcaagttaagtggtcctcgtgtccttatcgttattaagccggatggcaaagtaccgcctagcgaactcattaacttctttgagtatcagcaggaaaagaacaatctcctagttcttactgggcaagatagcatgatggccgatgcagttgaagatcgattgcgtgagctttatgcaattgaacagattgttaagcgcctcaagggaggggacaccttgtttgaggaagcgcgagatagattagaagaagctgagggccgttttatcaaagccttatctgcatcctataacaccatactttttcctggtattgatgatattgatggctctgaccgtttactaaaagtcacaatcgatcatgggttgaaagtgggagaaggtgaccaatctgccgaagtgcaaattgaaaagcttatggcagatccacgagctaactataaattagcttcagatttgaaagatgactttggtcagtatttttctatggcagagtcggagctttggccttctggtgcaaataatcgccgtacaccatggaaagatatcgtcaatcgcgccaagtgcaacccagtctggccttggatgcctggtagcagtggcatggataccctcagaactgaagctctcaagcaggggcgatggagaatgggggaggacggctatatagaaaaagggccattcccgaaagaaaaaaccagtgtgaacgtcactctgataagcaccaatcctgaaactggggagtccttgctcactttaacgccgcgaaatgcaggtgagagtccggttatttatttctcaaccaaatcagaagtatttgatagtgacccacaagttcttgatttagaaaattttagtactttggaaggtaccctttattttaaagtggttgatccaactggaaagtacgaatgtggacccgcaacgcgctgggttgctgaactaaaaattagacatcaaattgaaccatctgcagacatgcgcaaggttaccttacagtgcagtcctaaagcggagatgtactacaccttggatggctctaatccgaaagatgggcaactttatacggtcccatttgaagtaggaactgaatctgcccgcttgctgatttatgctaaatctggtgaagcaaccaaaacagctgacttccagattccaaatagtggtgacaaaactattcaaatagatgatgtcaaacctgcgcggttaagtagtagtaagcgtgtaccacttgatacaactgaaaaggtctttacgatcattaaccgtttcaaagaccagatgaatactcgctttaaaggagttcgtattgagattggtgagggcgagaatactgttcgtataaacttcggtgtgagatatgttacagccgcaatgatcgaagcttctgtgaatagtcttcgcgaagtgttaagtgaagcagatgcgaatgtagctatcaaaattaccgacggtattgcttttgaaaatggctttgaagccagagagttcgccaagttagttggtattgaattgaaaccaggtgacattgctcaagaagagtaa

SEQ ID NO: 137992 - DNA, 1092 bp, Enterobacter cloacae
atggcaaaggcacaatcaaacataaccacgacaggtgctaaacatccgacgctggggttcggtgtgcctgctagcagtgatcctcaccactttaaagtgatcataccaaaggcaaacaccggcaaagtgcaaatcagtgagtatctcggtttgcaggcgcagagcaaagaaatttccgtgatagatcgtgtgctattagaccgcattcgttgggtcgcgatacgcggtgaggttcaacgtgcgtttaatgcacgcttgaaaagttacggcttacaaactagctcatggcaagtaggtgaaaacatgctcgatcgtttgttgggcaaagagctctgtgtgctcgcttgggcaattgagagtatggacattgataatatttcccttgctgtgcgtaattggctagcacttcgtcccgaggagcgttggtggttgtttgggatgactgctaaaagtactgggactgttgaagatcgtgatgttggttggcgtattgctctgcgtcatgcacttggtgatattgtacaaacagatcagatagaactaacccaggatagtagcgtttcttatggtcggcatatacctaagccatatgaaatgaaatcaccgtctgcaagctatggagatggagactcgaagtcatctgagaatatcggcttagtgcctcaagagtttggtggttctaatttattatcacctaatgactctgagggactgacctcgaatgatattgctaaagatagtttaaatgctgaagaatctttattcttatttgaagcaaagttggcaaaggctattggccgaccggtcggtgaaaaggctagccccgaatttttggtaaaaaaaggatcaacggcaaatattacgttggctaaatcacttcgtccagccatacgagatctgcgtcataagttattagaggacggtgtactcgttaagcaaggtaatgtttattcttttgcacatgagtatcagttcaaaagtccgagtacagctgcttgtgttatatcaggcaatccacgcagtggtatggatgcttggcgggatatgcaaggccggagcttgaaagaactaggatacggcaaaaagaaataa

SEQ ID NO: 137993 - DNA, 3003 bp, Enterobacter cloacae
atggcagaattaactccattcgcgcttaaagatgcacctgctctgattgagtctgtataccctgcacagaaaatttcatttgaagctcaaaaagagcgtaaagctaatcttggacaaacacttacaggcctcggttcttactggaaaggcagaaaaccattaatccttgttcgttcagttgtactgggtactctattgcctcagtcagagaataccgaaaaagatctagaaattttcgaaatgctgatgggctttgatatcgaaagtttagcaaagcgagcctttgttcaaaatgacattaaacctgcagaaatagcttttagaataaatttgtacaatccttgggattatttttgccataatgtaaagatcaccgaaagtgaatttaatgaaattgaagcccttcaatttcccattagtagcgatgctctcggtttaaaattacgttggcgtcgtgatattaaggaaagtgaaaaactggctatttatcgccagtatctagaaacaattgatagttacgaggcaaaggctagtctctgtaaaagaccggaggaagtagaacaagaatggctttatgctcatgtatgggaagaggttaatcgacactaccacagttatggtattaacgtaaaatcccaccaggaattggttgaacaacttggccaacttcgctatggacatcgccccaaaatagccgatactttcagtggcggcggttcgatcccgtttgaagcagctagacttggatgcgatatatacgcttctgatttaaaccctgtagcattgatgctgacatggggtgccatgaatgtgattggcgcttcaccagagcgtaagctggaaattgtagctgcgcagaagttagttgcggacatcgttgaccaagagatttctagcttaggtattgaacatgatcaatatggtaatcgtgcaaagtcatatttgtattgtcttgaaactaagtgtccagaaactggctggatggtaccaatgtcaccaagctgggttatttccaagttaaaaaatgtcatagctaaattggttccggactacaagaataagcgctttgatatcgatgtaataacgaatgctagtcctgctgaaatgaaagcggcggagaaaggcactgtgagtgatggtgctttggtatatgaacttgaaggaaaaatttaccgtacaccaatcaagacgatacgaggggattacagggatgctgatggtagtataaaaaatcgacttcgtttatgggaaaaagaggatttcacacctcgttcagatgacatattccaagaacgactttatgctattcattggataaccaaagaaactttgggactaaaccgccaagaaacctttttcacaaaaattactgatgttgatttaaaaaaggaagctttagtaaatgacattgttcgcgaaaatataaccgcatggcaaaaatctggcctaattcctgatatgcccattgagccaggggaaaaaacagatgaactcattcgtacgagagggtggaccttctggcatcatttgtttaatgctaggcagctcttaatattcgctcaatacttcaagcactcgacaccagaagactatatcttcaatgccaaaaccttagactggaatgcgcgtattgcaaactggatggttcattgggaaaaaaccaacaatgtattttacaatcaagcattaaatacattttataactatggtattcgctgttttaccagtcatgaagcgggtcgttcttttggttttgtaaatagtgaacttcctgatgtatcaataaaaataaaaaatcatgaagcatctgctctcactgagcaaaatgatatctatattaccgatcctccctacgcagatgcggtttactaccatgaaattaccgagtacttcattgcttggttgcgcaaaaatccaccaaaacccttcgatgagtggacttgggactcccgtcgtgctttagctattaaaggaacgggggatggttttcgtaagggaatggtgagtgcctataaggctatggcagatcacatgccccaaaatggtatgcaatgtgtgatgtttactcaccaagataccagtgtttggtccgacatgatcggaatattttgggcctcagggttacaagttgttggtgcttggtacatagctaccgaaacaagtactgagttgaagaaagggggttatgtacagggaactgttattctgatgctacggaagcgtccggcaggtgaaaatacgggctttaaacaaagactgttaccttcggttcgtgcagaagtgaagcgacaaattgaaaatatgatgcatctgaacaatgaggtaaaagataagttaggcgaatcggtctttaacgactctgacttacaaatggcaggttatgccgccgcacttaaagtattgacatcttatacacacataggtggtgaggatgttacaaactttgcattacgtccgcgcaataagggagaagtgacggtcgttgatgaaatagttcagcaagcagctgaagctgctaatagtttattggttccagaaggtttatcttctgatacttggcaaaaaataaacggcatccagcgcttctatttgcgcatgatggatattgaaacgactggggcttccaaacttgacaattaccagaattttgctaaagccttccgagtagaagactatggccgtgtaatgggtaatatttctgcaaataaggcacagttgaagcgagtgtgcgagtttacttcacgtgaactgactgatagcactgaaatcggatcaacttggcttgggtccctgatcattggtttacaagaaatactcaatgaaaaagagcctcaagctgtaattagtcagttacaggaagagttgccagactttatagagatccgccccctgttaatagacattctcaacttttttgagaaaaaagctcctgagaaagctactcgtgatgccgctgaggtattaggtgcgcgcttgaggaacatgcgggcgtttggtcagtga

SEQ ID NO: 137994 - DNA, 2751 bp, Enterobacter cloacae
atgagcatcaggagattttcgtcacgtacacatagacttgatcatagcttcctactcgagcacctcaaaggtgctcggagttacaaacgtatagctgggtactttacgagctcgctctttgaagtagccaatgagctacttgattctatcccggatgtaaaaattgtctgcaatgtagatatccaccctgatgacctgaaggtggctcagcttcgtgaatccaagatgatagggcgctggaatgatcgagatattgaagctgaaagtctgcttaaccgcgaccgctatcgccgacttgattgtttcctagccaagcatgggcaagtaatccgagttgctcctgatagtatttgcggtttcctgcatggtaaagcaggtgtcattgaacttgctgatgggcgaaaagttggcttcattggctctatgaacgaaactagcagtggctggcagcggcattacgaaattctttgggaagatgaatccccggaaggtgtggaatggattgagcaagagttcaattatttgtggaatgctgctcgccccttaccagaagcggtcattcgtgaggtgaaacgaagaggctatcgcagagaggttatatttgaagatatcgtagaagatgatgatatagctccagcagctctaatcgagtccccactttatcgacaggggttctccttacagccttggcaacaagggtttgtcagtgaatgtatccggcattaccacaaccatggttttgtacgtctattgatcgctgatgaagttgggcttggaaaaaccctttcgatggccactgcagcactttcattgtgtttacttagtgatcgcgataataagaagcgtaaaccagttattatttttgctccagctactctttgtgaacaatggcaagttgagatgatagataaactaggcatcccttgtgctagatggcaaacccagaagaaagcttggttagacccagaaggacggatcatatcgccaactggacaagaacatattgcgaagtgtccgctgcgcatagggattgtatccacgggtctaatggtgcgagattcattagagaagcaacatctgttgggattgaactttggtgtagctatattggatgaggcgcataaagcgcgcagcagacaaggttttggcaaagatgctggctcgtgtaacgaattgctagccttcatgcgagaaattgctgcacgctcagatcatgtcattttgggcacagcaacccccattcaaacccatccagaggatttgtgggatttaattggcatcttacaccaaggaagtggtcacttcgttcttggtaacgattatgccaaatggcaccgcccacaagagattttacccatactctctggtgagcagcgtgtgactaaaacgagttttgcttgggagcttcttaggtcaccattacctgttgtcgattcgaccaacgaacaaaatgctcgtcgcttattcagttctattcgtcaggatcttggcataattaatcagaacgataaatgggatataaagaatacgctatcagacctgtcagaagactctttagaatattttgaagaagagctggacagagatatagctggtgccagtttttttcagcgtgaaaatccgttaattcgccacatcgttttgcgcaaacgagtaactcttgaaaacgccggtcttttgccccgtataggtgtagatgttcatcctgatcgggagttggcaaaggaagtacatcaatttaatattttgtttgagggtaaagccttgagaacaagtgaggacttccgacaagcctatgtagaagcccgacactttggtaaagctcttgctcagaatggcaaaggaagtggcttcatgaaaaatcttatggaacaacggatttgctcgagtattgccgctggattgaatacggcccgaatgctattggaaggtcggaccctacgtgaagaaagcgatgaacaactgattgagattaaagccgaaagcccagatgaaattgcggttctggaaagaatgatagccagacttgagcttataaaagaagaccctaaactcaatgctgtgattcattaccttgagaaggaaaaatggctgagatttggagtcattatatttagccagtattacgataccgcaaagtgggtagccgactcacttgctgaacgttatcctgatcaggctgtaggcctttatgctggagcaggtcgtagccgactctatcaaaaaggggaaagcgtcaatattgaaagggaaactcttaagcgtatggttgctgagcatcaacttgagataatggttgccacagatgccgcttgtgaaggcctgaaccttcagacattgggtacgttgatcaacatggacttgccatggaatccaacacgtttagagcagcgtattggtcgcatcaagcgctttggccaagttcgtgaaaaagtcagtatgctgaatctcgtcaacgagcaaaccgtggacgaaaaggtttatgaaaaattgtctgaacgaatgcaggaccgctacaacctgttcggttctttgcctgacaccatccgtgatgaatggatagaagatattgaaactatgggtgagaaaatggatgagtatattaatgcccagaaacaggctaatggatttgacctgcgctatacagagacaatgtctccttcggataaagattggcgtgactgcgccaatgtgctttcacgtcgcgatttcacagaattaatgatgtctgggtggggggagagtaaatga

SEQ ID NO: 137995 - DNA, 870 bp, Enterobacter cloacae
atgagttctggaaaaatggtcacctatgatcaactcatggttccattaatgaaggccctagtcaaattaggtgggtcgggtagtattgatgaaatctatgagactgtggttgatatagaaaagtttgatgaagaaacattggctattttacatagcccggaaaaaagtagtcagacagaaattgggtatcgattagcttgggcgcgtacatacttaaaaaaagctggttatctagaaaactcatcacgtggtgtatgggctttaacggacaaagcaaaacaagtgtctgaaatcgatagtcgcgagatcgtaaattttgttcgtacattagatcgaaaagcgagccaagcaacaacggatcttggtaaacctgaactatctattgaggattcacccgaagaagtacttgcttggcgcgaaaagttacatcacgtgttgattgaagaaatgagtcctgacgcgtttgaaagattaacgcaaagactcctaagagaatctggttttattcacgttgaggttacagggcgtacaggtgatggtggtatagatggtaaaggcatcgcacgaataaatggcttgatgagttttcacatcgcttttcaatgcaaaaaatataaaggttcagttggagcatcagagatacgggatttccgaggtgcaactgtgggtcgagcagatagaggaatgtttattacaactggaaatttcacaaaggcagctattgtagaggcaaatcgtgatggtgctgctcctatagatttggtagatggtgaccaattagcggataagctcaaagaactgagtttaggtgtaagaacagaacttgttgagaaagttagtgtagatccagattggtttgtaaacctctag

SEQ ID NO: 137996 - DNA, 321 bp, Enterobacter cloacae
gtgtggccggtgttcagcgaacaccacacgctgtgcgtcaataccctggcggccggacaggaggccctgtcgacgctgtttggcggtaaaacggcaatggacgagcgttttgccgccgccgactggcagaccggcgccaccggttgtccgcggctggaggcggctctggtcagctttgactgccgcatcgaccagcgcgtcagcgtcgggacgcacgacattctgttttgtcacgtcgtggccattacccgccacccggagccccggggactgatgtggtttgaccgcggctatcacacgcttatgcgacccgcttgttaa

SEQ ID NO: 137997 - DNA, 981 bp, Enterobacter cloacae
  misc_feature (850)..(859): n is a, c, g, or t
atggcactcttcgattttcctcgctggaagctgacctctcctgccgccgaatccggcgttgtcgcccccgatgaacgcttgtcggccgggcaaacgctggtgatgggcgtgcagcacgccgttgcgatgttcggcgcgacggtgctgatgccgttgttgatggggctcgacccgaacctgtctattctgatgtcgggcgtcggcaccctgctgttctttgtcgtcaccggcggacgggtgccgagctatctcggctccagcgccgcttttgtcggggtggtgatcgccattaccggctttaacggccaggggctgaaccctcatctgagcgtcgcccttggcgggatcatcgcctgcgggctggtctacaccctgattggtctggtggtgatgaagatcggcacccgctggatcgagcgcctgatgccgccggtggtgaccggcgcggtggtgatggctatcggcctgaacctggcgccgattgccgtgcgcagcgtctccgccagcgccttcgacagctggatggcggtgttaactgtgctctgcatcggcatagtggcggtatttacccgcgggatgctgcagcgactgctgatcctggtcggcctgatcgtcgcctgcgcgctgtacgccctgctggctaacggcctgggccttggcaaaccgctggacttctcccccctcgcccaggcggcgtggttcgggctgccgcactttaccaccccatcctttaacggccaggcgatgatgttgattgcgccggtcgcggtgatcctggtggccgagaacctcgggcacctgaaggccgtcgccgggatgaccgggcgcaatatggacccgtacatggggnnnnnnnnnncaatatggacccgtacatggggcgcgccttcgtcggcgacgggctggcgaccatgctctccggttcggtgggcggcagcggggtcaccacctatgcggagaacatcggcgtcatggcggtga

SEQ ID NO: 137998 - DNA, 384 bp, Enterobacter cloacae
atggcggtgaccaaggtctactcaacgctggtgtttgtcgccgcggcgctgattgccatgctgttgggtttctcgccgaagttcggcgcattaatccacaccattcccgggccggtgatcggcggcgcctcgatcgtggtatttggcttaattgccgtcgccggggcgcggatctgggtgcaaaaccgggtggatctgagtcaaaacagcaatttgatcatggtgtcggtgaccctggtgctgggcgccggcgatttcgcgctgtcgctgggcggctttacgctgggcgggattggcacggccaccttcggggcgatcctgctgcacgcgctgcttcatcgcgggacgcgcgaggcgaaggaggccagggtaacgccggtgtaa

SEQ ID NO: 137999 - DNA, 150 bp, Enterobacter cloacae
atgccgccatccggcaccaccacgggcacggaacctgaccgcccggcggcgctgcgcttgccgggcctggagactgccccggccttccgggaacgtctcagcgattttgaggccgtcagcaccggcagtttcagcaacaatggtgaataa

SEQ ID NO: 138000 - DNA, 810 bp, Enterobacter cloacae
atgtcgttactggctaaatcgcgaaaagagggacagatccagcatattacgccgcaaagcgccggttggcgctatatcggctttgatgtctggatgttgaaaaaagggcagaccgtgacgctggagagcggcgatcgcgagctgtgcctggtgctggtcgccgggctggcgtcggtgaaaacgcagcatgccgatttcccgaatctcggtaaacggatgtcgccgtttgaacgcaccccgccgtggtcggtctacgtcccgccgcaggataaagtcgaggtgactgccgattccgatctggagctggcagtatgcagcgcgccgggcaaaggcagcttcccggcacgcctcattcggccggaagacgtcggcgtagagcaccgtgggaaagggcgcaatcagcgccgggtgcataatattctgccggacagcgccgaggcggactgcctgctggtggtggaagtctacaccgacgagggggccaccagctcgtggccgtcgcataagcatgataccgcccagccgggcaaagagacgcagctggaagaaatctactatcaccgcttcgatccgccgcagggctttgccttccagcgggtctacaccgacgaccgcagcctggacgcctgtatggcgccctacaaccacgatgtggtgatggtgccgcgcggttaccatccggtggcagcgattgccggttacgatagctactatctgaacgtgatggccgggccggaccggaaatggctcttcacctgggaagatgaccacgcctggatcaacacgccggagtacccgcgccacgactga

SEQ ID NO: 138001 - DNA, 1506 bp, Enterobacter cloacae
atgacgatcacaggaaactttattggcgggaaaaccgttattagcagcagcaacgaaacgatgccggtgtacgacccggcgacgggcaaagcggtgcgcgaagtcacggtgtcaaccgcgcaggaagtctccgaggcgattcaggttgctcgcgatgcgtttgacagctggtcccgtactacgccgctgcgccgcgcccgcgtgctgttcaacttcaaaatgttgctggagcagcacgtggaagagctggcggggatcatcgtcagcgagcacggtaaggtgtggtcggatgcgctgggcgagctgacccgcggtatggaagtggtcgaattcgcctgcgggatcccgcacctgattaaaggcgaatactcctctgacgtcggcaccggcgtcgacagctactcgctgatgcagcccctgggcgtggtggcagggatcaccccgtttaacttcccggcgatggtgccgatgtggatgttcccgctggcgctggcctgcggcaacagtttcgtcctcaagccgcccgcgctggcgccgacggccgctgtgcgtctggcagagctgttaaaagaggctggtctgccggacggcgtgtttaacgtcgtgcactgcagcaatgaagatgccgagcagctgtacactgacccgcgtattgcggcggtgagcttcgtcggctcctccggcgtggcggagtatatctataagaccgccagcgcccacggcaagcgcgtgcaggccttcggcgccgccaaaaatcacgcgattgtgatgccggatgccgatctcgacgccaccgttaacgccattatgggcggcgcttttggctccgcaggcgagcgctgcatggcgctgccggtggtggtggcggtgggagatgaaaccgccgacaaactgatcgcccgcctgaagccgctggtggaagcgctgaaagtaggcccgggctgcatgcgtggtcaggaagagaacgagatgggaccggtggtgtctgatacccaccataaaaaagtgctcggctatattgataaaggcgaaagcgaaggggcaaaactggtggtcgatggccgcaaactgcgcgtgccgggctacgacgcgggctactatgtcggcggcaccctgttcgatcacgtcaccccggagatgaccatctggcgcgaagagatctttggcccggtgctggggattgtgcgcgcggcggactatgacagcgcccttgagctggtcaacagccacgagtttggcaacggcagcgccgttttcaccagcaacggccacaccgcgcgtgaattcgtccacgacgtgcaggcggggatggtcggggtgaacgtgccggtcccggtgccgatggcgttccacagcttcggcggctggaagcgctcggtgtttggcgcgttgaacgtccacgggccggacggcgtgcgcttctacacgcgtatgaagaccgccaccgtacgctggccggcagggcagcagaccgtatctgaattcagcatgccgacgttaggttaa

SEQ ID NO: 138002 - DNA, 822 bp, Enterobacter cloacae
atggccatcgcaatgcaacgtttttgtattaaccgcaaaatcgcgccagcgctcagcattgaagcgtttttccgtctggtgaaccgtctgggcctgaataaggtcgagctgcgcaacgatttacccagtggaaaagtgaccgacgatctgagccatcagcaggtgcgcgagctggcggcgcgctaccacatcgagatcctgacgattaacgcggtctacccctttaaccgtcgtagcgaagaggtgcggcagttgaccgaatcgctgctgaaagaggcccaggccatcggcgccaaatcgctggtgctctgtccgctcaacgacggcagcgaggtgccggccagcgaaaccctgggcgccctgcgcgacctggcgccgctgttcgccttctatggcatccacggcctggtggagccgctgggcttcccgcaaagctcgctgcgttctgcgcaccaggcgcagacgctgatccacgacgcccgcgtgccgtttaagctgctgatcgataccttccatcaccatctttacccgcaggcggcggacgagttcagccaggtagaggtggcggatatcgggctggtgcacctttcaggagttgacgatagccgtccgcgcgagcagctcaccgatgccgagcgcatcatgctaaccccgaaggatcgtctcggcacctgcgagcaggttaaagcgctggaagcccgcggctatcagggggtgtacgcttttgagcccttcgcccccgagctggcgcaatggagcgaagcggatatcgagcgcgaaattgagcagagcatcgcgctcatccagcgccactgcgcctga

SEQ ID NO: 138003 - DNA, 1503 bp, Enterobacter cloacae
atgagctcacccctgttgattgcgcgcacgctggataacgcgctctatttactgcccgcgatggccaaccgccatgggcttatcaccggtgcgaccggcaccggtaaaaccgtcaccctgcagaagctggctgagtcgttctcggagattggcgtgccggtatttatggccgacgtcaagggcgacctgaccggcattgccgccgcggggcagagctcagagaaactgcaggcgcggctggagaagatcggcgtcagcgactgggagccgcatgccaacccggtggtgctctgggatatctttggcgagaagggccacccggtgcgggcgacggtctccgatctcggccccctgctgctggcgcgcctgctcaatctcaacgaggtgcagagcggcgtactgaacattattttccgcatcgcggacgaccgcggcctgctgctgctcgacttcaaagacctccgcgccatcacccagtttatcggcgataacgccaagtctttccagaaccagtacggcaatattaacagcgcctcgatcggcgccatccagcgcgggctgttgaccctggagcaacagggcgccgagcacttcttcggcgagccgatgctggatattgccgactggatgcgcgtcgatgccagcggtaaaggggtgatcaatatccttagcgccgaaaagctctaccagatgccgaagctgtacgccgccagcctgctgtggatgctctccgagctctacgagcgcctgccggaagccggcgacctcgataaaccgaagctggtgttcttcttcgatgaggcgcatctgctgttcaacgacgcgccgcaggtgctgctggataaaattgaacaggtgatccgccttatccgctccaagggcgtcggcgtctactttgtctcgcagaacccggcggatattcccgacgccgtgctcggccagctgggcaaccgcgtgcagcatgccctgcgcgcctttacgccgaaggaccagaaggcggtgaaaaccgccgcccagaccatgcgcgccaacccggccttcagtaccgaacaggcgatccaggagctgggcaccggcgaggcgctgatctccttcctcgatgagaaaggcagcccgtcggtggtcgagcgggcgatggttatcgccccctgctcgcgaatggggccggtcagcgatgacgagcgcaatggtctgctgaaccactcgccgctgtacggtaagtatgaggaggaggtggaccgcgagtcggctttcgaaatgctgcagcaaggggtgcaggtcgccaccgggcagcagtcggctccgccggcgaagggccagcagaacggcgatgacgacgggctgcttggcggcctgaaagatatcctgttcggcagcaccggcccgcgcggcggtaaacgcgacggtatcgtgcagaccgcagcgaaaagcgcggttcgccaggtcaccaatcagatcgtccgcggcatgctgggcagcctgctgggcggacgcaagcgctaa

SEQ ID NO: 138004 - DNA, 1083 bp, Enterobacter cloacae
atgcaggcgtttggcgtacttgaccgttatatcggtaagacgattttcaacaccatcatgatgaccctgttcatgctggtgtcgctctccggcattatcaagtttgtcgatcagctgaaaaagtccgggcagggcagctacgatgcgctgggcgctggtctctacaccatcctcagcgtgccgaaggacatccagatcttcttcccgatggcggcgctgcttggcgcgctgctggggctggggatgctggcccagcgcagcgaactggtggtgatgcaggcatccggtttcacccggctgcaggtagcgctggcggtaatgaaaaccgcgatcccgctggtgctgctgaccatggccatcggcgagtgggtggcgccgcagggcgaacagatggcgcgcaactaccgtgcccagcagatgtacggcggctcgctgctctcaacccagcaggggctgtgggcgaaagatggccacaactttgtctatatcgaacgggtgaaaggcaacgatgagctggggggcgtcagcatctatgccttcaacccggagcgtcgtttacagtcggtgcgctatgccgcttcggcaaaattcgatagcgaaaataaagtgtggcgtctgtcgcaggtggatgaatccgacctgaccgatccaaagcaggtgaccgggtcgcagatggtgagcggcacctggaaaaccaacctgacgccggacaaactgggcgtggttgccctggatccggatgcgctgtcgatcagcgggctgcacaactatgtgaaatacctgaagtccagcggccaggatccgggacgctaccagctcaatatgtggagcaaaatcttccagccgctgtcggtggcggtgatgatgctgatggcgctgtcgtttatctttggcccgctgcgtagcgtgccgatgggcgtccgggtggtgacggggattagcttcggctttatcttctatgtcctcgaccagattttcggcccgctgaccctggtctatggcataccgccgatcatcggcgcgctgttgccgagcgccagcttcttcctgataagcctctggctgatgatgcgcaaggcctag

SEQ ID NO: 138005 - DNA, 1098 bp, Enterobacter cloacae
gtgataatcataagatatctggttcgtgagacgctgaaaagccagttggcgatcctattcatcctgttactgattttcttttgtcagaaattagtcaggatcctcggcgccgcggtagatggcgatatcccaaccaatctggtgctctcgctgttggggctcggcatcccggagatggcgcagcttatcctgccgttaagtctgttccttggcctgctgatgaccctcggcaagctgtacaccgaaagtgaaattacggtgatgcacgcctgcggcctgagcaaagccgtgctaatcaaggcggcgatgatcctcgcgctgttcaccggcgcggtggcggcggtcaacgttatgtgggcggggccgtggtcgtcgcgccatcaggacgaagtgctggccgaagctaaagctaaccccggtatggcggcgctggcccagggccagttccagcaggccagcgatggtaacgcggtgatgtttatcgaaagcgtcaacggcaaccgcttccatgacgtcttccttgcccagctgtgtccgaaaggcaatgcgcgcccctcggtggtggtggcggattccggcgagctgtcgcagcagaaagacggctcgcaggtggtgaccctcaacaagggcacccgctttgaaggcaccgcgatgctgcgcgacttccgcattaccgacttcaataactatcaggctattatcggccaccaggcggtgagcgccgatccggacgacaccgaacagatggatatgcgcaccttgtggaaaacccacaccgaccgcgcgcgcgccgaactgcactggcgcttcacgctggtggcgaccgtcttcattatggcgctgatggtggtgccgctcagcgtggtgaacccgcgtcagggccgcgtgctgtcgatgctgccggcgatgctgctttacctggtgttcttcctgctgcaaacgtcgattaagtcgaacggcggcaaaggcaaaatggacccggctatctggatgtgggcgattaacctgctctattttgcgctggcggtgctgttaaacctgtgggacacggtgccgatgcgccgcttccgcgcccgttttaataaaggagcggcctga

SEQ ID NO: 138006 - DNA, 1512 bp, Enterobacter cloacae
atggagttcagtgtaaaaagcggtagcccggagaagcagcggagcgcctgtatcgtggtcggcgtctttgaaccacgtcgcctctcccccatcgccgaacaactcgataaaatcagcgacggctacatcagcgccctgctgcgtcgcggcgagctggaaggcaaacctggccagacgttattgctgcaccatgtgccaaacattctgtctgagcgcattctgctgattggctgcggcaaagagcgcgagctggatgagcgtcagtataagcaggtcatccagaaaaccatcaataccctgaatgataccggctcaatggaagccgtctgcttcctgaccgagctgcacgtcaaaggccgtaacaactactggaaagttcgccaggcggttgaaaccgccaaagagacgctgtacagcttcgaccagctgaagaccaacaaaagcgagccgcgtcgcccgctgcgtaaaatggtctttaacgtgccgacccgtcgcgagctgaccagtggcgaacgcgccattcagcatggcctggcgattgccgccggcatcaaagcggcgaaagatcttggcaatatgccgccgaacatctgtaacgccgcctatctggcctctcaggcgcgtcagctggccgatacctacagcaaaaacgtcatcacccgggtgatcggcgaacagcagatgcgcgagctggggatgaacgcctacctcgccgtcggcaatgggtcgcagaacgagtcgctgatgtcggtcatcgaatataaaggtaacccggctgaggacgcgcgccctatcgtgctggtcggtaaaggcctgaccttcgactctggcggtatctccatcaagcctgccgaaggcatggacgagatgaagtacgacatgtgcggcgcggcggcggtgtacggcgtgatgcggatggttgccgaactgcagctgccgctgaacgtcatcggcgtgctggcgggctgtgaaaacatgcctggcggccgcgcctatcgtccgggtgacgtcctgaccactatgtccggccagacggtggaagtgctgaacaccgacgccgaaggccgtctggtgctgtgcgacgtcctgacctacgttgagcgcttcgagccggaagcggttatcgacgtggcgacgctgaccggggcctgcgtgattgccctcggccatcacatcaccggcctgatgtcgaaccataacccgctggcccatgagctgatcggcgcctccgaactggcgggcgaccgcgcatggcgtttgccgctggccgacgagttccaggatcagctggagtccaattttgccgatatggcgaacattggcggccgtcctggcggcgcgatcaccgccggctgtttcctgtcgcgcttcacccgcaagtacaactgggcgcacctcgacatcgccggtactgcctggcgttccggtaaggccaaaggcgcgaccggtcgtccggtggcactgctgtcgcagttcctgctcaatcgtgcgggttttaacggcgaagagtga

SEQ ID NO: 138007 - DNA, 915 bp, Enterobacter cloacae; identical to SEQ ID NO: 74978

SEQ ID NO: 138008 - DNA, 822 bp, Enterobacter cloacae; identical to SEQ ID NO: 74979

SEQ ID NO: 138009 - DNA, 861 bp, Enterobacter cloacae; identical to SEQ ID NO: 74980

SEQ ID NO: 138010 - DNA, 828 bp, Enterobacter cloacae; identical to SEQ ID NO: 74981

SEQ ID NO: 138011 - DNA, 402 bp, Enterobacter cloacae
gtgaaactttttattaatgatctgacggtcatggattttagtttccttgatgcggaatccgggttgattggcgatagccttattgttgatattattcttgagggagatctgaatgctgagtcaatggtaatggatttctcacatgctaaaaaaagtatcaaacatgaaattgataaactggccgatcatgtcctgattgtgccggaacaaaatagtcatattattgttagtcatgcaggcactacgacggaagtcgccatgctgcgtaagaatggggagacccagtgttttatttccgggccgcaggagagtttctggctggtccaaacagataatattaattcccgttgccttgaatcccaaatagaaaacatttactggcgtgtttgccgcaaggagtaa

SEQ ID NO: 138012 - DNA, 561 bp, Enterobacter cloacae; identical to SEQ ID NO: 74984

SEQ ID NO: 138013 - DNA, 936 bp, Enterobacter cloacae; identical to SEQ ID NO: 74985

SEQ ID NO: 138014 - DNA, 423 bp, Enterobacter cloacae; identical to SEQ ID NO: 74986

SEQ ID NO: 138015 - DNA, 1200 bp, Enterobacter cloacae; identical to SEQ ID NO: 74987

SEQ ID NO: 138016 - DNA, 453 bp, Enterobacter cloacae; identical to SEQ ID NO: 74988

SEQ ID NO: 138017 - DNA, 1383 bp, Enterobacter cloacae; identical to SEQ ID NO: 74989

SEQ ID NO: 138018 - DNA, 780 bp, Enterobacter cloacae
gtggcaggattgaagcgggcgattaaaacgccgtcggaagagtacgccaaaatcgggctgcagaaagacggcaagtatctgcagatcaacagcaacattctgcagattgaaaatgaactttatgcgccgatccgcccgaaacgcgtcacccgtcggggcgaaaccccgtccgatgcgctgttgcgcggtggtattgagtatatcgaagtgcgttcgctggatatcaatccgttctcgccgatcggcgttgacgcccagcaggtgcgtttcctcgacctgtttatggtctggtgcgcgctggccgacgcgccggagatgagcagcgatgagctgctgtgcacccgcaccaactggaatcgggttattctggaagggcgtaagccgggcttaacgctggggattggctgcgaaagcgcgcagttcccgctggctcaggtgggcaaagatctgttccgcgatttacgccgcgtggcgcagaccctggacagtatccacggtggccaggcatatcagcaggtctgcgacgagctgctggcctgctttgacgatccggaattaaccttctcagcccgcattctgcgttctatgattgaagaaggcattggcggtaccggccgtgcgcttgccgatcgttaccggacgcagctgcgcgaagagccgctggagatcctgagcgaagacgattttatcgccgagcgcgacgcgtcggtggcgcaacagaagaaagtggaagctgaagacagcgagccgtttgaggcgctgctggcgcggcacgcgtag

SEQ ID NO: 138019 - DNA, 516 bp, Enterobacter cloacae
atgccgttgttagatagtttcacagtcgaccatacccgaatggaagccccagcggtgcgtgtcgcgaagaaaatgaacacgccgcatggcgatgaaatcaccgttttcgatctgcgcttctgcgtaccgaaccaggaagtgatgccggaacgcggtatccacaccctggagcatctgttcgcgggctttatgcgcgatcatctgaacgggaatggcgtggaaattatcgacatttcgccaatgggctgccgcaccggcttctatatgagcctgattggtacgccggacgagcagcgcgtcgctgacgcctggaaagcggcgatggccgatgtgctgaaggtgaaagatcagaaccagatcccggagctcaacgtctaccagtgcgggacttacaccatgcactcgctggaagaggcccaggacatcgctcgtcatatcattgagcgcgatgtgcgcatcaacagcaacgacgaactggcgttgccgaaagaaaaactgcaggaactgcacatctag

SEQ ID NO: 138020 - DNA, 768 bp, Enterobacter cloacae
atgacgacgacgctttccttctcctttcagcaccgccctttggtgccctttgcccatgattatgcccacggtgaccaggaagactggcatcaacatgactgcgcccagctgctgcatatactaagcggcgtggtgcgggtcgcgacgccggtaggctactgggtggtgccgcccgggcgcggcgtctggctgccggcgggaacgccgcacgcgctgcgcatgaccggcaacgtggcggcgcgcaccctgtttatcgatccgctggcgcgcgccgatcttccggcgggctgccagatcgtacagatcacgccgctgctgcgggaactgatcgtgtcatccctggcgctggcggaacgctatgcccccgccagccgcgacgaaagaatttatgaactaatcctcgatgagatccgcgggatggcgatcctgccgtttggcctgccggagccgcaaagcgaaacgctgcgtcggctgtgccagcaggtacgcgaggcgccgggcgaggcctggagcagcggccaggcggcgaaggcgtgcagcatgagcgagcgaaccctaaaccgccattttcagcagcagactagcctgacgtggagcgagtgggtgcgccgggcgaagctaatggaagcgctggtgcgcctggcgcagggccactccgtgctgcgggtggcgctggagctgggctacggtagccacagcgccttcagcgccatgtttcgtcgggtgatgggcgtcgcccccagcgactattttcgtcccccggcctga

SEQ ID NO: 138021 - DNA, 1533 bp, Enterobacter cloacae
atggacagcgcccgcaaactgcagttctgggatctgctgctggagtgcggctttaaagagattgaagtcgccttcccttccgcctcacaaaccgatttcaactttgtccgccagctgattgacgaacagcgcatcccggaggatgtcaccatccaggtgctgacccaggcgcgagacccgctgatcctgcgcacctttgaggcgctgcgcggcgcccgccgggctaccgtccacctctacaatgccaccgcgccgctgttccgcgagctggttttcggcatggacaaggccgaggtgatcgccctcgcgacccgcgccacccggcttatccgtcagcagtgcgaacagcagccggagacccgctggcaatatgaatattcgcctgaaaccttctgcttcaccgagcccgagtttgcgcttgagatttgcgaagcggtggcggatgtctggcagccctgcgccgagcgaccgatgatcgtcaatctgccggcgacggtggaagtcaacacccccaacgtctatgccgatcagatcgagtatttttgccgccacttctcccgccgcagcgaggtctgcatcagcgtgcacccgcataacgatcgcggcaccggcgtcgccagcgccgagctggcggtgatggccggcgccgatcgggtagaaggctgcctgtttggcaacggcgaacgcaccggcaacgtctgtctggtgactttggcgatgaacctctacagccagggaatcgaccctgagcttcgcttcgagcagatgaaccgggtggtggaggtggtggaaaactgcaaccagatccccgttcaccctcgccacccgtgggcgggaagcctggcttacaccgccttctccggctcccatcaggatgcgatcaaaaaagggtttgatgcccgtcagcctggcgatccgtggcagatgccctacctgcccattgacccgcaggatattggctgcagctatgaggcggtgatccgcgtcaacagccagtcggggaagagcggcagcgcctggcttatcgaacaaaatcatggtctgaaactgccccgcgggctgcagcaggacttcagccagcacgttcagcaggccaccgatagcgacggcaaagagatgacccaccatgcgctgtggcagctgttccgcacgcgctacgggctgcaggcgcagccggcgctgacgctgctcgattatcagagcgccagccagcaggatggccagctttccctgcaggcaacgctgcgtcaccacggcgaaacccgacgcctgcagggccagggcaacggcctgctctccgccgcagccagcgggctcagcgcgctgtttcggcagccgtttatgatcaaggactatcatgagcataccctcggcgcgcgcagcgacagccggtcggtggcctatatccgctgcgtttttccgcaaggagaaagctactggggcgtgggtatcgataatgacgtggcgcgcgcctcgctgcaggcgctgtgcaatgcgctcagcgccgccgatcaggccgggggacgaaaatag

SEQ ID NO: 138022 - DNA, 1539 bp, Enterobacter cloacae
atgcaacagcaaaaaccgctggaaggcgcgcagctggtcattatgaccattgcgctgtcgctcgcgacgttcatgcaggtgctggattccactatcgccaacgtggcgatcccgaccattgccggcaaccttggctcgtcgctgagccaggggacctgggtcatcacctcgttcggggtcgctaacgccatctccatcccgatcaccggctggctggccaagcgcgtcggcgaggtgaagctgttcctgtggtcaaccaccgccttcgccattgcctcctgggcctgcggcgtctccaacagcctgacgatgctgattttcttccgcgtcattcaggggattgtcgccgggccgctgatcccgctgtcgcaaagtctgctgctcagcaactatcccccggcgaagcgctctatcgctctggcgctgtggtcaatgacggtgattgtcgcgcccatctgcggtccgatcctcggcggctatatcagcgataattatcactggggctggatcttctttatcaacgtgcccattggcgtggcggtggtgctgatgaccctgcagaccctgcgcaaccgggaaaccaaaaccgaacagcggcggatcgacggcgtcggtctggcgctgctgatcattggtatcggtagcctgcaggtgatgctggaccggggtaaagagctggactggttctcctccaatgagattatcattctgaccatcgtggcggtggtggcgataagcttcctgatcgtctgggagctaaccgacgataacccgattgtcgatctatcgctatttaagtcgcgcaacttcaccatcggctgcctctgtatcagtctggcctatatgctctacttcggcgccatcgtgctgctgccgcagctgttgcaggaggtctacggctacaccgcgacctgggccggcctggcgtcggcgccggtgggggtgatcccggtcattctgtcgccgattatcggccgcttcgcgcataagctcgacatgcggcggctggtcaccttcagctttattatgtacgcggtctgcttctactggcgcgcctggaccttcgaaccggggatggactttggcgcctcggcgtggccacagtttatccagggcttcgcggtggcctgcttcttcatgccgttgaccaccatcaccctctccggcctaccgccggagcggctggcggcggcgtcgagcctgtcgaacttcacccgtacccttgccggctccatcgggacctcgatcaccaccacactgtggaccaaccgcgaggcgctgcatcatgcgcagctcaccgaatcggtgaccccctttaaccccaacgcgcagcagatatacgatcagctgcagggcatgggaatgacgcagcagcaggcgtccggctggatagcgcagcagataaccaaccaggggctgattatctccgccaacgaaatcttctggatttctgcggctattttcatcctgctgttggggctggtgtggttcgccagaccaccgttcagcgccggcggcggcggcggcggcgcgcactaa

SEQ ID NO: 138023 - DNA, 1173 bp, Enterobacter cloacae
atgagtgcaaatgcggagagccaaaccccgcagcaaccaggcagcaaaaaaggaaagcgtaaaggcgcccttctgttgctgacattgctcttcattattattgccgtggcatatgggatttactggtttctggtactgcgtcactacgaagagaccgacgatgcctacgtggcagggaatcaggtacaaattatggctcaggtcgcgggcagcgtgaccaaagtctgggctgacaacacggactacgtgcagaaaggcgatccgctggtcacgctcgatcggaccgatgcccaacaggcgtttgaaaaggctaagacccaactggccgccagcgtccgtcagacccgccagcagatgatcaacagcaagcagctgcaggcaaatatcgacgtcaaaaaaaccgccctcgcccaggcgcaggctgacctgaaccgccgcatcccgctgggcgccgcgaacctcattggccgcgaagagctgcagcacgcccgcgataccgtcgccagcgcacaggccgaactcgacgtggcaatccagcagtacaacgccaaccaggcgatcgtgctgggcaccaggctggaacagcagccggcggtgctccaggcggccactgaagtgcgtaacgcctggctggccctgcagcgtacgcagatcgtcagcccgattagcggctacgtttcccgtcgctcggtacagcctggcgcgcagatcggcaccaccacgccgctgatggcggtggtcccggcgaccaacctgtggatcgatgctaactttaaagagactcagctggcgcatatgcgtatcggccagccggccaccgtgatcagcgatatctatggcgatgacgtgaaatacaccggtaaagtggtcggtctggatatgggcaccggcagcgccttctctctgctgccggcgcagaatgctaccggcaactggatcaaagtggtacagcgtctgccggttcgtatcgagctggatgaaaaacaactagcggaacacccgctgcgcatcggcctctcgacgctggtggaagtcaacaccaccgatcgcgatggtgaaatgctggccagccaggtgcggagctccccggtttacgagagcaatgcccgcgaaatcgctctcgatccggttaataagctgatagacgagatcattcaggccaacgccggataa

SEQ ID NO: 138024 - DNA, 531 bp, Enterobacter cloacae
atggatagttcgtttactcccattgagcaaatgctcaagtttcgcgccagccgccatgaagatttcccttttcaggagatcctgttaactcgtctttgcatgcatatgcaaggtaagctgctggaaaatcgcaataaaatgctcaaagcgcagggaattaacgagacattatttatggcgctgattacgctggagtcacaggaaaaccacagcatccagccgtccgagctgagctgtgcgctgggctcgtcacgtaccaacgccacccgtatcgctgatgaactggaaaaacgcggctggattgagcgccgcgagagcgataacgatcgtcgctgtttgcatctgcaactgaccgaaaagggccatcagtttttgcgtgaagtcctgccgccgcagcataactgcctgcatcagctgtggtcttcacttagcaccagcgaaaaagatcagctcgaacacatcacccgcaaactcctgagccgccttgatcagatggaagaagaaggcgtgctagcggactctctacgctaa

SEQ ID NO: 138025 - DNA, 336 bp, Enterobacter cloacae
atgaacagtgaagtccttctgctcggggtgatagtcggcggcgtcaactatctctttcgctatcttcctctgcgtttgcgcgccggccacgcccgtcctgcccgccgcggcccggtcagcgtgctgctggatactattggcatcgcctcgatttgcgcgctgctggtggtctccagcgtgccggagatcctcgccgatgcccatcgcctggcgccgacgctgaccggcttcctggtgctgggggccgccttctggaaaacccgcagcatcattgtcccaaccctgctgtcggcgtttgcctatggtctggcatggaaaatcaccaacgggctctaa

SEQ ID NO: 138026 - DNA, 282 bp, Enterobacter cloacae
gtgtgcggcacgctggccggcgcctggtccggcaacggcctgctggtggattatccggcggtggaagccgccctcggctttatgctgccggcgctgtttatgagcttcctgctggcctctttccagcgtcagcagtcactctgcgtcacggcggcgctggcgggcgcgctgggcggcattctgttattttccattccggcggcgatcctcgccggaattgtctgcgggtgtctgacggcgctgcttcaggccatgctcaaggggatgccggatgaacagtga

SEQ ID NO: 138027 - DNA, 999 bp, Enterobacter cloacae
atgcgacatagtacgatgttggccaccgccgcctttgccaccctgctcgccaccagcgccttcgccgccgacctgccgggtaaagggattacggtgaagcccgctcagagcactatctccgaagagagcttccagaccctgctggtcagtcgcgcgctggagaagctgggctacaccgtcgagaaacccagcgaagtggactataacgttgcctatacgtcgattgccgccggagataccacctttatcgccaccaactggcaaccgctgcacgatgacatgtacgccgcggcgggcggtgataacaaattctatcgcaaaggagtgtacgtctcaggcgccgcccagggctatttgatcgacaaaaaaaccgctgagcagtaccacatcacctccatcgatcagctcaaagatccgcagatcgccaaactgtttgataccaacaatgacggtaaagcggatctcaccggctgtaccccaggatggggctgcgaagcagtgattaaccatcagattgacgcctatggcctgagcaaaaccgtcacccataaccaaggcaactacgcggcgatgatggccgacaccattgcccggtataaagagggtaaaccggtgctctactacacctggacgccgtactgggttagcgacgtgctgaagcctggcaaggacgtcgtctggctgcaggtgccgttctcctccctgccgggcgagcagcaaaacatcgacaccaaactggccaacggcgccaactatggcttcccggtgaacaccatgcacatcgtcgctaacaaagcctgggcggagaaaaatccggccgccgccactctgtttagcgtcatgaagctgccgatcgccgacatcaacgccgagaatgcaatgatgcatgaaggccatgcttccgaagccgacattaacggccacgttgatggctggatcaaagcccaccagccgctgttcgacagctgggtgaaaaccgccctcgccgcgcagcagtaa

SEQ ID NO: 138028 - DNA, 1068 bp, Enterobacter cloacae
atggctgatcagaccaacccgtggggcagcgccccgtcaaccgacagcgccgcgcaggctgccgacgcctggggtggcgcctctactgccgcgccggctaatggcggcggcgccgactggctgcacagcgcccctgcgccgcagccggaacagttcaatatcatggatccgttccataagaccctgatcccgctcgacagctgggtgacccacgccatcgactggatcgtgctgcacttccgtccgctgttccaggggatccgcgtgccgatcgactacatcctcagcgccttccagcagctgctgttggggatgccggcgccggtggcgattatcgtcttcgcgctaatcgcctggcagatctccagcctcggcatgggggtcgccactctggtatcgctgattgccatcggcgccatcggcgcgtggtcgcaagccatggtcactctggcgctggtcctcaccgccctgctgttctgcatggttatcggcttgccgctggggatctggctagcgcgcagcccgcgggcggcgaaaatcatccgcccgctgttggatgccatgcagaccacgccggcgttcgtctatctggtgccgatcgtgatgctgttcggcatcggcaacgtaccgggcgtggtggtgacgattatcttcgccctgccgccgatcgtccgtctgaccatcctcgggataaaccaggtgcctgcggatctgatcgaagcgtcgcgctcatttggcgccagcccgcgccagctgctgtttaaggtgcagctgccgctggccatgcccaccattatggccggggttaaccagaccctgatgctggccctgtcgatggtagtgatcgcctcgatgatcgccgtcggcggcctcggccagatggtgctgcgcggtatcggtcgcctagatatgggcctggcgaccgtcggcggggtggggatcgtgatcctggcgattattcttgaccgcctcacccaggccgtcggtcgcgacgcccgcagtcgcggcaaccgccgctggtacaccaccggcccgctggggcttatcactcgccctttctgtcgataa

SEQ ID NO: 138029 - DNA, 588 bp, Enterobacter cloacae
atgaggggatctctcagggcgaagcatcaacgcactatcgtctttatttcccatgaccttgatgaagccatgcgaattggcgatcgtatcgccattatgcaaaatggcgaagtggtccaggtcggcactccggatgaaatattaaataatccggccaatgattatgtgcgcaccttcttccgcggcgtggatattagccaggtattcagcgcgaaagatattgcccgccgcagcccggttggcctgattcgtaaaacgcctggttttggcccccgttcggcgctgaaattattacaggatgaagaccgggaatatggctatgtcatagagcgcggtaatcgctttgtcgggattgtctcgattgattctctgaaaacagccctcagcgccgggcaggggatcgaggcggcgctgattgaagccccgctggcggtggaagcgcaaaccccgctcagcgatctgctctcccacgtcggccacgctccgtgcgccgtgccggtagtggatgaagaacaacaatatattggcatcatttccaaaaggatgttgctccaggctttagatcgcgagggggtgaatcatggctga

SEQ ID NO: 138030 - DNA, 1773 bp, Enterobacter cloacae
atggcccagaccggtagcggtaaaaccgcagcattctctttaccgctgctgaacaacatcgatcctgagctgagagcaccgcagattctggtgctggcgccgacccgcgagctggcggtacaggttgctgaagcaatgacggaattctctaaacatatgcgcggcgtgaacgtggttgccctgtacggcggccagcgttatgacgtgcagctgcgcgccctgcgtcagggtccgcagatcgtcgtcggtaccccgggtcgtctgctggaccacctgaagcgcggcaccctggacctctccaaactgagcggcctggtactggatgaagcagatgaaatgctgcgcatgggctttatcgaagacgtagaaaccattatggcgcagatcccggaagggcatcagaccgcgctgttctccgccaccatgccggaagctatccgtcgcattacccgtcgctttatgaaagagccgcaggaagtgcgcattcagtccagcgtgacgactcgcccggatatcagccagagctactggactgcctacggcatgcgtaaaaacgaagcgctggtgcgtttcctggaagcggaagactttgatgcggcgattatcttcgtccgtaccaaaaacgcgaccctggaagtagctgaagcgctggagcgtaatggctacaacagcgcggcgctgaacggcgacatgaaccaggcgctgcgtgagcagactctggaacgcctgaaagatggtcgtctggatatcctgattgcgactgacgttgcggcccgtggcctggacgttgagcgtatcagcctggtggtgaactacgacatcccaatggattctgaatcctacgttcaccgtatcggccgtactggtcgtgccggtcgtgctggccgcgcgctgctgttcgttgagaaccgcgagcgtcgtctgctgcgcaacatcgaacgcaccatgaagctgaccattcctgaagtggaactgcctaacgcggagctgctgagcaagcgtcgtctggaaaaattcgccgcgaaagttcagcagcagctggaaagcagcgatctggatcagtaccgtgcactgctggcgaaaatccagccgacggctgaaggtgaagagctggacgtggaaacgctggctgctgcgctgctgaagatggctcagggcgaacgttcgctgatcgttccgccggacgcgccgatgcgtccacgtcgtgaattccgcgatcgtgacgatcgtttcgaccgtcgtggcgaccgtaatgatcgcggcccgcgcggcgatcgcgaagatcgtccgaagcgtgagcgtcgtgacgtgggtgacatggagctgtatcgcattgaagtgggtcgcgatgacggcgttgaagtgcgtcatatcgttggcgcgatcgccaatgaaggcgatatcagcagccgttacatcggtaacatcaagctgttcgcttctcactccaccattgagctgccgaaagggatgccgggcgaagtgctgcagcactttactcgtacccgtatcctgaacaagccgatgaacatgcagctgctgggcgatgcgcagccgcgcaccgaacgtcgtggcggcggtgagcgtcgcgaaggcggccgtggcttcggcggcgagcgtcgtgaaggcggccgtggcttcggtggcgaacgtcgtgaaggacgtcgtttcagcggcgaacgtcgtgaaggccgtgcgccgcgtcgtgacgatgcatccgcgccgcgccgcgatgactcagccggtcgccgtcgcttcggtggcgatgcgtaa

SEQ ID NO: 138031 - DNA, 1245 bp, Enterobacter cloacae
atggcgacactaaccactacggcaacccgtccgtctctgtttggcggcgtggtgattatcggcggcacgattatcggcgcgggcatgttctcgctgccggtggtgatgtccggcgcgtggtttttctggtcgctggcggcgctggtcttcacctggttctgcatgctgcactccggtttgatgatcctcgaggccaatcttaactaccgcatcggctccagcttcgacaccattaccaaagacctgctcggcaagggctggaacctggtgaacggtgtatcaatcgcctttgtgctctatatcctgacctacgcctatatttcggcgagcggttcgatcctccaccacaccttcagtgaactgtcgctgaaggtgccggcgcgcgcggcgggcttcggctttgcgctgctggtggcgtttatcgtctggatgagcaccaaagcggtgagccgcatgacggctatcgtactgggcgctaaggtgatcaccttcttcctgaccttcggtagcctgctcgggcacgtcgagccgacgacgctatttaacgttgcggagaagaatgcctcctatgcgccatacctgctgatgacgctcccgttctgcctggcctcgtttggctatcacggcaacgtgccgagcctgatgaaatactacggaaaagatccgcgcaccatcatccgctgcttaacctacggtacgctgctggcgctgggtctgtacgtggtctggctgctggtgacgatgggtaacatccctcgtccgcagtttatcgacattgcgcagaagggcggcaacattgatgtgctggtgcaggcgttgagcggcgtgctgaatagtcggagtctggatctgctgctggtggtgttctcgaactttgctgtcgccagttctttcctcggcgtgacgctggggctgttcgactacctggcggatctgtttggctttgacgatagcgcgatgggacgctttaaaaccgcgctgctgacctttatcccgccgatgattggcggactggtcaaacccgatggtttcctctacgccatcggctatgctggcctggcggcgacgatctgggcggcgattgtaccggcgctgctggctcacgcctcacgcaaacgcttcggcagcccacagttccgcgtttggggcggaacgccaatgattgtgctgatcctgctctttggcctcggcaatgcggttgtacatatcctgtcgagcgtcaatctgctgccggtttatcagtaa

SEQ ID NO: 138032 - DNA, 1008 bp, Enterobacter cloacae
atgactgacaaatctgttccattctcggtgctcgatctggcgccgatcccgcaaggatcttctgccaaagaagcctttacccactctctggatctcgcccggctggccgaatcgcgcggctatcatcgctactggctggcggagcaccataatatggtcggcattgccagcgcagcgacctcggtgctgattggctatctcgccgccaacaccaccaccctgcatctcgggtccggcggcgtgatgctgcctaaccactctccactggtgatagctgagcagttcggcaccctgaacaccctttaccccgggcggatcgacctcggccttggccgcgcgccgggcagcgatcagccgaccatgcgcgccctgcgtcgccatatgagcggcgatgtcgataatttcccgcgcgatgtagcggaactggtggactggtttgacgcccgcgatccgaacccgcacgtgcgcccggttcccggctacggggagcgcattccagtatggctgctgggctcaagcctctatagcgcgcaactggcggcgcagctcggcctgccgtttgccttcgcctcgcacttcgcgccggatatgttgttccaggccctacatctgtatcgcagcaatttcaaaccttcggcgcggctggaaaaaccgtacgcgatggtgtgtatcaatatcatcgccgccgacagcaaccgcgatgcggagtttctcttcacctccatgcagcaggcgtttgtgaagctgcgtcgcggcgagaccgggcagttgccgccgccggtggaaaatatgcatcagctgtggtcagcgtccgagcagtatggtgtgcagcaggcactgagcatgtcgctggtcggcgataaaactaaagtccgccatgggctagagtcgattctgcgtgaaaccgaggcggacgaaatcatggtcaatggccagatcttcgaccaccaggcgcgtctgcattctttcgatttagcgatgcatgtgaaagaggagctgttggggtaa

SEQ ID NO: 138033 - DNA, 879 bp, Enterobacter cloacae
atgaaatattcattagggccggtgctgtactactggccaaaagagacgctggaagatttttaccagcaggcggcaaactgcagcgccgacaccatttatctcggcgaagcggtatgcagcaaacgccgcgccaccaaagttggcgactggatcgaaatggcgaaaacgctggccgctagcggcaagcaggttgtgctctccaccctcgcgctggtgcaggcctcttctgaactgggcgagctgaagcgctatgtcgataacggcgaatttctgattgaggccagcgatttgggcgtggtaaatctctgcgccgaacgcaagctaccgttcgtcgccgggcatgcgctgaactgctacaacgccgttaccctgcgcctgctgcggaaacagggcatggtgcgctggtgcatgccggtggaactctcccgtgactggctggctaatttactgacccagtgcgaagagctgggtatccgcaaccagtttgaagtcgaagtgctgagctacggccatctgccgctggcttattccgcgcgctgctttaccgcccgctcggaagaccggccaaaggacgagtgcgaaacctgctgcatcaagtaccctaccgggcgcagcatgctgtcgcaggagaaccagcaggtgttcgtgctcaacggtattcagaccatgagcggctacgtctataacctgggcaatgagcagacctccatgcacggcctggtggatatggtgcgcctgtcgccgatgggcaacgagaccttcgccatgctcgaggccttccgcgccaacgaaaacggcgctgcgccgctggatctcaccagcaatagcgattgcaacggctactggaaacgattgccaggactggtgcttcaggcctga

SEQ ID NO: 138034 - DNA, 996 bp, Enterobacter cloacae
atggagctgctctgcccagccggtaaccttccggcgcttaaggcggccatcgaaaacggcgccgatgccgtctatatcgggctgaaagatgacaccaacgcccgccactttgccggccttaatttcaccgaaaagaaactgcaggaagccgtcagctttgtgcatcagcaccgtcgtaagctgcatatcgccatcaataccttcgctcatcccgacggctacgcccgctggcagcgagcagtggatatggccgctcaactgggcgccgatgcgctcattctggccgatatcgccatgctggagtacgctgcggagcgttacccacacattgagcgtcacgtttcggtgcaggcttccgccaccaatgaagaggccattcgcttctatcatcgcaacttcgacgtcgcgcgcgtcgtactgccgcgcgtgttgtctattcatcaggtgaaacagttggcccgcgccacgccggtgccgctggaagtcttcgccttcggcagcctgtgcatcatggcggaaggccgctgctatctctcttcctacctgaccggcgaatcgcccaacaccgtcggcgcctgttcgcctgcccgcttcgtacgctggcagcaaacgccgcaggggctggaatcgcgtctcaatgaagtgctgattgaccgttatcaggatggcgagaatgccggttatccgacgctgtgcaaaggccgctacctggttgatggcgagcgctatcacgcgctggaggagcccaccagcctcaacaccctggaactgttgccggaattgatggccgccaatatcgcctcggtgaaaatcgaaggccgtcagcgcagcccggcttacgtgacccaggtggcgaaagtctggcgccaggcgatcgatcgctgcaaagccgatccgcagaatttcgtaccgcagtccgcctggatggagaccctgggcgccatgtccgaggggacacaaactacccttggcgcttatcaccgtaaatggcagtga

SEQ ID NO: 138035 - DNA, 525 bp, Enterobacter cloacae
gtgttggataaactgcgttcccggctggtccactttggcccgtctttaatgagcgtgccggttaagctggcgccttttgccctcaagcgccaggtgctggagcaagtgctgagctggcagtttcgccaggcgctggcggagggggagctggagtttcttgaggggcgttggttaagtattcatgtgcgtgacatcggtctgctgtggtatacctcggtagtcgatggtcgactggtggtcagccagcaggccgacgccgacgtcagcttcagcgccgacgccagcgatctgttaatgatcgccgcgcgcaagcaggatccggatacgctattcttccagcgtcgtctggtcattgaaggcgatacggagctggggctgtatgtaaaaaatttgatggacgccattgagctcgagcagatgccaaaagcgctgcgcgtgatgttgctgcaactggcggattttgtcgaagctggactgaagagcccgcagaaacctgaacagacatcggtaggtgaggcatgctga

SEQ ID NO: 138036 - DNA, 504 bp, Enterobacter cloacae
atgctgattcgagtggagattgggattgatgcaccgggaatcgacgcgctgctgcgtcgtactttcggccgcgatgccgaagcgcagctggtgcacgatctgcgtgaagatggactgatcacgctgggggtagtggcgacggatgatgaaggccaggtgatcggctacgttgccttcagcccggtggcggtggaaggtgaagagctgcagtgggtcggcctggcgccgctggcggtagatgaacgctaccgcggacagggcattggccggcagctggtttatgaagggctggactcgctgaatgagtttggctacgccgcggtggtgacgctgggcgacccggatttataccgtcgcttcggctttgaaccggccgcgcgcttcgatctccgctgccgctggccggacagcgccgaggcgttccaggttcaccgtctggcggatgacgccctcgacggcgtccatggccaggtagaatacagcgagcactttaatcgtctttaa

SEQ ID NO: 138037 - DNA, 321 bp, Enterobacter cloacae
atggtgcacacaccttaccatagtgactttgtgaccgtgtgctggtttctgtatctcattcgaaccgcggataatcgcctttataccggcatcaccaccgacgtgccacgccgctttcgccagcatcaggcgggaaaaggcgcaaaggcgttgcgcggcaaaggcgacctgcagctggcctttagccacgaagttggtgaacactcacttgcattgcgactggaatatcgcgtcaagcagctaacgaagcgcgaaaaagagcgcctcgttgccggagaggatgccttcgaaaccctgctggcgaggcttaaagacgattaa

SEQ ID NO: 138038 - DNA, 444 bp, Enterobacter cloacae
atggatacgcttgccgccattggtcgctggctgagtaaacagcacgtcgtcacctggtgcgtctcccgtgaagacgagctgtggtgcgcgaatgccttttacgtctatgacccggataccgtggccttttatctgctcagcgaggagcacacccgccatggccagatgaccggacagagggcgaaggtggccggcacggttaacggccagccaaaaacggtggccctgatccgcggcgtgcagttcaaaggcgagatccgtcgtctgagcggtgacgaagaggcgcgaatgcgccagcgctacgtcaagcgcttcccggtggcccgcatgctgtcggcgccggtatgggagattcgtccggacgaaatcaaatttaccgacaacacgctgggtttcgggaaaaaattacactggcggcgtgatgccggcgccgagcaggcgtag

SEQ ID NO: 138039 - DNA, 537 bp, Enterobacter cloacae
atgagtaaaaagatagccgtcctcattaccgacgactttgaagattctgaatttacctctcccgccgaagcctttaagctcgccgggcatcaggtcatcacgatcgaaaagcaggctggcaaaacggtgaagggtaagcagggagaagccgaggtcgccatcgacagagccatcgatgacgtcacaccgggtgaatttgatgccttattgctgcccgggggctactctcccgaccagctgcgtggtgatgaacgcttcgtcacctttacccgcgattttgtcaacggcggtaagccggtgtttgccatctgccacggcccgcagctgctgatcagcgccgatgtgatccgcggacgtaagctcacggcggtgaaaccgattgtggtggatgtgaaaaacgccgggggcgagttttacgaccaggaggtggtggtcgataacgaacagctggtcaccagcagaacgccggacgatctgccggccttcaatcgcgaagcgctacgcctgctcggcgccggcatcacgccgccagtgtaa

SEQ ID NO: 138040 - DNA, 648 bp, Enterobacter cloacae
atgagtcaggtattattaaccggcgcgaccgggttagttggcggtcacttactccggctgctgcagaatgagccccgtataagcaccatcgccgcgccgacgcgtcgcccgctggcgccagcggaaggtgtttttaatcctcacgatccccagctgaccgatgccctggcgcaggtggttgacccggtggatatcgtcttctgttgcctgggaacgacgcgccgggaggccgggagcaaagaggccttcgtccatgctgactacacgctggtggttgataccgcgctgaccggcaaacgactgggtgcgcaacatatgctggtggttagcgcgatgggcgccaacgcccactcgccgtttttctacaatcgggtgaagggggaaatggaggcggcgctgattgagcaagactggccgcggctgaccatcgccaggccgtcgatgctgtcaggcgagcgggaaaaaaagcgggccaatgagaccttcctcgcaccattgttccggctcttgccggggaactggaaatccattgcggcccgcgatgtggcgatcgccctgctggcggaggcgctgtcgcccacccacgaaggggtgcgaattctgacatcatcggaactacgggagcgcgccgcgcggcaggctgaatag

SEQ ID NO: 138041 - DNA, 1041 bp, Enterobacter cloacae
atggctggtcagtcttcatctcaggcggcgtcaccatttcaatggtggaaacccgcgcttttctttctcgtcgtgattgttggtctgtggtacgtcaaatggcagccgtactacgggaaagccttcaccgctgcggaaacccacagtatcggtaaatctattctcgcccaggccgacgctaacccgctgatggcggcgtgggactatgcgatggtttacttccttgccgtctggaaagcggcggtgctcggcgtgctgctcgggtcattgattcaagtactcattccgcgcgactggctgctacgcaccctgggacaatcgcggtttcagggcacgctgctgggagcgattttctcgctgcccggcatgatgtgcacctgctgcgccgcgccggtcacggccgggatgcgcaaacagcaggtgtcgatgggcggggcgctggcgttctggatggggaacccgctgctcaatccggcgacgctggtgtttatgggttttgttctgggctggcagtttgcgctggttcgcctggtggcgggtctggcgacagtattaactgtggcgacgctggtgcagaaatgggtgaaagaggcggcgacgcagccggtagcggtgcctgctgcaccgtcggaagcgactcagggcggcttctttagccgctggcttcaggcgctgtggacgctgttctggaacacgatcccggtttatatcctcgcggtgctggtgctgggagcggcgcgcgtctggctgttcccgcacgccgatggcgtggtggataatacgttgttctgggttatcgcgatggcgatcgccggctgcctgtttgtgatccctaccgcggcggaaattccgattgtgcagacaatgatgctggcgggtatggggacggcgcccgcgctggcgctgctcatcacactgccggcagtgagcgtgccgtcgctgattatgctgcgtaaagccttcccggccaaagcgctgtggctgacgggcggactggtggcgctgtgcggggcgattgtcggtgcgctggcgctggtgtag

SEQ ID NO: 138042 - DNA, 576 bp, Enterobacter cloacae
atgaaggctctctcgcccctcgccatcctgctttctgcactactgctgcagggctgcgttgccgccgcggtagtcggaacggcagcagtcggcaccaaagccgcaacggacccgcgtacggtgggaacccaggtcgatgacagtaccctggaactgcgcgtcaatagcgccttgtcgaaagatgaacagattaagaaacaggcccgtatcaacgtcaccgcttatcagggcaaagtcctgctgaccggccagtcgccgacgccggacctctccgcgcgcgccaagcaaatcgccatgggcgtggaagggaccacggaagtgtttaatgaagtgcgccagggccagccgattggtttaggcaccgcctcgtctgatacctggattaccaccaaggtgcgttcgcagctcctgagcaccgatcaggtcaaatcctcgaacgtgaaagtaaccacggaaaacagcgaagtcttcctgatggggctggtgaccgaccgcgaaggccgggcggcggcggatattgccagccgggtaagcggcgtatcccgggtgaccaccgcctttacctacattaaataa

SEQ ID NO: 138043 - DNA, 1320 bp, Enterobacter cloacae
gtgcaacagatagcccgcgctgtcactcaggcattcaacaatctgccacgacctcatcgcgttatgctggggtcgcttagcgttcttaccttagcggtcgccgtctggcgaccctacatttaccacccggaatccgcccccatcgtcagaaccattgaactggaaaaaagcgagatccgctccctgctgccggaagcctccgagccgatcgatcaggccccgcaggaagaagaagccattcctcaggatgagctcgacgaaaaagccgatagcgatgccggcgggcacgaatatgtggtgtcgaccggcgatacgctcagcagtattctgaaccagtacggtatcgatatgggcgatatcgcccagctttcctccgccgataaagagctgcgcaacctgaagattggccagcagctctcctggaccctgaccgccgacggcgatctgcagagcctgacctgggagatgtcccgccgcgagacccgcacctatacccgtgtggataacggttttaaaatgagcagcgagctgcagaaaggcgattgggtcaacagcgtgctgaagggcaccgtcggcgccagctttgtctccagcgcgcgtgatgccgggctgaccagcacggaaatcaacgcggtgatcaaggccatgcagtggcagatggatttccgtaagctgaagaaaggcgacgaattctcggtattgatgtcgcgcgaaatgctcgacggcaaacgtgagcaaagccagttactcggcgtgcgtcttcgctctgacggtaaggattactatgccatccgcgccgaagacggcaaattctacgaccgcaacgggacgggtctggcgaagggctttatgcgcttcccaacggcgcgtcagttccgcgtctcctctaactttaatccgcgtcgtctgaacccggtcaccggccgcgtcgcgccgcaccgtggcgtcgatttcgcgatgccgcagggaacgccagtgctggcggtgggcgatggtgaagtagtcgtggccaaacgcagcggcgctgccgggtattacgtcgcgatccgccacggtcgcacctataccactcgctacatgcacctgcgtaagctgttagtgaagccggggcagaaagtgaagcgcgggaatcgcattgcgctgtcggggaataccggacgctctaccgggccacacctgcactacgaagtgtggatcaaccagcaggcggtcaacccgctgacggctaagctgccgcgtaccgaagggctgagcggttccgaccggaccgactatctggcgcaggtcaaagaggtcgttccgcagctgcggtttgactaa

SEQ ID NO: 138044 - DNA, 975 bp, Enterobacter cloacae
atggaaacgaaaaaaaataatattgagtttatccctaagtttgaaaaatcctttttactgccgcgctactggggcgcctggctgggggtctttgccttcgccggtattgcgctgacgccgccatcctttcgcgatccgctcctcggcaaactcggtcgtctggtggggcgtctggcgaaaagctcgcgccgccgggcgcagattaatttgctgtactgcttcccggaaaaaagcgagtacgagcgggaagcgattatcgacgccatgtatgcctcggcgccgcaggcgatggtgatgatggccgagctgggcctgcgcgatccgcagaaaatccttgcccgcgtcgactggcaggggaaagcgatcatcgacgagatgcagcgcaataatgagaaggtgatttttctcgttccgcatgcatggggtgtggatatcccggcgatgctgatggcctccggcgggcagaagatggcggcgatgttccataaccagggtaacccggtgttcgattacgtgtggaataccgtgcgtcgtcgttttggcgggcgtatgcacgcgcgcaacgatgggatcaaaccgtttattcagtcggtgcgccagggctactggggctactatctgcccgatcaggatcacggcgccgaacacagcgagtttgtggatttctttgctacctacaaggccacgctgccggcgattggccgcttaatgaaagtgtgccgcgcccgcgtcgtaccgctgttcccggtctacgatggcaagacgcaccgcctgacggtgctggtgcgcccgccgatggacgatctgctggacgctgacgatacgaccatcgcccggcggatgaacgaagaagtggaagtgtttgttaagccgcacaccgagcagtatacctggatcctgaagctgctgaaaacgcgcaagccgggtgaaatcgagccctataaacgcaaagagctgttcccgaaaaagaaataa

SEQ ID NO: 138045 - DNA, 1443 bp, Enterobacter cloacae
atgtccagaaggcttcgcagaaccaaaatcgttactaccttaggcccggcaactgaccgcgataacaacctggaaaaggttatcgccgcgggcgcaaacgtagtacgtatgaacttctctcacggcaccccggaagatcatcagctccgtgccgacaaagtgcgtgagattgcggcaaaactgggccgtcatgtggccatcctcggcgatctccagggaccaaaaattcgcgtatcgaccttcaaagaaggcaaaattttcctcaacgtcggcgataaattcctgctcgacgcaaaccttggcaaaggcgaaggcgacaaagagaaagtcgggatcgactataaaggcctgccggcggacgtcgtgccgggcgatatcttattgctcgacgatggtcgcgtgcagctgaaagtcctcgaagttcaggggatgaaagtgttcactgaagtgaccgtcggcggcccgttgtccaacaacaaagggatcaacaagctgggcggcggcctgtctgccgaagcgctgaccgacaaagataaagctgatatcgtcaccgccgctaaaatcggcgtcgactacctggccgtctctttcccgcgctgcggcgaagacctgaactacgcccgtcgcctggcgcgcgatgccggctgcgatgcgaaaatcgtcgccaaagttgagcgtgccgaagcggtttgcgatcaggatgcgatggacgacgtgatcctcgcctccgatgtggtaatggttgcccgtggcgacctcggcgtcgagatcggcgatcctgagctggtgggcatccagaaagcgctgatccgtcgtgcccgtcagctgaaccgttccgtcattaccgccacccagatgatggagtcgatgatcaccaacccgatgccgactcgcgcggaagtgatggacgtggccaacgccgtgctggatggtaccgatgcggtgatgctctccgcggagaccgccgccggtcagtatccttcggaaaccgtggccgcgatggcgcgcgtgtgtctgggcgcggaaaaaatccctagcctcaacgtctccaaacaccgtctggacgtccagttcgacaacgtggaagaagcgattgccatgtcggcgatgtatgccgccaaccacctgaaaggcattaccgccatcatcaccatgaccgaatcgggccgtaccgcgctgatgacttcgcgcattagctccggtctgccgattttcgccctctcccgccacgagcgcaccctgaacctgaccgccctctaccgcggggtgacgccggtgttcttcgacagccagaatgacggggtggccgccgcgcacgacgccgtcaatctgctgcgggacaaaggctatctggtctccggcgacctcgtggtcgttacccagggtgacgtgatgagcaccatcggcagcaccaacaccacccgtatcctcaccgtcgagtaa

SEQ ID NO: 138046 - DNA, 888 bp, Enterobacter cloacae
atgagcgccctgttactaatgaacatgctggaaaaaatccagtcccgactggaacaccttagcaaatctgaacgcaaagtggcggaagtgatcctcgccacccccgagcaggccattcattcgagcatcgccgccctcgcccttgaggccggggttagcgaaccgaccgtcaatcgcttctgccgtagtctcgaaacccgcggattccctgacttcaaactgcatctggcccagagccttgcgcacggcacgctctatgttaaccggaatgtcgatgaagacgacagcgttgagtcatacacgggaaaaatattcgaatcggccatggcgagtttagatcaggtgcaccattctctcgacatgtcggcggtaaatcgcgcggtggatctgctgactcaggccaaaaaaatcgcctttttcggcctcggctcctcagcggcggtcgctcacgacgcgatgaacaaatttttccgctttaacgtgccggtcatctattccgacgacattgtcctgcaacggatgagctgtatgaattgcgatgacgatgatgtggtggtgattatctcgcataccggaagaaccaagagcctggtggagctggcgcagctggctcgtgaaaacgatgccatggtgatcgctctaacctccgccggtacgccgctagccagggaagccacgctcgccattacccttgatgtgccggaagataccgacatctatatgccgatggtctcccgtttggcccagttgaccgtcattgacgtgttggcgactggctttaccttgcgtcggggggcaaaattcagagataacttgaagagggtcaaggaagcgctgaaggaatcgcgttttgataaagaaccattcgtacccagtgataatcaataa

SEQ ID NO: 138047 - DNA, 1476 bp, Enterobacter cloacae
atggcggtaacgcaaacggcccaggcatgcgacctggtcattttcggcgcgaagggcgacctggcgcggcgtaaattgttgccttccctgtatcagcttgaaaaggcgggccagatccacgctgacaccagaatcattggcgtcggccgtgccgactgggataaagcggcttataccaaagtcgtgcgcgaagcgctggaaaccttcatgaaggaaaaaattgatgaaggtttgtgggataccctgagcggacgcctggagttctgtaatcttgacgtcaatgacaccagcggcttcacccgcctgggtgagatgctggatcaaaagaaccgtgtcaccatcaactatttcgctatgccgccgagcacctttggcgcgatctgtaaagggctgggcgaagcgaagcttaatgccaagcctgcgcgcgtggtcatggaaaaaccgctcggcacctcgctggaaacctcccgtgaaatcaacgaccaggtcggcgagttttttgaagagtgtcaggtctaccgtatcgaccactatctcggtaaagagacggtcctcaacctgctggcgctgcgcttcgccaactccctgttcgtcaataactgggactgccgcaccatcgatcacgtcgaaatcaccgtcgcggaagaggtgggtattgaagggcgctggggttacttcgaccaggccgggcagatgcgcgacatgatccagaaccacctgctgcagatcctgtgcatgattgccatgtcaccgccgtccgatctcagcgccgacagcatccgtgatgaaaaggtcaaggtgctgaaatccctgcgccgtattgaccgctccaacgtgcgcgagaaaaccgttcgcggccagtataccgccggctttgcccagggcaaaaaagtgcctggctatctcgaagaggagggggccaacaagaccagcaacaccgaaaccttcgtggcgatccgagtcgatatcgataactggcgctgggctggcgtaccgttctatctgcgcaccggcaaacgtctgccgaccaaatgctcagaggtagtggtttacttcaaaaccccggaactgaatctgtttaaagagacctggcaggagctgccgcagaacaagctgaccattcgcctgcagccggacgaaggggtagatatccaggtactgaacaaagtgccgggcctcgatcataaacataacctgcagatcactaaactggatctgagctactccgagacctttaaccagacgcacctggccgatgcctatgaacgtctgctgctggagaccatgcgtggcatccaggcgctgttcgttcgccgcgacgaagtagaagaggcgtggaaatgggttgactccattaccgaagcctgggcagccgaccgcgatgcgccgaaaccgtatcaggccgggacctggggaccggttgcgtcggtggccatgatcactcgcgacggtcgttcatggaacgagttcgagtaa

SEQ ID NO: 138048 - DNA, 1812 bp, Enterobacter cloacae
atgaattcgacaatgttacgggtaacaaatcgcattatcgaacggtcgcgtgacacccgcgcggcttacctcgcaaggattaaccaggccaaaaccgacaccgtgcatcgtgcgcaactggcctgcggcaatctggctcacggattcgcggcctgccaggctgacgacaaagcctccctgaagagcatgttgcgcaacaacattgccatcatcacctcctacaacgacatgttgtccgctcaccagccctatgaacactacccggagatcatccgcaaagcgctgcacagcgccaatgcggtcggccaggtcgccggcggcgtgccggcgatgtgcgacggcgtaacgcagggacaggacgggatggagctttcactcctgagccgcgaggtgatcgctatgtccgccgccatcggcctgtcgcataacatgttcgacggggccctgtatctcggggtctgcgataaaattgttcccggtctgaccatggcggcgctctcatttggccatctgccgtcggtctttattccctccggtccgatggccagcggcctgccgaataaagagaaggttcgcattcgccagctgtatgcagaagggaaagttgaccgtatggcgctgctggagtccgaagccgcctcttatcacgcgccggggacctgtactttctacggaacggcgaacaccaaccagatggtggtcgaatttatgggcatgcagctgccgggctcgtcctttgtccatccggatgctccgctgcgggaagcactgaccgccgccgccgcgcgccaggtcacccgcatgaccggcaacggcaatgagtggatgccgctgggcaaaatgtttgacgaaaaagtggtagtcaacggcatcgtggcgctgctggcgaccggtggctccaccaaccacactatgcacctggtggcgatggcccgcgcggcgggaattatcattaactgggacgatttctccgacctgtcagacgtggtgccgctgctggcgcgcctctatcccaacggcccggcggatatcaaccacttccaggcggcaggcggcgttccggtactggtgcgcgagctgctgaaaggcggcctgctgcatgaggatgttcacaccgtggccggctttggcctgtcgcgctacaccctggagccatggctgaataacggcgagctggactggcgcgaaggggcgacagcgccattggacgaccaggtcatcgcgacctttgaaaaaccattctcccgccacggcggcaccaaggtgctgagcggcaacctgggacgcgcggtgatgaaaacttcggcggtcccggtggagaaccaggtgattgaagcgccggcggtggtatttgagagccagcacgacgtgttgccggcctttgaagcggggctgctggacaaagactgcgtggtggtggtccgtcatcaggggccaaaagcgaacgggatgccagaattacataaacttatgccgccacttggtgtattattggaccgccgtttcaaaatagcgctggtgaccgatggccgactctctggcgcctccggtaaagtcccgtcagccattcacgtcacgcctgaagcgtatgatggcggcttgctggcgaaagtgcgcgatggcgatcttattcgcgtgaacggacagacgggggaactgacgctgctggtggatgaggccgaactggcggcgcgtcagccgcatatccctgacctcagcgcgtcgcgcgtgggaaccggtcgggagatgtttggggcgctgcgtgagaagctctctggcgcggagcagggcgcaacctgcatcactttttaa

SEQ ID NO: 138049 - DNA, 642 bp, Enterobacter cloacae
atgaaaaactggaaaacaacagcagaagcaatcctcacctccggtccggttgtcccggttatcgtagtgaaaaagctggaacacgcggtaccgatggcgaaagcgctggtggcgggcggcgttcgcgtgctggaagttaccctgcgcaccgagtgcgccctggaggcgatccgcgcgattgccaaagaagttccggacgcgattgtcggcgcgggcacggttaccaacgttgagcagttgaaagcggtaacggaagccggcgcgcagttcgctatcagcccgggtctgaccgaatccctgctgaaagtggcgaccgaagacggcaccatcccgctgatcccggggatcagcacggtatctgagctgatgctgggtatgcagtatggcctgaaagagtttaaattcttcccggcggaagccaacggcggcgtgaaagccctgcaggcgattgcgggtccgttcggccacattcgtttctgcccgaccggcggtatctctccggccaactaccgtgactacctggcgctgaacagcgtactgtgcatcggcggttcctggctggtgccagccgacgccctcgaagccggcgactacgatcgcatcaccaccctcgcgcgagaagcggtggaaggcgcgaaataa

SEQ ID NO: 138050 - DNA, 537 bp, Enterobacter cloacae
gtgcatttctgcgctccggttggccatcgccaggaagacggcgattaccgtgagtcctggcagccgcagcagatgagcgacctggccctcgagcgtgcccaggccatcgcccgcgaggtggtgctggcgctgggaggttatggtctgtttggcgtggagctgttcgtatgcggcgacgaggtgatcttcagcgaagtctccccgcgaccacacgacaccgggatggtgacgcttatctcccaggatctctcggaattcgccctgcacgttcgcgccttcctcgggctacccgtcggcgctatccgccagtatggtccggccgcctccgcggtgatccttccgcagttgtccagacagaacgtcagctttggccagctgcagtcggccgtcggggctggcctgcagctgcgtctgttcggcaagccggagattgacggtacccgccgcctgggggtaaccctcgccgtcgccgattcggttgaggaggccgtggcgcgggctaaagccgccgccgcggcggtcatcgtcgaagggtaa

SEQ ID NO: 138051 - DNA, 696 bp, Enterobacter cloacae
atgactgtattaggcaccgcgctgcgcccggcagccaccaaagttatgctgttaggttccggcgagttgggtaaagaagtcgctattgaatgtcagcgtctgggcattgaaaccatcgccgtagaccgctaccccgatgccccggcgatgcaggtcgcccaccgcgcccacgtcatcaatatgctgcacggcgagagcctgcgcgccctgattgaacaggaaaaacccgattacatcgtgccggagatcgaagctatcgctaccgacaccctggtcgaactggaacaggccgggcagaaagtggtccccacggcgcgggcggcaaagctcaccatgaaccgcgaaggcattcgccgcctggcggcggaagagctgcagcttcccacctcccgctatcgttttgccgacagcgaagaaggcttccgcgcggcggttaccgagatcggtttgccatgcatcgttaaaccggtgatgagctcctccggcaaaggccagagctttatccgctcggctgaccagctcagcgaagcctggcgctatgcgcagcagggcggccgcgctggcgccggacgggtgatcgtcgagggggggggtgaacttcgatttcgaaatcaccctgctcaccgtcagcgccgtcgacggcgtgcatttctgcgctccggttggccatcgccaggaagacggcgattaccgtga

SEQ ID NO: 138052 - DNA, 348 bp, Enterobacter cloacae
atggcggttgaaattaaatatgtggtgatccgcgaaggtgaggaaaaaatgtcttttgccagcaaaaaagaggccgacgcttacgacaaaatgctcgatctggcagaggtgctgaatgactggctggtggcatcgccgctggagatggatgacgtccagcgcgataccatggcgatgtggctggcggagcgtaaagaagcgctgcagcatatcctgcgagttggccgactgccggagcaagagacgcccgcacaggacgtccccgcgccgtcggctaccgccgagacttctcaggcggatgatgacgccgtgcccgcggccaaagcgcgcaaagccaaggcagcctga

SEQ ID NO: 138053 - DNA, 414 bp, Enterobacter cloacae
gtgcagccactgaccggcggcaaacggcgggagatcctcgggctgaaggaacaggtcggcgctcggacggaccataaaggtaaaggtgcgctccccgtggctatcgagatcgaccaccaccgtggaggtgcgctgcgccgcatcgaggcgcatatagttcacatccacttgctcctgcgccagggtgtgaagcataaaacggccgaagggatcgtcgccgacgcggccgataaacccgctgtcaccgccgagccgcgccacaccgaccgccacgttggccggcgcgccgccggggcattgcagcaggcggccctctccatcgggcaggagatcgacgaccgcatcgccgagtacccagatttttccattcatacgacaagctcctctaagctaaactttattaaaccggtttag

SEQ ID NO: 138054 - DNA, 768 bp, Enterobacter cloacae
gtgagccaggcggaatatttcgccactccagatctggacttttccttccccacccgcttaggtatagttcaacaggtcgcggttagccccgccgcggtggccaaaggtaaaggagtgcgtagcgcgatgaaccccagttttggcgatatttacgatcggtaccagaagctgacgttgactacgcatctgccggcggtgatcgcctgcagtgaaacgctgagtttgggcaaagaccagggctttattccgcagccgggctatctctactttctgctgcaggggcaaatgacattggcctttggtgatgagcagaacctggtcgggattgttatcgcgcatatgccgttaggattactggaacattattgtccgtcggtcgcgctctattatcagtgtctgggcgagtgccagctggcgaaaataaccgccagcgattttgagcgaatattctttcattcgtcgccgggctatatgcaagagctgaccacgatcctggcctatatgggcatatttgcccttgatgcccactatgaacgcggcagccagaccagctttcagaccattaaatcgatgctgtcgcgctatttatatcgcggcgaaattgatgggggtcagcatgagagcctgtcggcatttattattaaacgaaccaatctctcgcgcagctatgtgtaccaggtgctggccgcgctgcgcgaggggggatatatcacggtgaaaaaaggcaagctgatctccatcgaccgtcatattcctgagaaattctaa

SEQ ID NO: 138055 - DNA, 345 bp, Enterobacter cloacae
atgaccctggactatgtggcgctggccattctgatcgccgtggccttaatacttttttatggcgtgattgttattcacgatattccttatgaaatctccaaagagcggcgtcatcctcatcaggatgcgattcattatgccggttgggtcagcttatttaccctccacgcgctgtggcccttgttatggatctgggcgacgctgtggcgcgaagaccgcggatgggggatgcgccacattgccgacgatcagcaggcgctgcatcagcgtctggaaacggtggtccagcagctggaacaggtccagcgcgaggtggacgttctgaaagcgaaggaggcaaaataa

SEQ ID NO: 138056 - DNA, 1143 bp, Enterobacter cloacae
atggaaacgttaatgttgctgacctacgccgcgctatgcatcgtggtgtttaaagtttttcgcatcccgctcaataagtggaccgtgccgacggcggtgctcggcggtatcgccctgattggcgcggtgatcttcgggatgaactacaacttcccttataccgacgtcggtaaccaggtgtttcgcaccgtgccgattgtgtcgcaggtgcgcggccgggtgcagagcgtaccggtgaagcctaaccagatgctgcataagggcgatgtgctgtttaccctcgacccgacgccgttccaggcgaaagtggacgatctgcaggcgcagataaaagcagccagtcaggatgcgctctccttaaacgcggcgttaagccaggcgcaggccgagctgagccgtgcggtggcccagcgcgaccagtcgcggcgggagtatgcccgctatcgggagggccatgcccagggcgccttctccgatcaaatggttgatacccgtctgcagacgtggaaagccgatgaagccagcgtcagcgcggctcaggcgaaggtggttcaggcgcgtaatgcgctggactcggtggtgaagggcaaaaacaccaccgtggcctccctgctggcgcagctgcaaaaggcgcagtttcagctggagaacaccgtcgtccgcgccccggaggatggctatgtcagtaccgtcggcttacggccgggcaccatgtccactgcgctggggatgatcccgctgatgacctttgtgccggtggagggcgccgcctcgcgggagtacgtcgcggcatttcgccagaacgccctgcagcgtctgcacaaaggcgagcccgcggagctgatgtttccggctatcccgggcaccgtctttcgcggagaagtggccgacgtgctgccggcgattggcgagagccagttccaggggcagggcaaattgctgaccacagacgcgctcaatacccatggccgggcgctggtggtgctgaaggtgaccgatccgcgatttgccgaatacgctctaccgcagggggccaccctcgaggcggcggtctactcggatcatctgaaagagctgtcgctgatcaggaagatcctgatccgcatgaagagctgggaaaactatatctatctcgatcactaa

SEQ ID NO: 138057 - DNA, 798 bp, Enterobacter cloacae
atgagcgaccagacattatccgggctgtcgctgtctcacttcagcgccggctaccccagacgcaaggtgatcgagaacctgacggttccccatctgccgcgagggaaaatcaccgcgctgctggggccaaacggcagcggtaaatcaacgttaatgcgggcgatggcgggtctgggcccctgccgcggcgagctgctgctggagggggaaaatctgctgacgcagccgttctcacgtcgcgcagagcaggtggtctatcttccgcagacgctgcccgccggcgtgcatctgcatgtgctggagtcgattatcgttgcccagcgcgccgccggaggacgccacagtccgcagcgccaggaggaggtgatggcgctgctgcgacagctggggattgcccatctggcgatgagctacctcgatcagctctccggcgggcaaaagcagctggtgggtctcgcccagtcgctgatccgccagccgcgcctgctgctgctcgacgaaccgctcagcgcccttgacctcaactaccagtttcacgtgatggatctggtgcgccgggagacccggcggcgcaacatcgtgaccctggtggtggtgcacgacatcaatattgccctgcgtcacgccgaccacgtgctgatgctcaaggcgggccagctgctcggcgacggcaccccggccgcggtcatcacccccgagactctggcggccgtctatggggtgcgcgggcgtattgaaccctgttcgcagggggtgcggcaggtgattattgacggcctggtggacagcgaggcctga

SEQ ID NO: 138058 - DNA, 1083 bp, Enterobacter cloacae
atgcgtttaacctccgactccgtgctcgacgggctgcccgccgggacctctggcgtgatggatgactatcgccgtatcgtgcgtcgccgtctgctgctgatcctcctgctggcgctgttgattgtcgcgtcactgctgctcgattttatgctcggcccctccggtctgccgctgcagaacctgtggcagacgttaaccgatccggccagcgccgatccgggcacgcgcgccatcgtctgggatatccgcctgccctatgcggtgatggcgattatcgtcggtctggcgctgggactggccggcgccgaaatgcagaccatcctcaataacccgctggccagcccgtttaccctcggcgtctcctcggctgcggcgtttggcgccgcgctggcgattgtgctgggtattggtctgcccggtattcccggccagtggtttatctcggccaacgcctttatcttcgccctgctggcggccctgctgctggacggcatcacccgctggacccaggtggccacctccggcgtcattctgttcggcatcgcgctggtctttacctttaacgctctggtctcgatgctgcagttcatcgccaacgaagacacgctgcaggggctggtgttctggaccatgggcagcatcgatcgcgcctcctggagcaaagtcgccatcctgctggtcgccctggcgctggtgatgcccctgtcgctgcgcagcgcgtggaagctgaccgccctgcggttgggcgaggaccgggccatcagctttggcattaacgttcgccgtctgcgcctgaccacgctgctgcggatcagcatcctgtcagcgctttcggtggcctttgtcgggccaatcggctttatcggcctggtggcgccgcatattgcgcggatgctcttcggcgaagaccatcgcttttacctgcccgccagcgcgctgatcggcgccctggtgctctccctggcctccatcgcctcgaaaaacctgatccccggggccattattccggtggggatcgtcacttccctggtcggggtcccgttctttttgagcatcattttacgtcatcgggggcaggtatga

SEQ ID NO: 138059 - DNA, 1119 bp, Enterobacter cloacae
atggcaagaaaatcagtaagatcgctgttacttactgcgctgctcgcgactcccctcctcagctatgcaacccaatatcccctgacggtcacggaccttgacggccggcaggtcaccctcgccaaagagccgcagcgtattattttgcaggatggtcgcgacattatgaccctcgccctgctggaccgggacaatccgtttaaacggctggtggcatggaataatctggcgaaaaagcaggatgttgccacctggcagatgctgaaaacgacgtggccccagtcggccacgatccttgacatgggcttcagcgataaagggaacgtcgatcttgaaagcgtcatcgcccgtcagccggatctgatgatcgcccagctgcgcgccaggccagcgctgatggagagcggcgtcatcgacaagctcagcgccctgcacgttccggtgctgtttgtcgactatgagatcgccccggcgaaagataccgcccccagcatcgacctgctgggcaaagtccttaaccgcgagagccaggccaaagcctttaccgattactatcgtcagcagctgcagtcgattcgccagaagaccgcgaccatcacgccgaaggccaacgtcttcgtggaagcgctggccggcaacagcgacgcctgctgctttacccacggccacagcggctggggcgggctggtggaggcggtcggggcgaacaatatcggttcgcagctgctgccgggcgcctccgggttcgtttcgctggagaaaatcatcagcatgaagcccgacgcctggatcatgaccggctcgaagcgcggcaacagccaggtgttgcccctgggttatgcggttaagccagaggcggtgaaggcccaggcgcagacgctgctggcgcgacctggggtcagccagatcccggcggtacaggaaaagcgggcctatggcgtttatcaccacttctataaccacccgtggaatattgtcggcatggaatacctggcgaaagatatctacccgcaggccttcggcgatctcaacccggatgagacgtaccattatatcgtgcgccatttcaccgacctgccggaccagccgttcgtcttctcctggcagcagagcgagtaa

SEQ ID NO: 138060 - DNA, 390 bp, Enterobacter cloacae
atgaaaaaagcaatgattgcgttatcggctattctggttgcggctccggtttttgctgcgacaacacatgcaacagatgataccgtcgcggcggcgaatgccaacgccaacaccgctaaagagaagctgcatcaggcccagcacgagggcgaagagcagcagctgaaggcgaaacacgccgccgaaggcaagcaggacagcgtcggcagccaggtgagcgaaggcgcgcagaaaacctggaacaagaccaaagaaggcaccgagaaggggtgggataagaccaaagaggtcagtgaaaaaggctggaatgccaccaaatccggtgcggaaaagggctgggataaaaccaaaaccggcgccgaagaattaaaaaataaagtgactgaataa

SEQ ID NO: 138061 - DNA, 456 bp, Enterobacter cloacae
atgaaaaagatgatttctctggcagtaattttatcctgtgtgctgagcgtcccggcctttgccgatggcccgaacgacggccatcgtccggggcaacccacggtgtggcagaacggtccggaccatgacgggcatgcaccgcagggcggacctgacgcgcatcatcagggcgaccatgaccagcgtggcccggatcgcgacggccatgacaaacgcgatctggcacgtcatgagcaggaccatttcgcctggcgcgggaacgatttccgcaaaggccacccggctccggcgccgttccgtggcgatgaatatcgcgtccgcgactggagcgaccgcggcctgccgcccccgccggaaggccatcactggtcctatatcgacggtaactatgtgctgatcgccgcggcgaccgggatcatcacctcgattctggtgagcggcgccctcggccactaa

SEQ ID NO: 138062 - DNA, 1179 bp, Enterobacter cloacae
atgagtgattatgtaattccagaaattaaagcgacggaagcggaaatgatttctatccgtcattatttacatgccaatccggaattaagtcttgaagagtttaataccagcgaactggtcgccagcaagctgacggagtggggctatcaggtgacgcgcggtctcggcaagaccggcgtggtcggcagcctgagcaaaggcgattctccgcgcaccatcggtttacgcgccgatatggatgccctgccgatcgaggaaaccaccggtttaccctgggccagcacggcgccaggaaaaatgcacgcctgcggccatgacggtcacaccaccattctgctggcggcggcgaaatatatcgcctcgccggcctgtcagttcaacggcacggtgcatctgatttttcagccggcggaagaggctatcggcggcgcggatttaatgattaaagacggcctgttcgagcagttcccctgcgaacgcatctttggcttgcacaacatgccaggcctgcctgtaggcaagctgggcttctacgccggcaacttcatggcctcggcggacaccgtcaaaatcacgattaccggctacggcggccacggcgcccaccccgagcgcaccgtcgacccgatcgtcgccggtgcggcgctggtgatggccctgcagagcatcgtggcgcgcaacgtgccgccgggggaaacggcagtggtcagcgtcggcaccttccaggccggtatcgcctccaacgtcattccggagagcgcggtgatggagctgagcgtgcgggcgatgaagccggaaatccgcgacctgctgatcaagcgtattcacgagctcgctgactttaccgccaaaagctatggcgccagcagcgtagtggaggtttacgactcctatccggtattaaccaacagtcctgaagagaccgatttcgcccgggcgctggcgctggaggtgtttggccgcgaaggggtcctggagtcggtctcgccgatgaacgccagcgaggatttcgcttttatgctgcgcgaacgcccaggcagctacttcctgctcggcaatggcgagaaaggggagaagggcggttgcatggtgcacaaccccggctacgactttaacgatgacattatcaccaccggcgcgacgctgttcgcccgtctggtggaaaaacactgtcgctaa

SEQ ID NO: 138063 - DNA, 777 bp, Enterobacter cloacae
atgaaaaaatcactgttgctatggctggcattaatggcgtcgacgtcggcgctggccgaagggggaaaggagatccgcttcggcgtcgacccgactttcgcgccgtttgaatggaaagatccgcagggcaagctggcggggtttgatatcgatttaggcaacgccatttgtcagcagctgcaggcgaaatgcgtgtgggtggaaagcaatttcgacggcattatcccggcgctgaaggcgcgtaaattcgacgcgatcctttccgggatgtacatgaccgagaagcgcaaagcgcagattgcctttagcgacaagttgtataacggaccggtgttcctcgtggcgcgtaaaaataccctgcaaggcaatacgccggaacagctgaagggcaaaaccatcggcgtggagcagggctcggcgcaggagacgtatgttaaccagcactggcggccgcaggggataaacattgtggcctaccagggggccgatagcgtggtgcgtgacctggagtcggggcgcatcgacggcgcggtgctctccgggatgatggccgactacagcttcctgcagcagccgcagggtaaagaattcgcctttgtcggcggccatctgcaggacgatacgctgtttggcgccggggcggcgataggtttgcgtaaagacgatgaggcgctgcgtcaggaaattaacggcgcgattgcgaagattcttgccgacggcacctataaaaaattagctggcaaatattttagctttgatgtttattccgggacataa

SEQ ID NO: 138064 - DNA, 954 bp, Enterobacter cloacae
atgatgacacgtcctttgggcaaaaccggattttccatcgccccattagtctttggcggcaacgtctttggctggaccatcgatgaaaaaaccagttttgctcttcttgatgctttcgttgaccacggttttgacgctatcgatacggcggatgtttattcccgctgggcggagggcaaccagggcggcgaatctgaaaccataatcggccgctggctacaggcgcgccccggcatgcgtgataaagtcaaaattttcaccaaagtcggctccgatctcggcctccccggccataaagggctcagcaaagcctggatccaacaggcggttgacgactctctgcgtcgcctgaataccgattatatcgacctctacttctcccactggccggatccgcaaaccccggtggcggaaacgctggaggccttccacagcctgcagcaggccggaaaaatccgcgcgatgggggcctctaacctcgatgcgatgcagctggcgggggcgctggaggtggcgcgtaagggcggcttgcctgcgtggcaggtgctgcagccggaatataacctctaccaccgctctgcgtttgaaggtgcgctgtgcgatctctgcgtcagccgcgatatcggggtggtgacctactacagcctggcctcggggttcttaaccggtaagtaccgccagccgtcggatctgacacagagccagcgcggaagcgggattggtaagtacctgaatccgcgcgggatgcggattatcgataccctggcggcggtcgcggacgagcagggcgcgaagccggctgaggttgccctggcgtggctgatcggccgcgaaggggtgaccgcgccgatcgccagcgccaccagcgtggctcaggtggagagttttgcccgcgcggcggcgctgagcctgagcgcggagcaagtggcgcggctggacggcgccagcgcctga

SEQ ID NO: 138065 - DNA, 801 bp, Enterobacter cloacae
gtgcaggatcgcaatttcgatgacattgctgaaaagttttcgcgcaatatttacggcaccacaaaaggccagttgcgtcaggcgatcctctggcaggatctggaaccgctgttggcgcagctggggccgggaccgctgagggtgctggatgccggcggcggcgaagggcaaacggccatcaaagtcgcgcaactgggccatcacgtgacgctctgcgatctctccgctgagatggtggctcgcgcccgccaggcggccgccgataaaggtgtgatcgacaacatgcattttgtacaatgcgcggctcaggatattgcgcagcatttggaaagcccggtcgatctggtactgtttcatgcggtgctggagtgggtggcggagccccaggaaatactgcataccctgtggtcgacgctgcgtgctggcggtggactgtcattgatgttctacaatgctaacggcctgttgatgcacaatatggttgccggtaattttgattacgttcaactgggcatgccaaaaaagaaaaaacgcacgctgtcgccggattatccgcgtgaaccacagcaggtttatcactggctggaagagattggctggcagatcgtcagcaaaaccggcgtgcgggtgtttcatgattatctgcgtgaaaaacgccaacagcatgacagctatgcggcgctgctggcgctggagacgcgctactgtcgtcaggagccgtatctcagcctgggccgttatattcatgtcaccgcgcttaagagccaggctcatagccgcagatgcaaggataaagtatga

SEQ ID NO: 138066 - DNA, 780 bp, Enterobacter cloacae
atgcttttcacgctaaaaaagatcgtcggcggcctgctgttgccgctacccgccttactgttgctgatcggtatcgggatcgcgctgttatggttcagccgctttcagcgtaccgggaagctatgcgtgagcctcggctggctgctgctgacgctgctgagcctgcagcccgtggccgacagcctgctgaaaccgattgaagatacctaccccacctggcgcggcgagcagccggtgaactacgtggtggtgctgggcggcggctatacctggaatccggagtgggcgccaagctctaatcttatcaataacagcctgccgcgcctgacggagggcatccgcctgtggcaggcgaatcccggttcgaaaatgatctttaccggcgcggcggcgaaaacgaaccccgtcagcacggcggaagccggggcgagagtggcggagagccttggcgtacctcgcagcgatatcattgtactcgatcggccgaaagatacagaagaggaagcgctggcggtgaagcgcgccatcggcgacgcgcccttcctgctggtcacctcggcgtcacaccttccgcgggcgatgatattctttcgccatgccggcctggatccgcttcccgcgccggccaatcagctggcggtgacctcgccgctcaatccgtgggagcgggccattccttctccagtgtggctgatgcacagcgaccgggtcggctatgaaacccttggtcgcgtctggcaatggctgaaaggcagctcaggcgagccagggcaggagtga

SEQ ID NO: 138067 - DNA, 894 bp, Enterobacter cloacae
atggaacagttgcgaaccgaactcagtcatcttcttggcgaaaagctaagccgggtggagtgtgtcagtgaacaagccgctacggcgctgtggttcctgtacgatgcgcagggaaacccgatgccgctgctggcgcgaagtttcaccacgcccggcgtggcgcggcagctggcatggaagatctcgaccctggcgcgtaatggtacggtgcgtatgccggtggtttatggcgtcatgacgcacgaagaacatcccggaccagatgtgctgctgcttgagcgcctgcgcggcgtaccggtggaggcgccgacgcgcaccccggcgcgctgggagcaactgcaggagcaaatcgtcgaggggctgctggcgtggcatcggcaggacagtggcggctgcgtgggaatggtcgacaatacccaggaaaacctatggccgaactggtaccgccagcgggtagagatattgtggagcaccctgaacctgtatcaggacaccggtctcaccatgcaggataagcgccttttgttccgctcccgcgagtgccttccggagctattccgcgatttcaatgataatgctgtgctggtgcatggcaacttcactctgcgcagcatgctaaaagatccgcgcagcgatcagctgctggcgatggtggggccggggatgatgctgtgggcgccacgcgagtatgaactgttccgccttgctgaaggcggccaggcggaacagctgctgtggcgctacctgcagcaggcgccagtttccgaggcctttgtctggcggcgctggctttatctgctgtgggatgaggtggatagtctggtcaacaccgggcgctttgatcgcgcccgttttgacctcgctgcaaaatcactcctgccctggctcgcctga

SEQ ID NO: 138068 - DNA, 747 bp, Enterobacter cloacae
atgagtttcgtggtcattattcctgcgcgtttcgcctccacgcgcctgccgggaaaaccactgcaggacattaatggtaagccgatgattgtccatgtgctggagcgcgctcgcgaatccggcgcggatcgcattattgtcgccaccgatcacgaagatgtcgcccgggcggttgaagccgccggcggcgaggtctgtatgacccgcgccgaccatcagtccggcaccgaacggctggcggaagtggtggaaaagtgcgcgttcagcgatgacaccattatcgtcaatattcagggcgatgagccgatgatccccccggcgattgtccgccaggtggcggagaatctggctgccagcagcagcggaatggcgacgctggcggtaccgatccatgatgcggaagaggcgtttaacccgaatgcggtgaaagtggtgatggatgccaagggttacgcgctctatttctcccgcgcgactattccctgggatcgcgatcgctttgcccaatcccgcgagaccatcggtgactccctgctgcgtcacatcggcatctatggctatcgcgccggctttatccgccgctatgtcagctgggcgccgagcccgctggagcagattgaaatgctcgagcagctgcgagtgctgtggtatggcgagaaaatccatgtcgccgtggcggccgaagtgcccggcaccggcgtggataccccggaagatctggagcgcgtccgcgctgagctgcgttag

SEQ ID NO: 138069 - DNA, 183 bp, Enterobacter cloacae
atggatcaccgtttacttgaaatcatcgcctgcccggtctgtaacggcaagctgtattacagtcaggataagcaagaacttatttgcaaacttgatagcctggcgtttccgctgcgcgacggtatcccggtgctgctggagacagaggcgcgtccgctggcgctagaagagagtcactcatga

SEQ ID NO: 138070 - DNA, 1230 bp, Enterobacter cloacae
atgtcggtattgcaactatcgcttaacgaggcgcgccacctccatctcgcggcgcaggggttgttaaagaagccccgacgtcgcgctcgcccgaaagacattctttccaccatccagcagatgtcgctgctgcaaatcgataccatcaacgtggtggcccgcagcccctacctggtgctgttcagccgtcttggcagctatccgcagcactggctggatgagtcgctgcgcaacggcgagctaatggaatactgggcgcatgaagcctgctttctgccgcgcagcgatttcgccctggtgcgccatcgcatgttgaatcccgacaatatgggctggaaataccatcgcgcgtggatggaggagcatgccgggagtattgccgagctggtggcgcatatcgggcaaaacggcccggttcgctcggcggattttacccacccgcgcaaaggcgccagcggctggtgggagtggaaaccgcataagcgccacctggaagggctgtttaccgccggcgaagtgatggtggtggagcggcgcaattttcaccgcgtgtatgatctaacccggcgggtgatgccggactgggacgacgagcgcgacgcgctctcccgcgaagacgcagaggccattatgttgcgcaatagcgcccgtagtctcggcatcttccgcgcccagtggctggccgattactatcgcttgcgccagccgtcgctaccgggtctgctggcggcctggcaggaagaggggctggtggtgccggttaacgtggaagcactcggcgagatgtggctgcatcacgaggcgctggcgcagctggagaccgcgcccggcggtaagctgaccgccagccatagcgccgtgctctcgcccttcgacccggtggtctgggatcggaaacgcgctgagcagctgttcaacttcagctatcgcctggagtgttataccccggcgccgaagcgtcagtatggctacttcgtactgcctctgctgcaccagggaaaactggtcgggcggatggacagtaaaatacatcgcaaaagccgggagctggagatcttcgctctgtggctggaggagggggtgaagatcacccgtggtctggagcaggggctacgccgggcgattaacgacttcgcacgctggcaatcggcagagcggatcctgtgccgacgcctgccggaagggctgtttgtcggccaggagcaggggtgggaaatcgacgccgattga

SEQ ID NO: 138071 - DNA, 981 bp, Enterobacter cloacae
atgatcgcgcgcatctggtccggggaatcgccgctgtggcgcctgctgctgccgctctcctggctgtatggcctggtgagcggggtgattcgcctcagctatcagctggggtggcaaaaagcctggcgcgcgccggtgccggtggtggtggttggtaacctgaccgccggcggcaatggcaaaacgccggtggtgatctggctggtggagcagctgcagcagcgcggtattcgcgttggcgtcgtgtctcgcggctacggcggtaaagctgaacgctatccgctggtgttggacgacagaaccagtacggcgctggcgggtgatgaaccggtgttgatccatcagcgtaccggtgccccggtcgctgtcgctccgctacgcagcgacgcggtaaaagcgttgctcagcgcgcacgatctgcagatgattgtgaccgacgacgggttgcagcactataagctcgcgcgggacagagaaattgtcgttattgacggcgtgcgccgctttggcaacggctggtggctgcctgccgggccgatgcgcgagcgggcgtcgcgcttgcaaagcgttgatgcggttatcgttaacggcggcgtggcgcgtccgggtgagatcccgatgcggttgcgcccagggatggcggttaacctgcttaccggcgaacgtcgcgatgtctccaccttcacgaacgtagtggcgatggccggcatcggccatccgccgcgcttcttcgccaccctcgaaagctgcggcgtccagccggtcaaaaccgtggcgctggcggaccatcaggcgctgagccaggctgatgtcgccgccctggtgaccgccgatcagacgctgctgatgaccgagaaagatgccgtgaaatgtcgcgatttcgccgctgcaaactggtggtatttaccggtcgacgccataatggccgatgaacgcgcacagcggttgcttgcggacttagcgacgttggcgcaacgttaa

SEQ ID NO: 138072 - DNA, 1749 bp, Enterobacter cloacae
atgcagaacgataaagatctctccacgtggcagaccttccgccgactttggccgattatcgcgccgtttaaagccgggctaatcgtagcggcggtggcgttggtgcttaacgcgggcagtgacaccttcatgttatcgcttcttaaaccgttattggatgatggttttggtaaaacggatcgctcagtgctgctatggatgccgctggtggttatcggcctgatggtgctgcgtgggatcaccagctacatctcgagctattgtatttcctgggtttccggcaaagtggtgatgaccatgcgtcgtcgcctgttcggccacatgatgggtatgccggtggccttctttgacaagcagtctaccggaacgctgctgtcacgcatcacctatgattctgagcaggtcgcctcctcctcttccagcgcgctgatcaccgtggtccgcgaaggggcatcgattatcggtctgttcgtgatgatgttctattacagctggcagctgtcgctgatcctgatcgtactggcgccgattgtgtcggtggcgatccgcgtggtctccaagcgttttcgcaatatcagtaagaatatgcagaacacgatggggcaggtcaccaccagcgccgagcagatgctgaaagggcacaaagaggtgctgatgtttggcggccaggaagtggaaaccaaacgttttgataaagtcagcaataaaatgcgtctgcaggggatgaagatggtttccgcctcgtctatctccgacccgatcattcagcttatcgcctccctggcgctggcctttgtcctgtatgccgccagcttcccgagcgtgatggacaccctgaccgccgggaccattaccgtggtcttctcctcgatgattgcgctgatgcgtccgctgaagtcgctgaccaacgtcaatgcccagttccagcgcgggatggcggcgtgccagacgctgtttgcgatcctcgattccgagcaggaaaaagacgaaggtacgcgggtcattgagcgggcgaaaggcaatctcaagttcgagaacgtcacctttacctacccgggtcgcgaagtggccgcgctgcgcaatatcaatctcgatatcccggaagggaaaaccgtggcgctggtggggcgctcagggtcgggtaaatcgaccattgccagcctgatcacccgcttctacgatgtcgacgaggggcagatcctgctggatggccacgacctgcgcgagtacaagctgagctcgctgcgcgaccaggtggcgctggtttcacaaaacgtgcatctgttcaacgataccgtcgccaacaatatcgcctatgcccgtaccgaagagtacagccgcgagcagattgaagaggccgcgcgcatggcctacgccatggatttcatcaacaagatggataatggtctggataccatcatcggcgagaatggcgtgatgctgtccggcggccagcgccagcgtattgctattgcccgcgcgctgctgcgtaacagcccgatcctgatccttgatgaagccacctcggcgctggataccgagtctgagcgtgccattcaggcggcgctggatgagctgcagaaaaaccgtacctcgctggttatcgctcaccgtctgtcgaccattgagcaggctgatgaaatcgtggtggttgaagacgggcggatcgtggagcgcggaacgcaccatgatctgctggagcataagggcgtgtacgcccagctgcataagatgcaattcggcgaatga

SEQ ID NO: 138073 - DNA, 2265 bp, Enterobacter cloacae
atgcgtctaccatggcttgccggatgcgccatcattgcaatgctgccgcttctctggctacccgttttgccgggcccgtacagtctggcgggcgcgagcgcactggcgctggcgctgattcgtctgcatggaagggccgtcgccggagtggcgatgacgcttctgctggtggtctggggagtattgagcgcgcatcaggcgctgtggccgacccggcaccttaccggcgccatccggcaagcggaagtgatccttagcgagacggatggccagaccttgcaccgtggacaaatggtgcgcctgcggggccgctatctgtttcccccggtaggcgtaacgctgtacggggaacttgcacctgcgccagcctgtgcgggtcaacactggctgatgacgctgcgcctgcgcccggtgcacgggcagctcaatgacgggggcttcgacagccagcgctatgcgctggcgcagcaccgaccgctgagcggagggatcgtcaccgcttccgcgctggatgcccgctgcagtctgcgcgcccgctatctgacgtcgctgacccggcgactgcagacttatccctggcgcgcggtgatgttgggattaggaatgggggagcggctgtctctgccgacggagataaaggtcctgatgcagaacacgggcacttcccatctgatggctatctcgggtctgcatatcgctctcgcggcttctcttatcatgctgttgctgcgcggcgtgcagtatattctcccgggccgctggatcggctggcggttgccgctgctggccgggctggccggcgccgtcggctatgcctggctgaccggtatgcagccgccggccctgcgcacttgcttagggcttgcggtctgttgtgctttacgtttgtcgggtcaacgctggacggcgtggcaggtgtggctctgctgtctgggagcgatactggttgccgacccgctggcggtcctatcgcaaagcctgtggctatctgccttcgccgtggcggggcttatcttctggttccagtggctcccgttgcctgccgaccgctggcgctggccgtggaagaccataattgctcttgttcatttgcaggctggcgtgacgctgctgctgctgccgctgcagttgttgctattccatggagtcagcctgacgtcgatggcggctaatttgctggcggtaccgttagtcaccctgttggcggtgccgcttattctgaccgcgatgctggtgcatctctcggggccggagatagtggagtcgctgctctggctggcggccgatcgcgtgctggccgtattgttctggggattaagacgtttaccggacggctggttgacgctggatgctcgctggctgtggatcagtatcctgccgtggctgttggtgatgggctggcgttttcagagctggcggcattcaccggcgctgtgtctcagcgtgctgtttttactgacgcggccattcagccgacaaccgcctgcggacgaatggcgggtgacgatgctggatgtcggacaggggctggcgatggtgatcgagcgtcacggtaaggcattgctttacgataccgggccggcttggccgcagggtgatagcggtcaacaggtgattatcccgtggttgcgctggcaccatctgcagctgcaagggattatgctgagccatgaacatctggatcatcgcggcggccttgattcagtgctgcaggcatggccgcaggcctgggtgcgcagcccgttaggctgggcgcatcatctgccgtgtcatcgcggtgagcgctggcaatggcagggactcaacttccaggccctgtggccgctaccgggcagcacggcaaagggtaacaatcattcctgtgtggtgcggatcgatgatggtcgctccagcatcctgctcaccggcgatatagagcgtcaggcggagcaggcgatgatcagccgttactggcggcatctgacgtctacacttattcaggttccccaccacggcagcaatacctcctccagcgcgctgctggtccgccgggtggatggcgcggccgcgctggcctccgcttcgcgctacaatgcgtggcggatgccctcgtacaaggtggttcagcgctaccgccagcggggttatcgctggttcgccacgccgcagcaggggcagataacggtggttttttccgcagaagggtggcaaatccatagcttacgggatcaagttttaccgcgttggtatcatcagtggtttggcgcgcccgccgataacgggtag

SEQ ID NO: 138074 - DNA, 288 bp, Enterobacter cloacae
atgaccaagtcagaattgattgaaagacttgccagccagcaatctcacattccggcgaaagcggtggaagatgctgttaaagaaatgctggaacatatggcctcaacgcttgctcaaggtgagcgcattgaaatccgcggtttcggcagcttttctctgcactatcgagcacctcgcaccggacgtaacccgaaaactggtgataaagtcgaactggaaggtaagtacgttccgcactttaagcccgggaaagaattacgtgaccgcgccaatatttatgaagggtga

SEQ ID NO: 138075 - DNA, 303 bp, Enterobacter cloacae
gtgactgcagttgacgctaaaggcgcaaccgtagaactggctgacggcgtagaaggttacctgcgtgcttctgaagcatcccgtgaccgcgttgaagacgcaactctggttctgagcgttggcgacgaagttgaagcgaaattcaccggcgtggatcgtaagaaccgcgtagtgagcctgtctgtacgtgcgaaagacgaagcggaagaaaaagacgctatcgctaccgtgaacaagcaggaagacgcgaacttctccaacaacgctatggctgaagcgttcaaagcagcgaaaggcgagtaa

SEQ ID NO: 138076 - DNA, 1821 bp, Enterobacter cloacae
gtggcgcggatcgtcgctaactatcagcgtcgcctctcgttgcaggaggtggcggccgcggaatttgtctccgaggcctggctgtcacgcttatttcgcaaagaggtcggggtaagttttgtccagtacctcaccgcgctgcgcctgcgccacgccgccgaccagctattaaccacccgcaaaaccgtccagcaaatcgcccgcgaacagggattcgccagtacgcgaatgatgagcgatttgtttaagcgccagcacggcgtgacgccgcgccagtatcgtgaacagcatcctctggagcttgcccgaccgcgcccgccgcaggccgatcgctggcagccggtggcggccgaccggctgtatgcgcgactcaatgagccggaaccacgcgaccgggaaagtccccccctgccgatcaacccaccgcagacccgggagatcaatctgcgcgatcgtccagcgcgccccgtagcgctgcgccatacccggatggtggtgaccctgcgcgaactggacgatctgctgcgcgaagatgtgcgccgggaactcgaacagctgcaccacgccctgccggtgtatgccatcgatatcaacgatccctttctcagcagtcggctgttcggcaccggctgggacgatccgcagatggccggctacgcctgctggtacaacctgcagcagatttttagctggctggcggcgatgggctggcaggtgatcctgcacaccggcgtcaccacccgcagcgacctgctgcagcgcttcctgcagctcgccgccaaccattttccgccagccacgctcaatagctggcgctttgtctggcactggtcgccgcaggccagcgaagctgcgcgccaggccgcctggcggcagcagcgcggggtccttcatcgcctgctgccgcagccgcagctggggatctggcaccgctttgctcccagcgatcccgggaacgatccgctgttccactcgccgctgctggcagaggcggattttctcgcctgccaggcagatgccaacgaacagctggatctggcccaggcagacagcagccgcctggcctccagcgaacattatccgctgcacaagctgcggcagatccacagcgccctgcgccagcgtcagctcaacctgccgctgtggctgctctcctggaatacgctgaccggcgatacgcgggataccaacggccgcttttttcgcggcgcgctgctgatggataatctgctgggggtggcggaccaggtctggctggcgggcttctggttaaattcaggcctccagggcgaagctcgcgccaacggcaagctcgatacctccagcctggcgctgcactatctgcacggcctgccgcgcccggtttactgggtactctggctctggcggcggctgcgcggcgagatcctggttcacgataaaaacctgctgctgctccaccaccagggtcactaccagctgctgctgcgcaatacggtggtctacaatccctggctctccagcgaagcggcctttatccagcgcttcagccagccctacagcgtgcggctgcagggcctggatggcagctggcgcatcaaacagcacctgttcgatcagcaccacggcgcgttgttcccgctggtggacgcctttcgcagccgcagcggccctgacgccgaggattatcagtggctgatgcatcaggcccgtccggcgctcagcgtggatgaagccaggctcgatggctattggctgcggatcgactcgctgcagagcaatgcgctggtgctgtatgaatttacccctcagctctcctccggcgcggatcccgccccctga

SEQ ID NO: 138077 - DNA, 858 bp, Enterobacter cloacae
  misc_feature (412)..(421): n is a, c, g, or t
atgaacacttctgacaaccatgctttaggcgattttctccgcgcccgccgccagcgtctcgatccggcaacgtttggcttcccggcgggacgccggcgcaccccggggctgcgccgcgaagaggtcgcgcagctcgccagcatcagcccgacctggtatacctggcttgaacaggggcgcggtggggcgccttcccgcgaggtgctggagcggatcgcccgcggtctgcggctgaccaccccggagcgcgagcatctgtttattctcgcctttggccatccgccgcagacgcgtctgacggtgacggatgatatgacgccgcggctgcagcgggtgcttgacgctttcaccattccggcgattatccgcaccgccagctgggacgtcatcgcctggaacgcaccggcggccnnnnnnnnnncggccagggtgctgaccgactacagccaactgccgctggcggagcgcaacgtgctgcgccgcctgtttacccggccggaggcccgctgcactctggaggactggcagagggtggggcagcttatcgtcaacgccttccgcgccgacgtcacgcggatgggcgccacgaaagaaactgaccagttgatcgcggagctcagccagcagagcgtcgagttcgcccgtttttggcaaagccatgacgtcgccggtcatggagaaggctataagcgcattaaccacccgcagatgggtccgctcgacctggaatttacctcctttgccgtggagggccgtcccgatctttccctgctggtctttaatccggcaacgacggagagccagcggaaaattcacggtttacttcagggggcgggatccgcgccggaggagagctga

SEQ ID NO: 138078 - DNA, 906 bp, Enterobacter cloacae
atgcgtatatttcttaccggcgcgagcggatttatcggctcacgtattcttccggcgctgcaggcgtcgggccatcaggttatcggcctcgcgcgcagcgaaagcaccgcacaggccctgaaggcggccggcgccgaggtgcatcgcggcacgctggatgccccggagtcgctgctggctggcgtcgggaacgccgacgcggtgatccataccgccttcgaccacgacttcagccgctttgccgctaactgcgagaaagaccgccaggcgatcctggccctgggccaggcgctgcgaggcagcacgcggccgctggtgatcacctccggcacgctgatgggcgacgacgggagcggcgccccggcccgggagtcgttcttcaactcagcgcaccccagcccgcgcaccgcctcagagctcgccggccagcagttgctggaggcgggagtggatgtcagggtggtccgcttaccgcaggtgcatgacaccgtgcgtcagggactgctgacctgctacatcgaacgcgcggtcgccaacggggcggtagccctgcgcggcgagggaagcaaccgctggtcagccgcccatgtcgatgacgtcgcacgtctgtatgtcagcgcgctgcttcagggcgcggccggcgagcgctatcatgcggtggccgaagaggggatcgcgttacgcgatattgccgcggtaattgcccacggattaaacctgccgctgacccacctggatgagtcgcaggtcgacgcctggttcggctggtttgcgccgtttaccgcccttgacctgcgcgccagctcggcatggacccgcgagcgcttgcagtggcagccggttggccccgggctgctggaggacctgcagaacatggactatcataaagtgacactgtcacaataa

SEQ ID NO: 138079 - DNA, 1644 bp, Enterobacter cloacae
atgcgcctgaaattgtcatctctcctggcagccgtttccctgctgtgtgggccagcttttgccgcccctgcgctccccgaccgcgccgatatccgcgatagcggtttcgtctattgcgtcagcggccaggttaatacctttaacccgcagaaagtcagcagcggcctgattgtcgatacgctggccgctcagatctacgatcgtctgcttgacgtcgatccctatacctaccggctggtccccgagctggcggagagctgggaagttctcgataacggcgccacctaccgctttcacctgcgccgccacgtcccgtttcaacgcacggcgtggtttaccccgacgcgggactttaatgccgatgacgtcatttttacctttggccgtatttttaaccgcgaccatccgtggcacaacgtcaacggcagcagcttcccctacttcgacagtctgcagtttgctgacagcgtggagagcgtccgcaagctggataatcagaccgtggagtttcgcctcaagcgaccggacgcctcgttcctctggcatctggccacccactatgcgtcaattacctctgccgaatatgccgcccgcttaacgcaggacgaccgccaggagcaactggatcgccagccggttggcaccggcccgttccagctatccgattaccgctccggacaatatgttcgcctgcagcgccaccccggctactggcgcggcaaaccgttgatgccccaggtggtggtcgaccttggctccggcggcaccggccgcctgtcgaaactgctgaccggagaatgcgacgtgctggcctggccggccgccagccagttgacgatcctgcgtgacgacccgcgcctgcgcctgacgctgcgcccgggaatgaacatcgcctggctggccttcaacaccgccaagccgccgctggataaccctgaggtgcgccatgccctggcgctggcgatcaacaaccagcgcctgatgcagtctatctactatggcaccgcggagacggcggcgtccatgctgccgcgggcctcgtgggcctacgataatgacgctaaaattaccgaatataatccgcaggaggcccgcgcccgcctgaaagccctggggctggaaaacctgaccctcaagctgtgggtgcccaccagctcgcaggcgtggaatcccagcccgctgaaaacggcggagcttatccaggcggatatggcgcagattggcgttaaggtgattattgtgccggtagagggacgtttccaggaggcgcgcctgatggacatgagccacgacctgacgctctccggctgggcgacggacagtaacgatccggacagtttcttccgaccgctgctgagctgcgctgccatcgcctcgcaaaccaactttgcccactggtgtaaccgggagtttgacgacgtgctgcaaaaagcgctgctctcgcagcagctctcctcgcggatggacgcttacaaagaggcgcagcggatcctcgcccgcgaactgccggtcctgccgctggcctcgtcgctgcggctgcaggcctaccgctatgatatgaaaggcctggtgctcagccctttcggtaacgcttcgttcgctggcgtatcgcgggaaaataccgaagaggtgaagaagccatga

SEQ ID NO: 138080 - DNA, 945 bp, Enterobacter cloacae
atgattatttttaccctgcgccgtctgctgctgctgctgatcactctcttttttctgacctttgtcggtttcagcctgagctatttcacccctcatgccccactgcagggcgcttccctgtggaatgcgtggctgttctggtttgaaggggtgctgcactgggatttcggcgtctccagcattaacggccagctgatttctgagcagttgcgcgaggttttcccggcgaccatggagctgtgcatcctcgccttcggctttgccctgctgataggcattccggtggggatgatcgccggcgtaatgcgcaataaatggcccgataccctgatcagcgccgtcgcgctggtcggtttctcgatcccggtcttctggctggcgctgctcctgaccctcttcttttccctgaccctcggctggcttccggtctccggtcgcttcgatctgctgtatgaggtgaaaaacgtcaccggtttcgcgctgatcgacgcctggctttcggactcgccgtggcgccatgagatgatcgtcagcgccgcccggcatatggtgctgccggtattgaccctggcggtcgcccccaccactgaagtgatccgcctgatgcgcattagcaccagcgaggtgtatgacactaactatgtaaaagcggccgccacccgcggcgtgtcgcgacgcaaaattctactgcgccatgtgctgcacaacgccctgccgccggtgatcccgcgtctcggcctgcagttttccaccatgctcaccctggcgatgatcactgagatggtgttcagctggcctggactaggccgctggctgatcaacgctattcgccagcaggactacgcggcgatctccgccggagtgatggtgattggcgcgctggtgattattgtcggtgccatggctaacccactgaaacataaggaatggtatgccctacgatag

SEQ ID NO: 138081 - DNA, 891 bp, Enterobacter cloacae
atgccctacgatagcgtttatctggaaaagcgtccgcccggcgcgctgcgcaccgtatggcgtaagttctatggcgacaccacggcgatgatcggtctgtacggctgcgcgggcctgctgctgctctgcgtcttcggcggctggttcgccccctacggcatcgaccagcagttcctcggctaccagctgttgccgccgtcgtggtcgcgctatggcgaagtctccttctttctgggaaccgatgacctcggccgcgatgtgctgagccgactgctgagcggcgcggcgcccaccgtcggcggcgcttttgtcgtcaccctcggcgccacgctgtttggtctggtgctgggcgtgattgccggatcgacccacggcctgcgctcggcggtgatgaaccatatcctcgacaccctgctctccatcccctcgctgctgctggcgattatcgtcgtcgcctttgccgggccgcatctgagccatgcgatgttcgccgtctggctggcgctgctgccgcgcatggtgcgctccgtctacagcatggtccacgatgagctggagaaagagtacatcatcgccgcccgcctcgacggcgcctcgacgctgaatattctgctgttcgccatcctgcccaatatcgcctccggcctggtgaccgagatcactcgcgccctgtcgatggccattctggatattgccgcactgggctttcttgatctcggcgcccagctgccttcgccggaatggggagccatgctgggcgatgcgctggagcttatctatgtggcgccgtggaccgtgatgctccccggggcggcgattatgctcagcgtactgctggtcaacctgctgggcgacggtattcgccgggcgatcattgccggggtagaataa

SEQ ID NO: 138082 - DNA, 993 bp, Enterobacter cloacae
atgccgttactcgatattcgtcacttaaccattgaatttaaaaccagcgaaggctgggtaaaagccgtcgatcgcgtcagcctgacgctgaccgaaggcgaaatccgcggcctggtgggggaatccggctccgggaaaagccttattgccaaagctatctgcggcgtgaccaaagacaactggcgggtcacggccgaccgcatgcgcttcgatgacatcgacctgctgcgactgtcgaaccgcgagcgccggaagctgatcggccataacgtgtcgatgatttttcaggagccccagtcgtgcctcgatccctctgagcgcatcggccagcagctgattcagagtatccccggctggacctacaagggccgctggtggcaacggctgggctggcgcaagcgccgggccatcgagctgttgcaccgcgtcggcattaaagatcacaaagatgccatgcgcagcttcccctatcagctgaccgagggcgagtgccagaaggtgatgatcgccatcgccctggccaaccagccgcgtctgctgattgccgacgagccgaccaacgccatggagccgaccacccaggcgcagattattcgcctgctgacgcggctcaaccagaacaacaacaccaccatcttgctgatcagccatgacctgcaaatgctcagcaaatgggcggataaaatcaacgtcatgtactgcgggcagacggtggagagtgggcccagcgaagagctgatcaccctcccacatcacccctacacccaggcgttaatccgcgcgatcccggatttcggtagcgccatgccgcataaaagtcgcctcaacaccctgcctggagcgatcccgctactggagcagttgcctatcggctgtcggctggggccgcgctgcccgtacgcccagcgcgagtgtatcgaaacgccgcgtcttaccggggcgcgcaaccatctgtacgcctgtcatttcccgttgaacatggagaaagagtga

SEQ ID NO: 138083 - DNA, 810 bp, Enterobacter cloacae
atggtcgaaacattgctggaagttcgccaactcagtaagacctttcgctaccgcaccggctggtttcaccgtcagacggttgaggcggttaaaccgctgagttttaccctgcgcgaacggcagacgctggcgattatcggcgagaacggctccgggaaatcgaccctcgcgaagatgctggcgggcatggtggaacccaccagcggcgaactgctgattgacgatcatccgctgacttttggggattactcctaccgcagccagaagattcgcatgatctttcaggatccgtcgacctcgctgaacccgcgccagcgcatctcgcagatcctcgattttccgctgcgactgaataccgatctcgacgccgaagcgcggcagaagcagataatcgacaccctgcgcatggtcggtctgctgccggaccacgtcagctactacccccatatgctggcgcccggtcagaagcagcgtctcggcctcgccagggcgctgatcctgcgcccgaaggttatcgtctgcgatgaggcgctggcctcgctggatatgtcgatgcgctcccagcttatcaacctgatgctggagctgcaggagaaacagggcatctcctatatctatgtcactcagcacctgggaatgatgaaacacatcagcgatcaggtgctggtgatgcataacggcgaagtggtcgagcgcggcagcactgccgatgtgctggcctcgccgctgcacgacctgacccggcgcctgatcgccggccacttcggggaagccctcaccgccgacgcctggcgcaaagacgggaaatag

SEQ ID NO: 138084 - DNA, 1431 bp, Enterobacter cloacae
atgtcttcgttttcgtctacagacgggcagtcaaagagcaattatgctggaatgagtgaaaggcggtcgattgattacatcccggaaagcgaacggcatggacacccttttagccagttcaccctttggtttggcggcaatctgcaaattacggcgattgtcactggcgctttagccgttgtgctgggcggcgatgtagtgtggtctctggtcgggctgctggtcggtcagatgctgggggcggcggtgatgtctctgcatgcgctgcagggaccgcgactgggacttccgcaaatgatccttagccgcgcccagtttggggtttttggcgcggtggtgccgctggtgctggtttgcgtcatgtatatcggtttttctgccagcggcaccgtattggccgggcaggcaatggctaaactactgaatatcagccacgtagccgggatgctgatattcagtgcgattattatcgttatcgcggtcctcggttataaggtgatccacaagctgggcaaactggcgagtatcgtcggaattctcgccttcgtttatatgttcatcacgctgctactttcggccgatctcagtgcgctcgcgcacaataaccatttttcgctgccgacgtttttattagccgtatcgctctcctcatcgtggcagatcgctttttgcccctatgtatccgactattcgcgctacctgccacgcgatgtttccgccacgaaaacgtggtgctcagtgtttttcggcaccgtattgggtacccaaacgtcgatgacgctcggggttctgacagcggccattgccggcagcgcgttccctggtcacgaggtgagctatctggtgggattaggtaagagtcaggcgatggccttggttatctatttcgccatctgttttggtaaaattaccttcactaccctcaatgcgtacggcagctttatgtcgctgaccaccattgtttccgccttccgccggcaaaccgtgctgtcgcaaaagtgtcgcattgcattcgtggtgctgatggtgacggcttcctgcattatcgcgttgcttagcgaacccgctttcttaaagcatttcacgcattttcttctgtttctgctggcgttcttcgtgccgtggagcgccatctgtctgacggattattatcttatctcgaagggcgccatcgatattccggcgctaagcgacccgcagcaacgctacgggttctggaacctgtacgcgatcaccctgtatatcgtcggtgtgcttatccagttgccgttcattgagaacccgttgttccatggttcgctcacgtggatcttcgccggtaacgatgtctcatggataataggttggtttggcaccggggttctttactacgcgctgcgccgctttgaccgccggtcgctgccggcgcagagtcttttcccttctacctga

SEQ ID NO: 138085 - DNA, 714 bp, Enterobacter cloacae
gtgactgccgttgaagcgaaagaagacggtatttacgtttccatggaaggtaaaaaagcaccggcggaagcgcagcgttacgacgcagtgctggtcgctatcggccgcgtaccgaatggtaaaaacctcgatgcaggtaaagcgggcgtggaagttgacgatcgcggcttcatccgcgttgacaaacaaatgcgcaccaacgtgccgcacatctttgctatcggcgatatcgtcggccagccgatgctggcgcacaaaggtgtccatgaaggccacgttgccgcagaagttatctccggtctgaaacactacttcgatccgaaagtgatcccatccatcgcctacactgaaccagaagtggcatgggtcggtctgaccgagaaagaagcgaaagagaaaggcatcagctacgaaaccgccaccttcccgtgggctgcttccggccgtgctatcgcttctgactgcgcagatggtatgaccaaactgatcttcgacaaagagacccaccgtgttatcggcggcgcgattgtcggcaccaacggcggcgagctgctgggtgagatcggcctggctatcgagatgggctgtgacgctgaagacatcgccctgaccatccacgctcacccgactctgcacgagtccgttggcctggcggcggaagtgttcgaaggcagcatcaccgacctgccaaacgccaaagcgaagaaaaagtaa

SEQ ID NO: 138086 - DNA, 285 bp, Enterobacter cloacae
atgaaacgctttttaaccacagcgctggtcgctgcaacgttttttaccggtgtggcttacgccgctgacgccaacattccctgggcggacaacagcggcggtacggaaacgacccacattgcggcgatgggccaggatctgaatgcccagcatcagcaggtgacgaagaccaatgaaggggtatgggcggcgaattccggtagcatcagcgctgacgaagcggcattatccagtacaaaaccagcctttgccggcgatccttctctgatgcctcaccagggctaa

SEQ ID NO: 138087 - DNA, 807 bp, Enterobacter cloacae
atgagaaactcattatccgttgccctgtttacgttaatgctgtcgccgcttgccgccttcgcccaacagcagtttgccacgccggaacaggccgcaactgcgctggccgaagcgatcagccagcctaatgaagccgcgctgagcgaagtactcggcgataactggcagcagtttttacccacggacgggatcgaccctgccgccgtcgatcgctttcaacgcgactggcaggtgaaacatgtcatcatccagcagggtggcaaagcctggctcgatgtcggtagcgaggcatggcgtctgcccgtgcctatcgtaaaaacgactgagggatggcgctttgatatggccgctggcgaagaggagatcctcacccgcgccatcggccgcaatgagctgtcggcgatcgccgccatgcatgcctatgttgatgcccagcaggactattatcatctgaaccaccgctgggcgcagaaaatcatcagtagcgaaggcaaaaaagatggcttgtactggccaacttcgccgggcgaagcgccaagcccgctcggtccggcctttagcccgacggtgcccggtagcggctaccatggctatcgctttcgaattatcgccggtcgcgatgaccagagcgtcgccttgctggcctggccgatagcctggggtgaaaccggcgtgatgagctttatgatcgatcaacaggatagggtctatcaggccaatctcggtgaagagagcgccgcaaaggcacaggagataacgcgctttacccccgacgctgacgccggctggcaggtggcagaaccttaa

SEQ ID NO: 138088 - DNA, 1263 bp, Enterobacter cloacae
  misc_feature (1240)..(1249): n is a, c, g, or t
atgtcactgccgttcaaaccccatattatcgccctgctctgtagcgctggcttactcgcggcggcaggaacactctatgtgcaaagccgaaccccagcgacgatcgctgaaccgcctgcgcagcaagcgccagcgcccgcagcgtcgacgacacagccggtggccgccacttacacccaggcgcaaattgatcagtgggtcgcccctatcgcgctctacccggacagcctgctgtcgcaggtgttgatggcctccacttatcccgacaacgtcctgcaggcggtccagtggtcccaggataaccccgcgatgaaaggggatgcggccgtgcagacggttgccagccagccgtgggaccctagcgtcaaatctcttgtcgctttccctgccctgctggcgatgatgggcgagaatccgccctgggtggaaaatcttggcaatgcgtttttggcccagccgcatgatgtgatggattcagtgcagcgcctgcgcgccattgcccaacaaaccgggacgctgaaatccacaccgcagcagaaagtgattgtcacccctgccgcaccggtttcagccagcagcagcacggcagcaaccgcaaccgcccacacagcggcgcctgcgcccacgcaggtcattaaaatagagccgaccaatccacaggtggtctatgttcccagctataacccctccaccgtctatggtacctggccgaacagcgcctatccgccggtctatctgccgccccctcccggggagcagtttaccgatagcttcgtcaaaggcttcgggtacagcttcggcgtggccaccacctgggcgctgttcagcagtatcgactgggatgatgatgaccatcaccatcacgatgacgactaccaccacggcgattactcgcataatggcgataacatcaatattaatgtaaataatttcaatcacataacaggagaaaacctgccgggaaaccacgttaactggcagcacaatcctgcctatcgcggacacacaccgtatcccgataatacggtagctcagcgcttccatcagaccaacgtttccggcggactgagcgcgacccaacatgcgccagtcgatcgcgaagcgcagcgccaggcagcgatgacccagctgcagcataacgtaccgacggccacagcgggcaacctggcggcaaacaacgcctcacgcgacgctcagcgtcaggcggcctcggcgcagctgaagcaagccacccaacgcnnnnnnnnnnacccaacgcagtaa

SEQ ID NO: 138089 - DNA, 2598 bp, Enterobacter cloacae
gtgctagaagaataccgtaagcacgtagctgagcgtgccgccatggggattgttgccaaacccttagatgcaacccaaatggccgcgctggtagaactgctgaaaaacccgcctgcgggcgaagaagaattcctgttagacctgctgattaaccgtgtaccgccgggcgtcgacgaagccgcctatgttaaagctggattccttgccgcgatcgccaaaggcgaagcgacctcccccctggttacccctgaaaaagccgttgaactgctgggcaccatgcagggcggttacaatatccatccgctgatcgatgcgctggacgacgcgaaactggcgccgattgccgcgaaagcgctctcccataccctgctgatgttcgataacttctacgacgtggaagagaaagccaaagcgggtaacgagcatgctaaacaggttatgcaatcctgggctgacgccgaatggttcctgaaccgtccgcagctggcagagaaaatcactgttaccgtcttcaaggtcaccggcgaaacgaacaccgatgatctctctccggcgccggatgcgtggtcgcgcccagacatcccgctgcatgcgctggcaatgctcaaaaacccccgcgaaggcattgagccggatcagccgggcgtggttggcccaatcaaacagatcgaagccctgcagcagaaaggctacccgctggcctacgtcggcgacgtggtcgggaccggttcttcacgtaaatccgccaccaactcggtgctgtggtttatgggcgacgatatcccgaacgtgccgaacaagcgcggcggcggcctgtgtctgggcggtaaaatcgcgccaattttcttcaacaccatggaagatgcgggcgcgctgcctatcgaagttgatgtgtctaacctgaacatgggcgacgtaatcgacgtttacccgttcaaaggcgaagtgcgtaaccacgagaccaacgaactgctggccagcttcgagctgaaaaccgatgtgctgatcgacgaagtgcgcgccggcggccgtattccgctgatcatcggtcgcggtctgaccaccaaagcgcgtgaagcgctgggcctgccgcacagcgatgtcttccgtcaggcgaaagacgtggcggaaagcacccgcggcttctcgctggcgcagaaaatggttggccgcgcctgcggcgttgccggtatccgtccgggcgcttattgcgaaccgaaaatgacctccgtcggttctcaggacaccaccggtccaatgacccgtgatgagctgaaagacctggcgtgcctgggcttctctgcagacctggtgatgcagtccttctgccacaccgcggcctacccgaagccggttgacgttaccacgcaccacactctgccggacttcatcatgaaccgcggcggtgtttctctgcgtccgggcgatggcgtgattcactcctggctgaaccgcatgctgctgccggataccgtgggtaccggcggtgactcccacacccgtttcccaatcggcatctccttcccggcgggctctggtctggtggccttcgccgccgcgaccggcgtgatgccgctggatatgccggaatcggtgctggtgcgtttcaaaggtaaaatgcagccggggatcaccctgcgtgacctggtccacgccatcccgctgtacgccatcaagcagggcctgctgaccgtggagaagaaaggtaagaaaaacatcttctctggtcgcatcctcgagatcgaaggtctgccggatctgaaagtcgagcaggcgttcgagttgaccgatgcctcggcggagcgttctgccgccggctgcaccatcaagctgaataaagagccgatcgttgagtatctgaactccaacatcgttctgctgaagtggatgatcgccgaaggctacggcgaccgccgtaccctggagcgtcgtatccagggcatggaaaaatggctggcggatccgcagctgctggaagccgatgctgacgcggaatacgcggcagtgatcgacatcgatctggcggatattaaagagccgattctgtgcgcgccgaacgatccggacgatgcccgcctgctgtctgatgtgcagggcgagaagatcgacgaagtgttcatcggctcctgcatgaccaacatcggccacttccgtgccgccggtaagctgctggatagccacaaaggccaactgccgactcgcctgtgggtggcgccgccaacccgtatggatgccgcgcagctgaccgaagaaggctactatagcgtgtttggtaagagcggggcgcgtatcgaaatccctggctgttccctgtgtatgggtaaccaggcgcgcgtggccgacggcgcgacggtggtttccacctctacccgtaacttcccgaaccgtttaggtaccggcgctaacgtctatctggcctctgccgaactggcagcggtggcttcgctgctcggcaaactgccgacgccggaagagtaccagaccttcgtggcgcaggtggataagacggcggaagatacctaccgttatctgaacttcaaccagctggatcagtacactgaaaaagctgacggcgtgatcttccagaccgcggtgtaa

SEQ ID NO: 138090 - DNA, 363 bp, Enterobacter cloacae
atggattacgaatttctgcgcgatattaccggagtggtaaaggtgcgaatgtcgatggatcacgaggcgatcggccactggttcaacgaggaggtgaaaggcaatcttgctctgctggacgaagtggagcaggctgcgcgcaccgtgaagggcagcgagcgttcctggcagcgtgccgggcatgaatatacgctgtggctggatggcgaagaggtgatgatccgcgccaatcagctggagttttccggcgacgaaatcgaggaggggatgagctactacgacgaagaaagtctctctctgtgcggtgttgaggatttcctgcaggtggtcgccgcctatcgtgagtttatgcagcagcgttaa

SEQ ID NO: 138091 - DNA, 795 bp, Enterobacter cloacae
ttgaaaaaattgaagctgcacggctttaacaacctgaccaaaagcctgagtttttgtatctacgatatctgttacgccaaaacggcagaagagcgcgacggctacatcgcctatatcgacgaactctataatgccaatcgcctgacggagatcctgacagaaacctgttctattattggcgccaatatcctgaatatcgcccgtcaggattatgaaccccagggcgccagcgtgaccattctggtcagcgaagagcctgtcgatcccaagctgattgaccagaccgaacatcctggcccgctaccggaaaccgtggtcgcccatctcgataagagccatatctgcgtgcatacctacccggagagccatccggagggcggcctgtgcaccttccgcgccgatatcgaagtttcaacgtgcggcgtcatttccccgcttaaagcgctgaactatctgattcaccagctggaatcggacattgtgaccattgactaccgtgtgcgcggctttacccgcgatatcaatgggatgaagcattttatcgatcatgaaatcaattcgattcagaactttatgtccgacgatatgaagtcgttgtatgacatggtcgacgtcaacgtttatcaggaaaatatcttccataccaaaatgttgctcaaggagttcgaccttaagcactacatgttccatacccgaccggaagagttgactgccgaagagcgcaaggtcattaccgacctgctatggaaagagatgcgcgagatttactacggccgcaatattcctgccgtgtaa

SEQ ID NO: 138092 - DNA, 861 bp, Enterobacter cloacae
gtggccgataatccactgtggcatgaaacgctgcatgaccattttggtcagtattttagcgttgataacgtgctgtaccacgaaaaaaccgatcatcaggatctgatcatctttgataaccgcgcctttggccgggtgatggcgctggatggcgtcgtacaaaccaccgaacgcgacgagttcatctatcacgaaatgatgacccatgtgccgctgctggctcacggcaacgcgaagcatgtgttaatcattggcggcggcgatggcgcgatgctgcgcgaagtctctcgtcaccgtagcatcgaaaccatcaccatggtggaaatcgacgccggggtagtttcattctgccgccagtacctgccgaaccataacgccggcgcctatgacgatccgcgctttacgctggtgattgatgatggcgtcaattttgttaatcagacgacgcaaacgtttgacgtgatcatttcggactgtaccgaccctatcggcccgggagaaagcctgttcacctcggctttttatgaaggctgcaaacgctgcctgaacccgggtgggatctttgttgcccagaatggcgtctgcttcctgcaacaggatgaagcggtaggcagccatcgcaagctaagccactattttcgcgacgtcagcttctaccaggcggcaattccaacctattacggcgggatcatgacctttgcctgggcgagcgacaatgaggcgctgcgccatctctccagcgaaatcattcaggcgcgctttcacaaagccaacctgacctgccgttactacaatccggcaatccatacggcggccttcgccttaccacaatatctgcatgatgctctgtccgcaccgtga

SEQ ID NO: 138093 - DNA, 1692 bp, Enterobacter cloacae
atgaacagagccgccacgctgaccctcaacgcgcccctgctgatgctcgtcgctgcgctggcgctttcaacccccttcaccgccggcgccgcgccggcctttcttgattacgcccaacagcaaacccagcaatctcaggcgcaagaaaaaaacgatgccgcaagcgcaaaacaaacacaagaaagccgccagagcgcagataataaaaaaaccggtaccagcacctcacaattacaaaaaagaatcaccagccagcaggcggcgattgcacaaaaagataagcttatacagcaattaaaaaaacagcttgccgctacgccgcaaacggatactgccggagcgaatgagcaagcggcgttgaataagagaattaatgaattacaggtcgccttaagcgccgctactgcagaaaaagaggcattaataaaaaaagcaggcgttgtgcagaataataatctacagcaaagccaggccgcggcgcgtcagcagatccagcaattaacgacgcagattcagcaagccgaagctgaaaataaacgcctcagcgccagctttaccacgcttaataaagataaacacgcgctaatgacccgactggccgctgcggaaaaagagaaacaggccgctcttgaccaggtcaaagcgcttaacgctgacaaacagccgctgacgacccggctggccgccgcggaaaaagagaaacaggccgtcctcgagcaggttaaggcccttaacgccgataaacagtcgctgactattcgcctcgccgctgcggaaaagacgcagcaggctgccctcgatcaggtcaaagcccttaacgccgataaacaatctctgtccacccggctggccgccgcggataaagtgccgcatggccccgctaacgacgccgctgcgccaaaaaatgagccaccagagatggcggccatagtggcagcctatcgcctgcaggcggataaagacaacgcccagctacggatgaaagaagatgaaatcgaactgctgagaacgcagctttctgtacagtccaaaacgcgcagcggcgagagcgccgctgccaaactcagcgcatcgggagaacagcaggcttatgcgatcggcgcctcgatgggaagcgaggcgctcaacgtccttaccacccgtcgcactcagggagttaccgtcgacgcaggcctggtgctgcagggcatcgaagatgcctttcgcggccagcttcgtctcggagagcaggaacgtaacaaggcgctgtttgatgtgtcgcagcaggtttttcagaacctgaataaaatagagcagaaaaacatcagtgccggcaagaaatatcagcaggcgtttgcgcgcaaaaaagatgtggtctttaaagagggcgtctacagccgcgtcgattacccgggtaaaggaaaaataagcggtaacgacctggttaccgtggtgatcaaagagatgctgacggacgggacggtgatcaacgatatggaagcgaaagatcaggcgcttacgcaaaagctggatgcctatcccccggtgtttcgcgaaccgctgaagcgtctacagaaccacggctccgtgacgctcgtcgtcccgcctgaaaaggcctatggcagtaaaggattaccgccaaaaattccgccaggcgccaccatggtttattccgtgcggatagtagatagccaacccgagccggcaaaatag

SEQ ID NO: 138094 - DNA, 411 bp, Enterobacter cloacae
gtgaatatctcgctgactcttcgtgttatcccactcgccgcgctgttagtagccggctgtagcaatacctcttcccgccagccggttaaaccgatcgccacgccgctgacgtcacagcagcaggcagagcaggagcgggcggccagcgaacaagcgcgcattgaatcctgtcgccaggcgctggattcgctaaaagaggttaacccacagcaagccactaaactcagcaatgactttaacgctttagtgcgcgcggcgtcacaatacaatagcgtgcgcgagaaagtggcggatcctacccggcttggcattgactccatgtatcagtttaaatccatcaaactgtgcgccgatatccagaaaacgctgatcgatagcctggtacagcgtggtgaaagcaaacagccatga

SEQ ID NO: 138095 - DNA, 741 bp, Enterobacter cloacae
gtgattaagtcattctttgctgcactctcgtttatcagccgcctgccggtcccggcgcggttatctcagggcctggagatagaacagtaccagcgcagtatcgtcacctttccgctggtcggtttactgctcggcgccatcgccggcgcggtggcgctcctcctgcagccgtggtgcggcgtcccgctggcggcgctgttcggcgtgctggcgctggcgctgctcaccggcggattccaccttgacgggctggctgatacctgcgacggcattttctccgcccgcacccgcgatcggatgctggagatcatgcgcgacagccggctgggcacccacggcgggctggcgctgatcttcgtgctggtggcgaaagtgctggtggttggcgagctgctgctgcgtgatatccaccccatcgcagccctggcggcggcctgcgccgtcggtcgcgggatggcggtgctgctgatgtatcgtcatcgctatgcgcgggaaaaggggctgggcaatctgtttatcggcaaaattagcctgcagcagacgctggtgacgatggcgatggcgatcgcgctggccaccgccctgctggggctacaggggctgcgcgccgcgctgatcaccctggtgctgatctggggtctgggatgggcgctgaagcgaaccctcggcgggcagaccggggataccctcggggcggcgattgagctgggcgaattactctttttactggcgctgctgtaa

SEQ ID NO: 138096 - DNA, 324 bp, Enterobacter cloacae
atggaaacaactaagccttctttccaggacgtactggagtttgttcgtctgtaccgtcgtaagaacaaactgcagcgtgaaattcaggacgttgagaaaaagatccgtgataaccagaagcgcgttctgctgctggacaacctcagcgactacatcaagccgggcatgagcgtggaagccatccagggcatcatcgccagcatgaagagcgattacgaagatcgcgttgatgattacatcatcaaaaatgccgagctgtccaaagagcgccgcgacatctcgaaaaaactgaaagtgatgggcgaagccaaagtcgaaggctaa

SEQ ID NO: 138097 - DNA, 990 bp, Enterobacter cloacae
gtgcgcgctgataaatcactcaagccatttgagatccgcttgtatcgccattatcgggtggtgcatggtgtgcggattgcgctggcctttgtgctcacctttttgctggtgcggctgctgaacgtgcctgagggaacctggcctctcatcactctggtggtggtgatggggccgatctccttctggggtaacgtcgtgccgcgggcgtttcagcgtatcggcggcacgatcctcggttcggcgctgggtctggtggcgctgaagcttgagctcatctctctgccgctgatggtcctctggtgcgcggcagcgatgttcctctgcggctggctggcgctgggcaagaaaccctatcaggcgctgctgatcggcattactctgtcggtggtggtcggggcgccgcccggcgatatgcataccgcgctgtggcgaagcggcgacgtgatcttcggctcgctgctggcgatgctgtttaccggcatctggccgcagcgggcgttcatccactggcgcatccagatggccagctatgtcaccaactttaaccgcctctaccaggccggcttctcgcgcgggctgatcccccccgccagcaaagagacgcacatccagaaggcgatcttcgaggctatccagaccgtcagccgcaacctcgtctgcatgctggagctgcagatcaacgcctggtgggcaacgcgtccgggtcacttcgtgatgctcaatgcgcacaccctgcgggagacgcagcagatgacccagcagacgctgttgtccatcgcccacgcgctgtacgaagggaaccctcagcctgtgcgcgccaacaatgaaaagctgactgagatcgtcctcgaactgcgccagctgctgaaagagcagggtgatgacggcctggcggaaaccccggtccatggctatgtttggctctcaatcgaactggcgcgccagctggagctgctctcgcatctgatctgccgcgcgttgcgcaaataa

SEQ ID NO: 138098 - DNA, 474 bp, Enterobacter cloacae
atgaactacagcatcaccaccctcggcaagaaaaccatcgccggtttccatctggtcgggccctgggatcacacggtcaagcaggggtttgagcaactgatgatgtgggttgagaaccaccaggtgcccgcccgcgaatgggtggccgtctactacgataacccggaggaagtgccggcggaaaaactgcgctgcgcgacagcggtcgccgtggatgaggattatgtcattcccgccaacagcgaaggggtgatcctggcggcgattgccggcggggattacgcctgcgcccgcgcgcgggtggtggattacgacttcgccaccccgtggatgcagtttttcgacagcctgcagcagagcacggcgtatcgcatcgccccccagccctgctttgaggtctatcttaacgacggcaaccacgacggctactgggatatcgacatgtatgttcccgttgagcgcgtcgcgtcatag

SEQ ID NO: 138099 - DNA, 1164 bp, Enterobacter cloacae
ttgaaaggccgtttgtttattgctgtatctttgctcgcttcgagcgtttcctgcgcatttgccgtcgacttacctgctacggtcgcgccgccttccattcaggctggctcctgggtgctgatggattacaccaccggtcaggtcctgaccgcgggtaacgaacatcagcagcgtaatcctgccagtctgaccaaactgatgaccggctacgtggtcgatcgcgccatcgacagccatcgtatcacctttgacgatatcgtcaccgtgggtaaagacgcctgggcgaagggcaacccggtgttcgacggatcatcgctgatgttcttaaagccaggggatcgcgtcagcgtccgcgacctcagccgtgggctgattgtcgactccggtaacgacgcctgcgtcgcgctggccgactatgtcgccggcggccagccgcagtttgtcgccctgatgaatcagtatgtcgaaaaactgcacctgcgggacacccatttcgaaaccgtccacggcctcgacgccccgggccagcacagttcggcctatgacctcgcggtgctctcgcgggcgattattcatggcgaaccagacgtctaccacatgtacagccagaaaagcctgacgtggaacgggatcacccagcaaaaccgtaacggtctgctgtgggataaaaccatgaacgtcgatggcctgaaaaccggccacacctcgggggccgggttcaacctgatcgcctcggcggtggatggccagcgccggctgatcgccgtggtgatgggggcggacagtccgaaaggccgcgagcagcaggccgctaaactgctgcactgggggcagcagaacttcgacaccgtgcaggtgctgcagaaggggcagaaggtcggcaccgagcgtatctggtacggcgataaagagcagattaagctcggcaccgatcaggatttctggttagccctgccgaaggcggaagtgtcgcgcattaaagcgaaatatgtgctggataagaaggaccttgaggcgccgatcgccgccaatcagcgggttggcgagatttcactgtatgacggcgacaaggtggtggggcactatccgctggtcaccctcgaaagcatcaataaaggcggagtgttctcgcgaatgagcgattacctgcatcacgagctgtaa

SEQ ID NO: 138100 - DNA, 1425 bp, Enterobacter cloacae
atgcaagatagcgtcaaccagcccggatttttattccacgattatgaaaccttcggcaccagcccttccctcgaccggccggcgcagttcgccgccatccgcaccgacgcggagctgaatgtgctcggcgagcccgaagtgttttactgcaaacccgctgacgattacctgccgcagccgcaggcggtgatgatcaccgggatcacgccgcaggaagcgctggccaaaggggataatgaggccgcgtttgcccgtcgcatccacgatctgttcacggtgccgcaaacctgtatcgtcggctataacaacgtgcgctttgatgacgaagtgacgcggaatatcttctatcgcaacttctatgacccttatgcctggagctggcagcacgataactcgcgctgggatctgctcgacgtgatgcgcgcctgctatgccctgcgcccggaagggatcgcctggccagagaatgacgaagggttgccgagcttccggcttgagcatctgaccgtcgccaacggtattgaacaccagaacgcccatgacgcgatggccgacgtatacgccaccatcgccatggcgaaactggtgaaaacccggcagccgcggctgtttgattatctctacagccaccgcaataagcgcaagctggcgactcttatcgacgtgccgcagatgaagcccctggtgcatgtctccggcatgtttggcgccgcgcgcggcaacaccagcctggtggcgcccctggcctggcatccggaaaaccgcaatgcggtgattatggtcgatctggcgggcgatatggcgccgctgctggaactggatgccgatgccctgcgcgagcggctttacaccccgcgcgccgagcttggcgatctgccggcggcgccgatcaagctggtgcatttaaataaatgtccggtactggcccaggcaaataccctgcgcccgcaggatgccgaccggctggggatctccattcagcgctgtctggagaacgcccagctgctgcgggcgaatccgcaggtgcgcgagaaggtagtggcggtctatgccgaagccgaacccttcgtgccgtccgaaaacgtcgacgcccagctgtacaatgggttctttagcgatgccgaccgcgcggcgatgaaaatcgtgctggaaaccgaaccgcgcaatctgccggcgctggatatcaccttcgccgaccagcgtatcgaacgcctgctgtttaactaccgggcgcgcaacttccccggcacgctcgatgaacatgagcagcagcgctggttagagcatcgtcgtcaggtgtttacgccagagtttttgcaagcctatgccgatgagctgcagatgctgtatcaacagtatgcggatgataaagagaagctggcgcagctgaaggcgctgtggcagtacgcacaggatattgtctga

SEQ ID NO: 138101 - DNA, 2103 bp, Enterobacter cloacae
atgccccgacccatccctctcgaacgttatcgcaacattggtatctccgcgcatatcgatgccggtaaaaccaccaccaccgagcgcatcctgttttataccgggatgagccataagctgggtgaagtacacgatggcgcggcaaccaccgactggatggcccaggagcaagagcgcgggatcaccattacctcggcggcggtaagctgcttctggccggggatggaccgcagcttcgagccgcaccggatcaatatcatcgacaccccggggcacgtggatttcaccattgaggtggagcgttccatgcgcgtgctcgacggcgcggtgatggtgtatgactccgtcggcggggtgcagccccagtcggaaaccgtctggcgccaggcgaataaataccacgttccgcggctggccttcgtcaacaagatggaccgcccgggggcggacttcttccgcgtggtgcagatgatgatcgaccgcctgaaggctaacccggtgccgattgtgatccccattggcgctgaagagcatttcaccggcgtcgtcgacctggtgaaaatgcgcgccatcctgtgggatgacgccacccagggcatgacctttagctatgggccagtccctgacgatctgttggcgacggcgcagcagtggcgggagaaaatggtctcggcggcggcggaagccagcgatgagctgatggataaatacctggaaaccggtgagctggacgaggcggagatcgtcgccggtctgcgccagcgcacggtgaagggagagatccaggcggtgctctgcgggagcgcctttaaaaacaaaggcgtgcagcgcatgctcgatgcggtggtggagctgatgccgtcgccgctggatattccggcgatacagggcgttgatgagcaaggccagccggcggaacgccatccgagcgacgatgagccgctgtcggcgctggcgttcaaactgatgaccgacccctacgtcggccagttgacctttatccgcgtctactccgggacgctgaagaaaggcgatgcggtgtggaacccggtgaagggcaagaaagagcgcatcgggcgtatcgtgctgatgcaggccaacgaccgtcacgaagttgacgaactgcacgccggggatatcgcggcctgcgtcggtctgaaggatgtgaccaccggcgatacgttatgcgatccggatgcggtgattaccctcgaacggatggagtttccggagccggtgatttcgctggcgattgagccgaagaccaaagcggaccaggagaaaatgggcatcgcgctgcagcggctggcggcggaagatccgtcgttccgtctgcataccgatgaagagtccggccagacgattatctccggcatgggtgagctgcatctggagatcattgtcgaccggatgaagcgcgagtttggcgtcgaggccaacattggccgtccgcaggtcacctaccgcgaaaccctgcgcaagaaagtgacggacgtggaaggcaaatttgtgcgccagtccggcggcaaagggcagtatggccacgtcgtactgaccctggagccgctggagccgggcagcggtttcgtcttcgaggacgccaccaaaggcggggtagtgccgcgcgagtacatcccttccgtggagaaagggctgcgcgaagcgatgggcaccggcgtgctggcgggttatccggtggttgacgtgaaagcgaccctgaccttcgggtcgtaccacgacgtggactcctcggagatggcgttccgcatggcggcgatctttggcttccgggaaggcgcgcgcaaagcggatccggtgatccttgagccggtgatgcacgtcgaggtggagacgccggaagagtacgccgggaatattatgggcgatctctcttcccgtcgcgggatggtgcaggggatggaagagcgcttcggcagccagatcatccgcgccgacgtgccgctggcggagatgtttggttattccaccacgctgcgctcgatgtcgcagggacgggcaacctacagcatggagttccaccattacgcggaagcgccgcgtaatgtggcggatgaaatcatcgccagccgcgcgaaaagctaa

SEQ ID NO: 138102 - DNA, 312 bp, Enterobacter cloacae
atgatcgccaatcaccccgaacgagaacaaattcgcctggaaaatgtcctttccgcgctcggaaacccgctgcgactggagatcattcgtacgctggccgacggcagcgagctgagctgcaacgccctgcgccaggaggaggtggccaagtccaccatgacccaccactggcgcgtcctgcgcgacagcggtgtgatctggcagcggcctcagggacgggagaacatgatttcgctgcgccgggaagatctggacgcccgttttcccggcctgctggatacgctgctgaaagttatggtgcaggcaggataa

SEQ ID NO: 138103 - DNA, 1359 bp, Enterobacter cloacae
atgtcgcataacgctactccaaatacctctcgcgtggaattacgtaaaacgcttacgttagttccggttgtaatgatgggcctggcctatatgcagccgatgacgctgttcgatacgtttggtatcgtctctggtatgaccgacggtcacgtgccgacggcctacgcctttgcgttaatcgccattctgtttactgccctgagctatggcaagctggtacgtcgttacccgtccgccggctcggcgtatacctatgcgcagaaatccatcagcccgaccgttggctttatggtgggttggtcctcgctgctcgactacctgttcgcgccgatgatcaacattctgctggcgaaaatctattttgaagcgctggtgccttcgattccgtcgtgggtgtttgttatcgcgctggtcgcctttatgaccgcctttaacctgcgcagtattaaatccgtggccaacttcaacaccgtgatcgtggtgctgcaggtggtgctgattgccgttattctcggcatggtgatttatggcgtgtttgaaggcgagggcgccggtacgctggccagcagccgtccgttctggtccggtgacgcgcacgtgatcccgatgattaccggggcgacgatcctgtgcttctcgtttaccggtttcgacggcatcagcaacctgtctgaagagaccaaagatgcagagcgcgtcatcccgcgcgcgatcttcctgaccgcgctgatcggcggcctgatcttcatctttgccacctacttcctgcagctgtacttcccggatatctcgcgctttaaagatccggatgcgtcacagccggaaattatgctctacgtggcaggtaaagccttccaggttggcgcgctgatcttctccaccatcaccgtactggcgtccggtatggcggcgcacgctggcgtggcgcgtctgatgtacgtgatgggccgcgacggcgtgttcccgaaaagcttcttcggctacgtgcacccgacctggcgcactccggcgatgaacatcatcctggtcggcgcgattgcgctgctggcgattaacttcgacctggtgatggcgacggcgctgattaactttggtgcgctggtggcgtttaccttcgttaacctgtcggtgatttcccagttctggatccgtgagaagcgcaacaagacgctgaaagaccacttccagtatctgttcctgccgatgtgcggcgccctgaccgttggcgcgctgtgggtcaacctggaagagagctcgatgattctgggcctgatctgggccggtatcggtctggtctacctggcctgcgtgaccaaaagcttccgcaacccggtgccgcagtacgaagatgtggcctaa

SEQ ID NO: 138104 - DNA, 702 bp, Enterobacter cloacae
atgatcctgcttatcatcttatttactcccctcctctccagcagtaatacttggttacagaagcagtgtataaggaaatacattatgattattatcatttccgccaataaattttttattaacggcatccggtctctggttaacatgaccatgagtgctcaacgtcggtatagtcaaacattgtttctggataatatttctgacgtgaatgataaaagtctaaccatagccagaaccattatcgtggactatagccacccggacattcaacaattagccgcactgctctatcgtaaaaaaaagatcattcatggcgatatcgtttttgtcgttaaaagtgagattcttgccgatccagtcgaaaacattatcataaactctatttcgacgatcgtgcttgattatatagatgttacccaacggctgcagaaatacttacagaatgcgtctgatcatcgctgtattaaagtgttcagaaaatcaattagctcgctggacagttgtgtcaatattaaacttacgaaacaggaggactctcttctcccctatatcatctcaggtttaaataataagaaaattgctcaggccaccgaccttagtaatatgatgatcagtcactatcggagaaacatctaccagaaactcaatgtccgcaatattgcaggcctgtatcatttcctgcactccctggaggggggataa

SEQ ID NO: 138105 - DNA, 549 bp, Enterobacter cloacae
atgaaaatgaaatcactttgcctggcaatggcactcgtcggcttgacctcacactatgcctccgcggcggacggtacgctgtatttttcaggtacaattgtcaactcaacttgcaaactggcaagcggcaataatgacggtctcattgaagttaagatgggcgctgttccgctgtctaaattaaaaaatgataccaatggcaccgggccagaagttggggtcaatattagcgtcaaagattgtgacgagggcacgtactatattgtgctcgacggtgcatcagccaccgaggcgcctatcactaacgtactggctctcgatgcaggtaatcttacagctaaaaaagtcggcattaagctaaccgaccgcaataataccccggtcacgctcgataaacctttcgatcccaacgccgacccgagtattacggtcaatgccgatggcaccggtaccttcaacctgaaagcctactactatacctgggataaagacaacgccgaagctggcgacggcaatgcgaccgccaggtttaccattatgcaggaataa

SEQ ID NO: 138106 - DNA, 669 bp, Enterobacter cloacae
atgaaaacgctgctggcagtgatcataggcgctttggcttttcagacccaggcggccattaccatcgatgcctcacgggttatttattcgggcaaagataaatcggccagtctgaaaattaacaaccgaagcggcaaaaactatatcgtccagacctggcttgatacaggtccggagacccccagcagcggcttacccattgtggcaacgccgcccctggtcaaattacgccccgagcaatcggcacaactgcgctttatttactcaggaaccggtcttcctgccgacagggaaagtctgttttgggtgaatattcaggaggtccctcctgcgcctgaggaaaataatatcctgcagttcgcgattcgcacccgattaaaactattttatcgcccgcaagggattgccacatcgctgcccaaagccgttgaaaatctgcagtggcagcaaagcgctaacacgttatcttttactaacaacagtccactgcatattacggttattaatgccgaggcgatcgacaacaaaggcaaaatctatcctctgaaaaactttatgttgctgccgtacagtcatcacgctgtcaatatcgccagcatgcagcgcttgcataaaatgaaatatattaatgattacggcgccgttgttgatattccaataaaaaaataa

SEQ ID NO: 138107 - DNA, 2538 bp, Enterobacter cloacae
atggacgatagtaaattacgctattttgccagcgcatggttaatctccatcacgttaccggcagacagcgcggaacgctataatgcccagtttgtgaacggcatcgacccgctggcttttaatcagtttgtcgccagcgatggcgacgtcatgccgggcacctatgacgttaatatttacattaacgatctgctggtggatagccgccccgttcgcttctcagaggatagcgcacacggcgggttggccccctgcctgagcgcggcggaatatatccgctatggcgtcaagattgacgatgaccaccagccctgtttcgcgctgtcgcagacgatccgccaggcagagcaacagctggatatcgctaatcatcggctgatcatacatatccctcagcaatatattgagcactatcctcgcgactatgtttcccccatgcgctttgatgaaggtattaacgctgctttcgtcaactacagctattctaccgatgccaataatggcgacgggggcagccaccagtaccaatatctttcgctaaacagcgggatcaatattgcatcgtggcgattgcgcaataatgcctactggaataagttcagcggccaggcggataagtggcaaagcatcgccagttgggcggaaacgaacatcattccctggcgcagccggcttgtcgtcggccagaccagtaccgacaacagcgtcttcgatagcgtccagtttcgcggcgtacagcttggcaccgatgtcgaaatgcgccccagcagccagaccggcttcgcgccggtcattcgcggtgtggccaacagcaatgcccgggtggaagttcggcagaacaactatctgatttacagcgagaacgtcccagccggtccctttgagctaaatgatatcagcgccgttaaccgcagcggtgatttctacgtgaccgtcattgaagccgacggtagccagacgacctttactgtcgcctacaccaccctgccacagctggtgcgggcaggccaatggaattatcagctgtcggcgggtaagtatcatgacggtgctgacggctatgcccccgccctgatgcaaagctcgctctcttatggcctgaataataccttcacactatacggtggcgcccttgcagcggagaactatcgcgccggcgcctttggcgtcggtagcaatctgggggagattggcgccctctcagccgactatacgctggcgggaacgacgctggcgaatggccagcgcaagcagggagggagcgtgcgttttctgtatgctaaatcctttttatcaagcaagaccgactttcaaatcgcgggctaccgttactcaacggcaggttattatagcctcagcgatgcggttaacgagcgtcgacgctggcacaatggcctgtacgaaaatgattactggccctctgacgaagacgaaagctggcaggcaagcgctccccaacactattacacgtcctggttttataataaaaagcatcgctttgatatttctgcccggcaaactctcggtaagaacagcgctttcttccttaacttcagccagcaaaattactggaatagctcaggaagcgatatctcgctgcaggcgggctttaacagcactatccataacgtgaactatggtctgtactatcagaatacgcgcagccacttcacccatgacgacaatagcatcacactgcgcgtttccatcccttttactctgcaagaaaaccgccggatcaataccgcatttaccctcgcccacagtaaatcgtctggcacgtccgggcaggctggggtaaacggcacgctgctcgatgatggtcgcctgagctgggccgtcaccagcgcctatgatgacaccagccatagcaccaacagcgccagcctgggttatctcggccagtacggtaatctgtataccggttacgcctacagcaaaagccatcgtcaggcgagtctgaatctgagcggcggcgtggtggcgcaccgcggcggcgttaccctctcgcaaccgctgggctcaacctttgcgctagtggaggccaaagacgctcagggggtagggatagagaatcagaccggcgtgcgcatcgatcccttcggctacgctgtcgtaccacaaagcgttccctatcgggtcaattctgtcgcgctcaaccctcaggacttcgatacctttcttgatgtccctaacgcggtagcggataccgtgcctacccgcggggcaatcacccgggtgcgctttgatacgttccggggatatagcgtgctgatccataccaccctcgccgacggcagctatccaccattgggcgcacagctctatcgcgccagtgggatcagcaatggtctggtcggcccgggaggagaagtttacgtcagcggagtcgattcaggcgaaaagctgcagatgaaatggggcgaaacgcaccagcaaagctgcgaaatcaccctgcccgaactgcgccaggagcctcagcaggcgacggcctggcgtgaattatccttaatctgcacagtaaccccctcgaggtaa

SEQ ID NO: 138108 - DNA, 1029 bp, Enterobacter cloacae
atgcgccgacttagcgatacgttatttctgacatggctttccgttctgttcatgctgagcgccttcccggcgcaggcgctgacctgcaagaccacctcgtccacgatcagcgaagtcgtgaatatcgagagcatcattaaagtctccagcagcgagcttattgccaataaaaagatatgggtctccagccctattaccgccaccttcagttgcgaagataccgataattttccgaacggtgaaagcgcctatttctggctggatccggaaaataaagccagcagcttgcccgactttatccaggtaggcattacttacaacggcatcgactatctgctacaaaataaaaaatcggtggagattggcccggcgacgctgtgtgataaaagcgggaatacctgtaagtccccggccattgggcagacattcagcctggtttaccaggtctatatcatctcgacgggccgcagagtgaccggggaaggtaaaatagacgataacctaaaattgtcgctttttcaggtagatggccaaggcggtctacgcaacggcaccgctggcgccaattataatcttttcattaccggcctgaaccgtatcagaacaatggcctgcgtccccacggtatctatttcgccaagcgaaattaactttggcgatattcctgccggtaacgcccgaccgggctactatgaaaaaacacgcccctttaccgtcacctatggtctggtcaagcagggtaacggcagtgattgcgggaccgaacctatgcttgctacgtttagcaccactaatacgatacaggagagcgccattattttgccgcagccggacagcggcttcggcattgccatctcgccaaacgccagcatgcatccccttattgagatgaatgctccgattcactttacgctggcaacgggcgcgaccctcgcgagcacctatacggcggggctgctctggttgtcgagaacgccgaagctggggcctttttccgcgaccgccaaaatcaccgtgacctttgaataa

SEQ ID NO: 138109 - DNA, 1095 bp, Enterobacter cloacae
atgaaatctgtttttcgtctacttcctttcctctttctgctggggctgagcgtctatcttcccggcgtgcgggctgaaacctgccgcgcaaatatcggccagaccacggtcaatattcctaatatcaagtatttacccacgctgccgatcaatacacagatgaccagcgcgatggcggataacggcagcgggatccctttttcctgcgacctgcagctgccgacggcgagcgccaaacgcatcgtctataagcagctgaaaaccggcggctcgccgatggtgattaacggacagcatgtctaccccagcgctatcgacggcattggttacgccctcagcttccagtgcgccggcggcccgatgcgtgccatcgatggcagccactccgccggcgacgagtcggtggtggtatgcgacagtgcgacgctcccggcgctgatgacgcagcagcaaaccacggtgaggattgcggtaaccttctataaaaccggaacggtgcaactggcggacgggacgcatactaattcgccgccgctgccgcaggtgggggagatgaccattgaacagcaggccagcgcaagcgccagctttgtcgccagcgcgccggtcagcatcgatatcgccgccctgaatgtggacattggcagcagcggcagctgccaggtagcgacatcgacgatccaggtcagtctgggtacggttaaccggggggagtttcatggcaaagggtctaccggcggccaggcgaagcgcttttcgattccggtcttctgtccgacgccgaccgacgtgcgcatcggctttttcggcgtcagcgtggagagcgataccctggccctgagccaggccagcaacagcgccagcggcgtcggcgtgaagctgacctacggcaataaccccggtgcggcagtgcccgacggcaccagcgttaagatcaatgaggccagcaacttgccgatcctgaaaagggtgaccggcgccagcgccggtaccgccgaggcgatcaatttcaacgcccagtatgtgcagactgacgccacggtgggagccggtacggccaacagcatggtgactttcgccctggagtataactag

SEQ ID NO: 138110 - DNA, 2556 bp, Enterobacter cloacae
atgaaaagaataacaacagccagggtgcgggagtatgccttgttgcccgttaccgccgggcgggcggtggcgctggcgacggtgccgacgatgatgttttgtctcagtccgttgagccgggcgatggccgacgactattttgacccggcggcgctggagtttgctgacccgcagcagcaaacctccgatctgcactacttcgccaaacccggcggccagcagccggggacttatcctgtcaccgtggtggttaatgaccaggagctgggtcaggctgatatcacgtttgttgacgatggcgggcagctgcgcccggtgctgacgcccggtcagctggcggagtatggcgtcaacgtcagcgcgtttcccgcctttcaagcgctgcatgaaagcgaaaccttcacccggatcgagaagtttattcccgacgccagcagtcggttcagcttcgctaaccagcgcctgacgctgagtattccccaggcggcgatgaacgtgcaaagccgcggctatgtcgatccgtcgcgctgggacgatggcgtgccggccgcgtttgtcgattactatttttccggcgcgcaaataaagaacgccgacgaaggggagagcagccgctcaaactatctcaatttacgcagcggcctcaacctgggcgcctggcgactgcgcaacatctcctcaatgcagtatgaccagcagcgccggcactgggatacccagagcacctggctgcagcgcgatgtccgctcgctgaagagcttgctgcggatcggcgatacctataccaccggcgatgtgtttgacagcatacagtttcgcggcgtccagctgatgtctgacgatgaaatgctcccggacagccagcgcggctttgcccccaccattcgtggcgtggcgcacagcaatgctaaagtgaccgtctctcagcacgggtatgtgatctacgagacctttgtgtcgccgggggcgttcgccatcagcgatctctaccccacctcgcagagcggcgatctggaggtgaaggtgaccgagagcaatggcgcggtgcgtacctttacccagccctattccgcggtgccatatatgctgcgcgaagggcgcggcaaattcagtctcagcgccggccgctaccactccgggggggagtcggtgcgctcgccggaatttctgcagggcactttgttctacggtttgacggcgggattcaccctctacggtggtacgcagctggcccgggactatcaggcgtgggcgctgggcctgggccgcggttttggcgagttcggatcgctgggaggggatgtcacccaggccgtcacccgtacgccgtcgggcaagcgctatacgggccattcgctgcgcgctcagtatcagaaaaattttgtcagctcgggcactgcgttcagcctcgccagctatcgctactcgtcaagcggctattacgattttgccgaagccagcgcccttgaaagcgcccaggggcaagtagacaaccggcgtcgccgggaagagctgtcggtgtcgcaaagccttggtggcctgggcagtctggcggtttccgcctggtcgcaggagtactggcatcggcagagtcgggatgagacggtgcaccttgggttctacagcgcctggaaagggatctcctggggcgtgggctattactacacccgcgccagcggccagcaaaaaaatgaccgctcctggtcattcaatatcaatattccgctgggtggtccgctgtccgacagcgcggtgagctacaacaccacctcggacagcaatggctatacctcgcagcagatgtcgctgtatggcgcggtgccgacgcggccaaatctgttctactcggttcagcaaggttatggcaaccagggacgaggcagcaacagcagcgcctccctggactaccacggcggcttcggcaacgcccagatcggctatcgccatgacgccgccagcaaccagttgacctggggaggcgccggctcggtggtcgcgcatccgcacggcgtcaccttcggccagacggtgggtgagagcttcgccatcgtccgggcgccgggggccgccggcgtggcggtgcaaaacggcaacaatgtgcacaccgactggcgcggctatgccgtggtgccctccctgaccgcctaccggaaaaatgtcattaccctcgatacggagtcgatggccgacgacaccgacgtcgaccagcaggggcagaccgtgatccccggcggcggcgcggtggtgatggccaactaccagacccacattggcaaccgggtgctgtttaccctgcgcaatgcccaggggccgctaccgtttggcgccagtgcgcggctggtcgaggaggaggaaagcggcaatccgccgggcggcatggtggccgacggcggccaggtgtatctcagcggtgtgccgcaggagggaaccctggcggtgagttggatcgtcaacaaccagtcgcagagctgcacgctgcattttcatcttccggataacccacagcagagtctgaatacggtgaaaaccgtctccggactgtgccagacacgctga

SEQ ID NO: 138111 - DNA, 663 bp, Enterobacter cloacae
atgatgaagaaaataattgccgttgcggcttttctgctgtgcaccacggcagcgcaggccggtattgtcatgggtggaacccgtgtgatttatcaggaagggaagcgtgaagccgctatttcagtcaccaatgccgatacccatacgccctatctggtgcagtcgtgggtggaaaattacgcggaaaacgataaggccagggtgcccttcattgtaacgccgcccttgttccgtctcgatccggagcaaaataacgttctgcggattaactttattggcgcctcgctgccccgcgaccgtgaatcggtcttctggctgaacgtcaaaagtatcgccccgacgcctcagggcgaggtgaataagctgcaggtgaatattaaatcgaaattcaaaatcttctatcgccccaacgacctggcgggcgacccggcaaaggcctggcagcagctgaagtttagccagtccggcggtcggctgacggtgataaatcccactccctacttcgtctctttttacgccgtcgaggtgggcgggcaaagcatcgacgatcccggcatggtggctcccttcggcgagaaaacgtggccggtgagcgggcacggcaccgtcaaatggcgggcgattaacgactacggcggcgtcagcgatttcgcccagcagtaa

SEQ ID NO: 138112 - DNA, 582 bp, Enterobacter cloacae
atgaaaaaacaacctcgctttataaccatcctcataggagcgctgctttctggcgtagccttgcaggctaccgcggccaacactatcaatcctgactcgggcaccagttcggaaggcgccggcgggcaggtcatcttcaatgggtcaatcaccgacagctcttgcaacgtcgatagtagttctaatggccagaaggttgatctgggcaaatgggccagcaactattttaccggcactggttttgaaaccaccaaaacccccttccatatcaaagtgaaagattgcccggccagcgtgactacggtcgccgtgctgtttgacggcgcgcgcgatcagtctgataactccctgctggccatcaacggcggcgccagcggcgtagcgattaagctgtatgagcacgatcggtcgacggctgtcagcctcggtaaaacgtcagccaaacagacggtcactcctggtaccagcggcggcaccggctctgccgacctcgagttttacgccgactatatctccaccgcggcgaccgtgacggcaggtaaagccgacggtacagctaatttcaatatgatttataactga

SEQ ID NO: 138113 - DNA, 555 bp, Enterobacter cloacae
atgtctgctcagctgcgcccctacaaagcatttttcccacaaatcggtcttcgcgtcatgattgacgcatccagcgtcgtcatcggcgatgtcagaattgccgatgacgtcagcgtctggcctctggtggccattcgcggcgacgtcaactatgtatcgataggtcaacgcagcaatattcaggacggtagcgttctccatgtgacccataagtcctcttataagccggagggaaatccgctgatcattggtgaggatgtaactgttggtcataaagtgatgctgcacggctgcactatcggcaaccgcgtactggttggcatgggttcgatcttattagatggtgtcgtcgttggcgacgacgtcatgataggtgcgggaagtctggtaccgcagaacaaacagctggaaagcggctacctttactttggcaatccggtcaaacagatccgccccctgacagaggcggaacgggaaggactcaagtattcagcaaataactatgtgaaatggaaaaatgagtacctggatcaggataaccagatccagccctga

SEQ ID NO: 138114 - DNA, 258 bp, Enterobacter cloacae
atgaatcaggcgattcagtttcctgaccgggaatcatgggatgccgaacggcagggcgtggtttttcccgcgctggtgaatgggatgcaattaacctgcgcaatttcagggcaaatcctgcagcagcgtttcggtgcagaggggccagcgcagtggctggccgccttccaggaacatcgttgggatctagaggaagaggcagaagcattgatccgcgatggtcaggaagatgctcagggctggatctggttatcctga

SEQ ID NO: 138115 - DNA, 819 bp, Enterobacter cloacae
atggaaacctatgccgtttttggtaatccgatcgcgcacagcaagtcgcctgctattcatcagctgtttgcccgccagttaggaattactcatccttatggacgtgtactggcgccgctggacgattttgtctcttctctgaatcagttctttgcagaaggaggaaagggggccaacgtcaccgttccttttaaagaggaagcctttgcgcgtgccgacgaactgacagaacgcgcagcgctggcgggagcagtaaacaccctgaaacgcctggaagatggccgtttactgggggacaacaccgacggtattggtcttctgagcgatctggaacgcctgggattcattaagccacgccaacggatcctgcttgttggtgctggtggggcatctcgcggtgttcttttgccgcttctgtcgctgggatgcgccgtcacgatcgtgaatcgcacctattctcgtgcccgtgagttagccactctcttcgcccataccgggagcgttagcgcaagggagatggataccttatccggggaaacattcgatctgatcgtcaatgcgacgtccagtggaatagacggtgatgtaccagctatcccggcatctattgtcaacgctgacgtatattgctatgacatgttttaccagaaagggccgacaccgtttcttcactggtgccagcaatatggcgcagttcactgtgccgatgggctgggaatgctggtggcgcaagccgcccatgctgttctgctatggcacggcgttctgccggctatcgctccggtcattgaaacgctgcagcaggaactgaatgcatga

SEQ ID NO: 138116 - DNA, 573 bp, Enterobacter cloacae
gtgaacaataacctgccctcagaagccgtcgcccatgccgtggcggtcctgaaaaatgaacatgtcatcgcctatcccaccgaagctgtgtttggcgtcggctgcgaccctgacagcgaaacggccgttatgcgcctgctggagctgaagcagcgtcccgtagagaaaggattgatccttatcgccgccagctttgagcaactgaagccctatattgatgattcacggttaagtgactcacagcgggaagccatcttctcttgctggccgggaccggtgacgtttgtattcccggcgcgtcctgaaacgccgcgctggctgactggacgttttgattcactggccgtacgcgtgactaaccatccgctggtaatcgaattgtgcgaagcctacggaaaaccactggtttcgaccagcgccaatctcaccgggcaaccaccgtgccgtactaccgcagaggtccatgctcagtttggcgacagcttcccggtggtggatggcgccacgggcggccggcaaaacccatctgaaatccgtgatgccctgacgggtgaactgttccgccaggggtga

SEQ ID NO: 138117 - DNA, 543 bp, Enterobacter cloacae
atgaccaaatcagcactgttttcggtgcgtaaaaatgagccctgcccgcagtgcggggccgaactggtgatccgttccgggaaacatggcccgtttttcggctgttcgcattatccggactgtgactatattcgtcccctgaaaagccaggcggacgggcatatcgttaaggtgctggaggggcaagagtgcccatcgtgcggtgcggttatggtgttacgccaggggcgttttgggatgttcattggctgtagccgctatccggaatgtgaacataccgagctgattgataaacccgatgagacggctatcgcttgcccgcagtgcggacaaggccatctggtccagcgtcgttcccgtttcggtaaaacctttcactcctgcgatcgctatcctgattgccagttcgttatcaattttaaaccggtggcgggcgaatgccctgaatgccattacccgctgttaatagaaaagaagacggcgcaggggctcagacgcttctgtgccagtaaacaatgtggaaagccgatcccggcggaataa

SEQ ID NO: 138118 - DNA, 474 bp, Enterobacter cloacae
atgttcgacgtactcatgtatttgtttgaaacttacatccatagcgaagcagaaatgcgcgtggatcaggacaaactgacgcgggatcttaccgatgcgggttttgagcgggaagacatctataacgcgttaatgtggctcgagaaactggctgattatcaggaaggtctcgttgaacccatgcagctcgcttccgacccgctctctcttcgggtatataccgaagaggagtgccagcgtctggatgccagttgccgggggtttttactcttcctcgagcagattcaggtgttgaacctcgaaacgcgagaaatggtgatagagcgcgtactggcgctggatacggcggaatttgagctggaagacctgaaatgggtcatcctgatggtactgttcaatattccgggctgtgaaaacgcctatcagcaaatggaagaattactcttcgaagtaaatgaaggtatgctgcattaa

SEQ ID NO: 138119 - DNA, 1125 bp, Enterobacter cloacae
atgacgcccgacgagatttggctgcggctgatgaaggtcagtagcttgtatggcgacaggatggtagaggtcgctcagcgcttatgcgcagccgccagcgttgatcgtgaagcgctgcatgccgtcgggatgaccgcggcgcaggcaaagttattttttctgcttgacgagcatgagcttgacgagacgcggcgctggctggaacaaccggatcatcatctgttacggggtgacgatccgcgctatccattgcggttaaaggctatcgctgattaccccggcgcgttgctggtcagcggcggcctcgccctgcttcacagcgcgcagcttgccgttattggcagtcgctcgcactcctggtatggcgcccgctgggggaaactgttcagcgaaacgctggcgcagaaagggattaccatcaccagtgggctggcgttaggcattgacggggtcgcgcaccgcggcgcgctggcggcggagggtaaaactatcgcggtactgggcaatgggctgagtcaggtttatccgcggcgccatgcaaccctcgcccggcagatcatcgacaatggcggtacgctggtatctgaatttccactcattacgccgccgcttcccgcacatttccccaggcgcaaccggattatcagcggcttaagcctgggcgtgctggtgattgaggcggcgttgcgaagcggatcgctggtcaccgtccgctgcgccctggagcagggaagggatgtgttcgccctgcctggcccgataggcaatccgggatcggaaggcccgcactggttaattaagcaaggtgcggtgccagtgacctcgccagaggatattgtggaatactggcataacgagctggcctggctgactgatacgtctgattcgataaatatttgcgtcgatcagccgtctgtagcattgccatttccggagctcctggctaacgtaggagatgaggtaacacctgttgacgttgtcgctgaacgtgccgaccaatctgtgccagtaaccgtagctcagctacttgaactggagttagcaggctggatcgcagctgtacccggcggctatgtccgattaaggagggcaagccatgttcgacgtactcatgtatttgtttga

SEQ ID NO: 138120 - DNA, 510 bp, Enterobacter cloacae
atggcagttttgcaagtgttacatattccggacgagcgccttcgcaaagtcgccgagccggtcaaagaagtgaatgcggaaattcagcgtatcgtcgatgatatgttcgacaccatgtacgccgaggaaggcatcggtctggccgcaacccaggtcgatatccatcagcgcattatcgttattgatgtgtcggaaaatcgtgaagagcagctggtattaattaacccggaaatgctggagaaagatggcgaaaccggtattgaagaaggctgcttgtctattcctgaacagcgcgccctggtgccgcgtgcggaaaaagtgaagatccgggcactggatcgcaatggtaagccgtttgaactggaggccgatggcctgctggctatctgtatccagcatgagatggatcacctggtcggcaaactgtttattgactatctgtcaccactcaaacaacagcgcattcgtcagaaggtagagaaactggatcgtttacgttcccgtgcctga

SEQ ID NO: 138121 - DNA, 948 bp, Enterobacter cloacae
gtgtcacaatcactacgtatcattttcgccggcacccctgattttgcagcgcgtcatcttgatgcgctgctgtcgtctgaacatcaggttgttggcgtatttactcagcctgatcgccctgctggtcgcggcaaaaaattgatgccaagcccggtaaaagtgctggcagaagcccataacttacctgtgttccagccatcctccctgcgtccgcaggataaccagcggttagttgccgatctcggcgccgatattatggtggtagtggcgtacggtctgattctgcctaaagcggtgctggagatgccccgtctgggctgtatcaacgttcacggctcgctgctaccgcgctggcgtggcgcagcgcctattcagcgttcactgtgggcgggggatagcgaaactggcgtaaccattatgcagatggacgtcggccttgatacgggggatatgctgtataagctttcctgccccattaccgcagaggataccagcggcagcctgtacgataagctggccgagctcggccctcaggggctgctggcaacgttagcccagctggccaacggcaccgcacggcctgaagtacaagatgaatcgctggtgtgccatgccgaaaagctgagtaaagaagaggctcgtatcgattggtcgctttccgctgcgcagttggaacgctgcatccgcgcgtttaatccgtggccaatgagctggctggaaattgacggacaaccggtaaaagtgtggcgggcatcggtcatcgccgaagccgctcacgccgaaccgggtactatcgtggcagcaaccaaacagggtattcaggtcgccacgggggatgggatcctcagcctggagtcgctacagcctgcgggtaaaaaagcgatgagcgcccaggacttactcaattcccgccgggagtggtttatccctggcacccgtctcgcctga

SEQ ID NO: 138122 - DNA, 1296 bp, Enterobacter cloacae
atgaaaaagaatataaatttacgcagcctggccgcccaggctatcgagcaagttgttgaaaaagggcagtctttaagcaacgtactgccccctctacagcagaaagtcagcgataaagataaagcgctactgcaggagttgtgctttggtgtactacgtactctaagccagctggagtggcttatcagcaagctaatggcgcgtccgatgaccggcaaacagcgcaccgtgcactttctgatcatggttggtctctatcagttactctacacccgcattccaccacacgccgcgctggcggaaacggtagaaggcgcggtggccattaaacgcccgcagcttaaagggctaatcaacggcgtgctacgccagttccagcgccagcaggaagcgttgttagccgaatttgctgagcatgaaaaccgctatcttcatcccaaatggctgctgaaacgcctgcagcaggcctggccggagcagtggcaggagatcgtcgaggcgaacaaccagcgcccgccgatgtggctgcgcgttaaccgcaaccatcattcccgggatgagtggcttgccctgcttaacgagaccggtttagagggctttacccaccctgattatccggacgccgtacgcctggccacccctgctccggtccacgcgttaccaggctttgccgaaggctgggtgaccgtccaggatgcctcggctcagggctgtatgcgctacctgcaaccggaaaatggcgaacgcattctcgatctctgcgcggcgccgggcgggaagacgacgcatattctggaagtcgctccccaggctcaggttatggcagtggatattgatgaacagcgtctgtcccgcgtctatgacaacctgaaacggctgggcatgaaagccgaagtcaagcagggcgatggccgcttccctgagcagtggtgtggcaatgagcagttcgatcgtattctgctggatgccccctgctccgcaaccggcgttattcgccgccatccggatatcaaatggctgcgccgggatcgggatatcgccgagttagcccaactgcaggccgagatcctcaatgccacctggacgcacctgaagccaggcggcacgctggtttacgcaacctgttctattctgccggaagagaacagtcagcaaattgccgctttcctcgcgcgaactccggatgcagaacttcacgccaccggcacgccggcgagccccgggcagcaaaatctgccgggcgtggaagaaggtgatggcttcttttacgctaagctaatcaaacgtcggaactaa

SEQ ID NO: 138123 - DNA, 1377 bp, Enterobacter cloacae
atgaagattattattctgggcgccggccaggtcggcggcacgctggcggaaaacctcgtcggcgagaacaatgatattacgctggttgataccaatggcgaccgtctgcgcagcctgcaggataagttcgacctgcgtgtcgtccaggggcatggctctcaccctcgcgtactgcgtgaggcgggggccgatgatgccgatatgctggtagcggtcactagttcggacgaaaccaacatggtggcctgccaggtcgcttactcattgttcaatacgccaaaccgcatagcgcgtattcgtgcgcctgattacgttcgtgatgcggaaaagctcttcaactctgaagcggtacccatcgatcacttaatcgctccggaacaactggtcatcgacaacatccaccgtctgatcgaatatcccggcgcgctgcaggtcgtgaacttcgcagaaggaaaagtcagtctcgcggtagtaaaagcctattatggtggcccgctggtggggaatgccttatccactatgcgggagcatatgccgcatatcgatacgcgcgtggccgccattttccgccacgatcgccccatccgcccgcagggctcgacgattgtcgaggccggagatgaagtcttctttattgccgcctcgcagcatattcgcgcggtcatgagtgaactgcagcgactggaaaagccgtataagcgtattatgctggtcggcgggggcaatattggcgcgggtctggcccataagctggaaaaagattacagcgttaagcttatcgaacgtaatcagcagcgagccgctgagctagcggaaaagctgcagcatactatcgtcttctacggggatgcatcggaccaggagctgttggctgaagagcatattgaccaggtggacctgtttattgccgtcactaacgacgacgaagccaatattatgtcggctatgttggccaagcgaatgggcgcgaaaaaagtgatggtgctaatccagcgcagagcctacgtggatctggtccagggtagcgtcatcgatattgcgatttcgcctcagcaggccacaatttccgcactcctcagtcatgtccgtaaagccgatattgtcggcgtctcctccttgcgccgcggcgttgcagaagcgattgaggcagtcgcgcacggcgatgaaagcacctcccgggtagtcgggcgttcgatcgatgagatcaaacttccaccgggcacgatcatcggcgccgtcgtgcggggcaatgacgtgatgatcgccaataataatctacggatcgagcagggcgaccatgtgatcatgtttttgaccgataagaagtttatttccgatgtcgaaaggctgttccagccaagtcctttcttcctgtaa

SEQ ID NO: 138124 - DNA, 414 bp, Enterobacter cloacae
atgagttttttaaaagagtttcgcgaattcgcgatgcgcgggaacgttgtcgatttggcagtgggtgtgatcatcggtgcagcattcggtaaaattgtttcatcactggtcgcggatattattatgccgccactcggcctgttgattggcgggatcgattttaaacagtttgccgtcacgctacgtgatgcccagggcgatgtcccggctgtggtgatgcattatggggtattcattcagaacgttttcgatttcatcatcgtcgcgtttgccatcttcatggcgattaaattgatgaataagttaaatcgtaagaaagaagaggctccggcggcaccgccagctccctctaaagaagaagttctgctgagcgaaattcgcgatctgctgaaagaacaaaacaaccgttcttaa

SEQ ID NO: 138125 - DNA, 279 bp, Enterobacter cloacae
atgagtcgctatcagcatactaaaggacaaattaaagataacgccattgaggcacttctccacgatccgttattcaggcagcgcgtagagaaaaacaagaaagggaaaggaagctatcaacgtaaagataaacatgcaggaaggattgatcgggaggccagtggcaagcaagcgaatcgcttttttaccactggccttctgctttctctgctgattaagaacggttgttttgttctttcagcagatcgcgaatttcgctcagcagaacttcttctttag

SEQ ID NO: 138126 - DNA, 426 bp, Enterobacter cloacae
atgtatcgtattggtgaattggcaaaactggctgacgtgacgcctgataccatccgctactatgaaaagcagcagatgatggatcatgacatacgcaccgagggaggatttcgtctgtactcggataacgatcttcaacggctgcgctttattcgttatgcccgacaactgggtttcaccctggaagcgatccgcgaattattgtcgatccgcatcgatccggagcatcatacctgtcaggagtcgaaagggatcgttcaggcgcgattaagtgaagtcgaggcgcggattaaagagctacagacgatgcgccgctctctgcagcggctcaacgatgcctgttgcggcactgcccacagcagcgtttactgttctatccttgaggcccttgaacaaggggccagcaacggcaatggcggacgttga

SEQ ID NO: 138127 - DNA, 369 bp, Enterobacter cloacae
atgtggttgctggatcagtgggcggaacgtcatatcctcgatgcccaaaccaaaggtgagttcgataatttacccggcagcggagaaccgctgactctcgatgacgattcacatgtgccggcggagttgcgggcaggctatcgccttctgaaaaatgcaggatgtcttcctccggaactggagcaacgcaaagaagcgttggctctggcagacttactgaatggcgtccgtcaggacgatccgcgtcatgccgaacttagcaaacgccttgccctgctcgagctgaagttacgtcaggcaggtctgaacaccgactttttacgcggtgagtacgccgatgcgttgctgcaaaaaataaatcaggagtaa

SEQ ID NO: 138128 - DNA, 939 bp, Enterobacter cloacae
gtgagtcgcctgcagacctttaccgcttacgatcgactcagcaccgcgctcaccgtcgcccaggtctacggcgtccagcggctgtgtaaccactacgccgcccgccttgctcccctgccaggccccgactcctcgcgcgagagcaaccgtcgtctggcgcaaatcacgcaatatgctcgtcagcttgccggttcgccctcggttattaacgctctctcccgtagccagctggacgaagtgggcttaaccagtcgggacattattctgttcaaccagattatcggattcgtcggcttccaggcgcgggcgattgccgtcctgcaggcggcccagggctttccggtgcgctggatccccggtatgccccagcaagaggaggcacccgcggagctgttcgccccgccgccgggagcatggcaggcagacattgcggatcccgacctgcagtatgccgatgatgagcgtcagcggcgcatcgccggctggcagtcgctgcccggtctggacgagctggcgccgctgctggcctgcgacccacagttattcgcgcctctggagaccttgatccgccagctcagcacggatgatacctttggcccgcaggtcgccttactcacggcgcgcaccaatggcagccccacctgttttgacgcctggctcccccactggcagggtgaagaggagttcgccagccatctgcgggagggcgaccaggccctccatcactggctccagcagcatcctcaggcccggtctctcgtgaccgcggtgcagctgttaacccgctcgcctgaccggtttagcgccgcccagttaacgcccctcgcggaatatcgactctctgagcaacaagcaatcgatctgttgatctggagcgggctgtgcggatggatgaatcgtctgaaaatcgccctcggcaatgtgcgtcagcagacgtaa

SEQ ID NO: 138129 - DNA, 1860 bp, Enterobacter cloacae
  misc_feature (1702)..(1711): n is a, c, g, or t
atgtttcaggataacccgctgctagcgcagcttaaacagcaactgcattcccagacgccgcgcgcggaaggggtcgttaagggcacggaaaagggctttggcttcctagaagtggacgctcagaagagctacttcattccgccgccgcagatgaaaaaagtgatgcatggcgaccgtatcgtcgcggtgatccattctgaaaaagaacgcgaaagcgccgagccggaatcgctggttgagcccttcctgactcgttttgtcggtaaagtccagaagaaagacgatcgcctcgctatcgttcctgaccatccgctgctgaaagacgccattccctgccgcgccgcccgcggcgttgaacacgattttaaacagggtgactgggccgtcgccgagatgcgccgtcatccattaaaaggcgaccgcgggttttacgcggagttgacccagttcatcacttttagcgacgatcacttcgtcccatggtgggtaaccctggcgcgccataatcttgagaaagaggcaccggacggcgtcgccaccgagatgctcgacgaggggctgacgcgccgcgacctaaccgccctcgacttcgtcaccattgacagcgccagcaccgaagatatggacgatgcgttgtatgccgaatccactgctgatggcaaactgctgctgacggtcgccattgccgacccgaccgcctggattgccgaaggcagcaagctggataacgccgcaaaagtgcgcgcctttaccaactatctgccaggcttcaacattccaatgctgccgcgcgagctgtcgaacgacctctgctccctgcgcgctaacgaagtgcgcccggtgctggcctgccggatgaccctggcggccgatggcaccatcgaagacaatatcgagttctttgccgccaccatcgaatcgaaagccaagctggcctatgacgacgtctctgactggctggaaggccgcggcagctggcagccggacagcgaggcgatcgcgcagcaaattacgctgctgaaggacgtgtgccagcgtcgtagcgaatggcgtcagacccatgcgctggtgttcaaagaccgtccggactaccgttttgttctcggcgaaaaaggcgaagtgctggatatcgtcgcggaaccgcgtcgcattgccaaccgcattgtcgaagagtcgatgatcgccgccaacatctgtgccgcccgcgttctgcgcgacaagctcggcttcggcgtttataacgttcataccggtttcgatccggcgaacaccgagcagttggccgccctgctgaaaacccatgatgttcacgtcgacccgacggaagtgctcaccctggaagggttctgcaagctgcgccgggaactggacgctcagccgaccggtttcctcgacagccgcattcgccgcttccagtcgtttgcggaaatcagcaccgagccgggcccgcactttggtcttgggcttgaagcctatgccacctggacctcgccgatccgtaagtatggcgacatgatcaaccaccgtctgctgaaagccatcattaaaggcgagaccattgcgcgtccccaggatgaagccaccgtgcagatggcggagcgccgtcgtctcaaccggatggccgagcgcgacgtcgccgactggctgtacgcccgtttcctcaacgataaagccgggaccgatacccgcttcgcggcggagnnnnnnnnnngatcatcgacgtcagccgcggcgggatgcgcgtgcgtctggtggacaatggcgcggtcgcctttattccggccccgttcctccacgccgtgcgcgacgaactggtgtgcagccaggagaacggtaccgtgcagatcaaaggtgaagtag

SEQ ID NO: 138130 - DNA, 180 bp, Enterobacter cloacae
atgtcagatgtgaatgcccacctgctcgctcaacgtatcgataccgtgctggatattctggttgccggtgattaccattctgcgatccataatctggagatcctcaaagcggagctgctggcgctggcggcggacgatgctgaacaacaaaaccaacccaaggcgccctgggaaatctga

SEQ ID NO: 138131 - DNA, 750 bp, Enterobacter cloacae
atgaacgcccgacaacaaagtattttgcaagtggtcatcgataaaggccgcatgagcgtcgccgatctggcgaagatgaccggtgtctctgaggttactattcgtcaggatttgaatttgctggaaaagcagagctatttgcgccgtactcatggctatgccgtaccgctggacagcgaagatgtcgaaacccgcatgatgacccatttcgccattaagcgtgagctggccagccgggctgcggcgctagtgaataccggtgaaacggtatttatcgaaaacggcagcagcaatgccctgctggcgcgtacgctggccgagcgcggcgatatcaccatcattaccgtcagcagctatatcgcccatctgctgaaagagaccccaggagaggtgatcctgctgggcggaatttatcagaaacgcagtgagagtatggtcggtccgctaacccgtcagttcatccagcaggtgcatttcagcaaagccttcatcgggatcgacggttggcaggcggaaaccggctttaccggccgcgatatgatgcgtgcggacgtggtgaacgccgtgctggagaagcattgtgaggcaattattcttagcgacagttcaaaattcagcgcggtacatccctatccgctcggtcccgccggccgctttaatcgcgttattaccgacgatcgcttaccggacgcctgtcgcgaacaattgctccgcagcggcctgaccgtcgatatcgtgccctacatctga

SEQ ID NO: 138132 - DNA, 222 bp, Enterobacter cloacae
atgatgacttcaacgagcaaaaaaatggctgctgtcgttctggctgtcactgtagcaatgtctctgagcgcttgctctaacatgtctaaacgcgatcgtaacacggctatcggcgctggcgccggcgctatcggtggtgcggtgttaactgacggtagcgcgctcggtaccctgggtggcgcagcagtcggtggtattattggtcaccaggtcggcaaataa

SEQ ID NO: 138133 - DNA, 327 bp, Enterobacter cloacae
atgagcgattccaacagccgtctggtctactccaccgaaaccgggcgtatcgacgaggcgaaaccggcgccggtgcgcccgaaaggcgacggcattgtgcggatccagcgccagaccagcggccgcaagggcaaaggcgtctgtctgattagcgggattgatgccgatgatgctgcgctaaccgctctggcggcagagttgaaaaaaaagtgcggctgcggcggcgcggtgaaagatggcgtgatcgagatccagggcgataagcgggatttactcaagtcgctgcttgaggcgaaagggatgaaggtcaagttagccggtggctga

SEQ ID NO: 138134 - DNA, 738 bp, Enterobacter cloacae
atgacgtctacagctatcccatcttcccgcgctgtcacatcctctcccgttgtggttgcgctcgactatgataatcgcgataaagcgctggcatttgtcgaccgcatcgacccgcgcgactgccgcctgaaggtgggcaaagagatgttcaccctgctgggcccgcagtttgtccgcgatctgcatcagcgtgggtttgaggtgttcctggaccttaagtttcacgatattcccaacaccaccgcccgcgcggtggccgcagcggctgagctgggcgtatggatggtgaatgtccatgcttccggcggcgcgcgaatgatgaccgccgcgcgcgaagcgctgctgccgtttggcaaagatgcgccgttgctgatcgctgtcacggtgctcaccagcatggagtccagcgatctacaggatctgggcattaccttatctccggctgactacgcggcgaagctggcggcgctgacccaacgctgcggccttgaaggggtggtgtgttcagcccaggaggcggtgcgctttaagcatgagctggggcaggcgtttaagctggtgaccccggggattcgtccgcagtgcagcgacgctggcgatcagcggcgaattatgactcctgagcaggctcaggaagctggggtagactatatggtgattggtcgcccggttactcagtcggcggatccagccgcgacgctgcgggcgatcaacgattctctgcgcaagggggcataa

SEQ ID NO: 138135 - DNA, 1170 bp, Enterobacter cloacae
atgctggagttgttgtttctgcttttacccgttgccgccgcttacggctggtacatggggcgcagaagtgcacaacagtccaaacaggacgatgcgagccgcctgtcgcgagattacgtggcgggggttaacttcctgctcagcaaccagcaggataaagccgtcgacctgttccttgatatgctgaaagaggataccggtaccgttgaggcgcacctgacgctcggtaatttgttccgttcgcgcggcgaagtcgaccgcgcgatccgaattcaccagagcctgatggaaagcgcgtcgttaacctacgatcagcgcctgttagcggtgcagcagctgggacgggattatatggccgccggactgtatgaccgcgcggaagacatgttcaaacagctggtggatgagaccgatttccgcctcggcgcgctgcagcaactgctgcagatttaccaggcgaccagcgactggcagtcggctattgaagtggctgaacggctggtgaagctagggaaagagaaacatcgtggcgaaatcgccaacttctggtgcgaactggccctgcagcagatggcagccaacgatctggataaagcgatggcgttgttgagaaaaggcgccgccgcggaccgcaacagcgcccgggtatcgatcatgatgggccgggtgtggatggaaaagggcgactacgccaaagcggtggagagcctcgagcgggttatcgatcaggataaagagctggtgggtgaaacgctggagatgctgcagacctgctaccagcagctcggcaaaaccgatgaatgggaagtttttctgcgccgctgcgtggaggagaacgccggggcgaccgccgaactgatgctggcgcagatccttgagcaacgggaaggcgtcgaagcggcgcaaaactacgtcacccggcagctggaacgccacccgaccatgcgcgtcttccataagctgatggactaccatctcaacgaagcggaagaagggcgggcgaaagaaagccttggggtgctgcgaaacatggttggtgagcaggtgcgcagcaaaccacgctatcgctgccagaaatgcgggtttaccgctcatacactctactggcattgtccgtcctgccgctcgtgggcgaccattaaacccattcgcggtctcgacggccagtaa

SEQ ID NO: 138136 - DNA, 309 bp, Enterobacter cloacae
gtgaaatatttactcattttcttactggtgttagcaatcttcgtcatttcagtgacgctgggggcgcagaatgaccaacaggttactttcaactatttactcgctcagggtgaattccgcatatcgacgctgctggcggtgctgtttgccgcgggctttgccattggctggctgatctgcggcctgttctggctgcgggtgcgtgtctcactggcgcgcgcggagcggaaaattaagcgtcttgagcatcagattgcccccgtcagcccggcggctgtcgacgcaggcgtgcctgcggtgaaggaataa

SEQ ID NO: 138137 - DNA, 276 bp, Enterobacter cloacae
atgtttgccgccagctgggcgttactcgctgcggggctgctgtggccgcgtcgccgctggggcacaatcgcggtgctgctggtgtgggcgacggcggtgatgggcagtcgcctggcgctgggcatgcactggccgctggatcttatcgtcgccacgctgatctcctggctgctggtcacggtggcctgctggctgacgcagcgcctttgtggtccgctctcgccgcccggagaagaggcgcaggatattaaaaaacggatgcctgaagcggaataa

SEQ ID NO: 138138 - DNA, 603 bp, Enterobacter cloacae
atgcagcttaaacgtgtggcagaagccaaactgccaaccccctggggcgatttcctgatggtgggttttgaagaactggcaaccggacaggatcatgtcgcgctggtgtatggcgatatatcagggcagtcgccggtcctcgcccgcgtacattcagagtgtttgacgggcgatgccctgtttagcctgcgctgtgattgcggctttcaactggaagcggctctgtcgcatatcgctgaagaaggtcgggggatcctgctctatcaccgccaggaaggtcgcaacattggtttattgaataagatccgcgcctacgcgctgcaggatcagggctacgacaccgtcgaagcgaaccatcagcttggcttcgccgccgatgagcgcgatttcaccttgtgcgccgacatgttcaaattgctcaacgttgagcaggtgcggttattaaccaataacccgaaaaaagtggaaattcttaccgaagccgggatcaacattgtggagcgggtgccgctgatcgtcgggcgtaacccgaaaaacgctcactatctggacaccaaagccgccaagatgggccatctgctgaacagcaagccgacagaataa

SEQ ID NO: 138139 - DNA, 1854 bp, Enterobacter cloacae
atgctgcgtcagcatggcgtcgtcggcaagtttgttgaattctacggtgacggcctggataccttaccccttgccgacagggcgaccatcgccaatatggcgccggagtatggcgccacctgtggctttttccctatcgatgacgtaacgctcagctatatgcgtctcagcggccgtagcgaagaacaggtcgcgctggtggaagcctacgctaaagcccagggcatgtggcgccagcctggcgatgagccggtctttaccagtaccctggcgctggatatgagcagcgtcgaagcgagcctcgccgggccgaagcgaccgcaggatcgcgtggcgctgggcgatgttccgaaagccttcgccgccagcggcgagctggaggttaaccaccttcagcgtcagcgtcagccggttgactatacgctgaacgggcatcactattcgcaaccggatggcgcggtggctattgcagcgattacctcctgcaccaatacctctaaccccagcgtgttgatggccgccggcctgctggcgaaaaaagccgtcgaacgcggcctgcagccgcagccgtgggtgaaagcttccctggccccaggctcgaaagtggtgtcggattatctggcccatgccggcctgacgccttacctcgaccagctcggcttcaatctggtgggatatggttgcaccacctgtatcggtaactccggtccattgcctgaacctatcgaagaagcgatcaaaaaaggcgatctgaccgtcggggcagtgctctccggtaaccgtaacttcgaagggcgtattcatccgctggtgaaaaccaactggctggcctcgccgccgttggtggtcgcctatgctctggcggggaacatgaatatcgacctcacccgcgagccgttgggacagggcaagaatggcgagccggtctatctgaaagatatctggccgagcggggaggagattgcccgcgcggtggaacaggtctccaccgagatgttccgcaaagagtacgcggaagtgttttccggcactgaggagtggaaggcgatcaaggtggaggcgtcagatacctacgactggcaggaggactcgacctatattcgcttgtcgccgttctttgacgagatgggcgccgagccgctgccggtagaggatattcgcggcgcgcggatcctcgccatgctgggcgactcagtcaccacggaccacatttcgccggcggggagcatcaaagccgatagtccggcgggccgctatctgcaggagcatggggttgcccggcgcgactttaactcctatggttcccgtcgcggtaaccatgaggtgatgatgcgtggcaccttcgccaatatccgcatccgtaacgaaatggtcccaggggtggaagggggcatgacccgccatctgccggatcctgaaccgatggcgatctacgatgcggcgatgctgtacaaggctgagggcacaccgctggcggtgattgccggtaaggagtatggctcaggttccagccgtgactgggcggcgaaggggccgcgcctgctggggattcgggtagtgatcgccgagtccttcgagcgtatccatcgttccaacctgatcggaatgggcattttgccgctggagttcccgcagggcgtcacccgcaaaacgctgcggttgaccggggaagagcggattgatatcagtaatctgcagtcgcttcagcctggcgctacggtgccggtgaccctgactcgcgctgacggctcgcaggaagcgatcccttgtcggtgccgtatcgacacggcgaccgaactcacctactaccgcaacgacggcatcctgcactacgttattcgtaatatgctgtga

SEQ ID NO: 138140 - DNA, 1014 bp, Enterobacter cloacae
atgagtaatgcgcacaatccgcaacactggagtcagctggatacggaagaacagatccgtttctggcagggggtagaggacggccatgtggcatcttttctggtttccccggagaagaaatctacccgtcgccggcgcggcgagcactccacaaaacccaaatgtgaaaacccgacctggtttcgaccggagcattacaaaaaactgggtggccagctggggcacgcctataaccgtcttgttcaaaaagatcgcaccactggtgaggtgcgactgcgtatgcacgtatcgcttcatccgctgtacgtcagggaacgccgtcgggctggccgccggtatggcttccggccggaaaagcaacgtctgctggatgctatctggccagtgctgatcagtttctgtgatgccggcaagctgacggtcggtatgtgtatttctcgtctggcaaaagaactcagccagaaagacagtcatggaaaagttattccggaaacagaggtaacagtctcacgtctgtcccggttgattgacgaacaggtccgttttggtgtcctggctgtatctgaagaaaatagctgggacagggaatcccgtacctggcttcctaaatacgtctatatcaccgcgttagggtttcagatgctgggagtggatctggaaaaacttgatgcggaacaacaaaaaaagctccggcaaagcgaagagcgtcgtcgtcttatcgaggaggggattctgcgtgaagatgaggagatctccccgcgtgcagcacgtgagcgctggtaccgtcaaaaaactctcgatgcactgaagttccgtcggcagcgtggcgccgaacgtaaacgagctaaccgcctggccagatattctcgtgagcgccagattcacgaaatgtcgcttcatatcctgaagacaatgccggcagacgaggcttactggtgtacaacggagcggctgcagcagctggccattcagaacctgtatcagctggagctggccctggctccgccgtcctga

SEQ ID NO: 138141 - DNA, 249 bp, Enterobacter cloacae
atgaatcttctggtcaatgccggtatcccggttcgcacagtgtcgcagtacaaaatcatgcacgacaaagtcatcattgccgatggccgcaatattgaagtcgggtcttttaactacacacgcgccgctgatcgggtcaattcagagaacgtgcttgttgtatgggatgatcctgtcctggctcaacgctatctgcagcactggcagtctcgctggaatggcggtactgattggcattcatcgtactaa

SEQ ID NO: 138142 - DNA, 912 bp, Enterobacter cloacae
atgcatcacgacgccagcctcaatattcgccagctgcaggttttcgaggcggtggcccgcctggagagctacagccgggcccagcaggagctgggtatttcggtctccgccatcagcaatgcgatgtcgcagctggagggacagctcggcttcaccctctgccagcgcgggcgcggcggcttttctctgaccgagaaaggtcagcagtttttacagcaggcgatccgcgtactgagcgaactcaatgagctggagcggcagtcggcgctgctcaaaggggagcacagcggcaccctgtgcatctcgacgctcgactccatcgagaccgaaacggcgctctcgctgccggtggttctgcgcagcttcagcgacaaatttccccatgtgcatatcaaactgattatccgcaccccggcggagcaactgaacggcgtgctgaacaaccatatcgacctggccatcggcagctacaactcgcaggtgcataacatcatcagcgagccgctgtaccgtgaacagcactggctctactgcagcgatctgcacccgatgttcttcagccgccagctcgataaagagcagatcagccagtgcccgctggtgactcgcagctactggaacaccagcgatctccgccgtcggggcttcagcaaagggagcgccaccgtcgagaccgtcgacgcccagctgctgctgatcctctcggggaaatatattggctatctgccggagcattacgcctggccgtggatcaaagagaaccgcctgcgggtgctgctgcccaacgagtttggctttcagtcgccgttctcggccatctgtaagcgcgggcgcagcaatgagccctacctgaaagcgttccgcgacctgctgaagaaaaatacggtggcgcggccgaagtggaattattaa

SEQ ID NO: 138143 - DNA, 951 bp, Enterobacter cloacae
atggataacctctttcaccaaccgcagggtggcaatgagatgccacgcttcgccggccgcgccacaatgatgcgcctgccgtttattgaagatttacagggacttgacgcggcgtttgtcggcattccgctggatatcggcacctcgcagcgctcgggcacgcgctacggaccacgctatattcgcgccgaatcggtgatgatccgtccgtacaatatggcgaccggcgccgcgccgttcgactcgctgtcggtggctgatatcggcgatgtgccgatcaatacctacagcctgctcaaatcggtgcaaattatcgaagattactacaccggtttgaatagttatccgctgatcccgctgaccctcggcggggaccacaccattaccctgccgatcctgcgggcgctgaccaaaaaacatggtccggtgggcctcatccacgtcgacgcccataccgacaccaatgatgagatgttcggagagaaaatcgcccacggcaccaccttccgccgcgccgttgaggagggactgctcgacctcaaacgggtggtgcagattggccagcgcgcccagggctatgccgccggcgacttccagtggggcgttgaccagggctttcgcctggtgcaggcggagcagtgctggcatacctcgctggcgccgctgatggccgaagtccgccagcagatgggcaacgggccggtgtatctcagctttgatatcgatagcctcgatcccatctgggctccaggaaccgggacgccggaagttggcggtctgacctccattcaggcgctggagatcgtccgcggctgccgcggcctgaatctgattggcgccgatctggtcgaggtctcgcccccctacgacgtgagcggtaatacctcccagctggcggccaacctgctgtacgagatgctctgcgtcctgcccggcgtgaagtacgcctga

SEQ ID NO: 138144 - DNA, 864 bp, Enterobacter cloacae
atggagctgaaatgctttcgcaccctctggggagtgacgaccccctggccgcaaacgctggatgaactgcagcgcgtcggctgctgcggtatcgaagcccgcgtgccgttaacggtggccgagcggcggcagctcgccgaccgcctgcaggcgtcggggctggagtatatcgccattcttttcagcggcggcggggtgctccccgcccagcatgaaacgcccgagcagcatctggcgcgcctgcagtcccgcttcgccgaggccagcggcctcaacccgcgctttgtcaatctgctggcgggcaacgatcgctggccgctggcgcagcaagtcgattttctcggcaaggcgcacgagctggccgccgggtttggtttgacctgcagctttgaaacccatcgcgccacctcgctgtacagcccgtggctcaccctggagatcattcagcagctcccccagctgcgctttaccgccgacatcagccactgggtggtggtcagtgagcgcctgctggatgaccccagcgatgacttcagcgcctttatcgaccgcgtgcatcacgtgcaggcccgggtgggctacgaccaggggccgcaggtgccgcacccggcggcgcctgagtatcagccggcgctggcctttgccgagcgcttctggcagcaaatctggcgttcgcagcgccagcgcggctacccgcagaccacgctgaccccggagtttggcgccgacggctatctgcaccatctgccgttcaccaacgttccggtggccgatctctggtcgctcaacgcctggatggccgcgcgccagcaggcccactttcagcagtttttatcgctcactgaacaggaaccgcagccatga

SEQ ID NO: 138145 - DNA, 1068 bp, Enterobacter cloacae
atgaccgccgtgaagcacgcttttactgaactcccgaccatcgatatccgcgatctggccggcgatgacctcgccaggcgtcaggcggtggccgacgccatcggccgcgcggcgcgcgaggtgggctttttctacatcaccggccacggcatcgacccggcgctgatcgccggcgtccgcgaggcggcgaagcagatcttcgccctgccgatggaggagaagatgaactattacatcggccactccaaaagccataagggctacgttccggaaggagaagagatctacggctccggcaagccggaccataaagaggctttcgatatcggcttccaggcagcggatgaccatccgctggtgctcgccggtacgccgctgatcggcgccaacgagtggcccgatctgccggatttccgcacgcgggtgctggcctactacgacgcggttttcgctctcggccaccgtctgttcgacgctttcgccctcgcgctcggcctgccggaagggtatttcaaaccgatggtgacctgcccgccggctaagctgcggctgatccattacccgttcgacgccagcgtcgaagatgttcccggaattggtgcacacaccgactatgagtgcttcaccctgctgctcgccgaccagcccggccttgaagttctcaatgaagaaagcgtgtggatcgatgcacctcccgtcaagaacgccgccggagaagaggcgttcgtgatcaatatcggcgacatgctggaagtgctcagcgctggcacatttgttgctacagcccaccgggtgcgcaaagtgccgcaggagcggtactccttcccgctgtttttcgcctgcgattaccacacgctgatccgtccgctgccgacctttctcgccgccggcgaagccggtgaatatcaggagctcagcatcggggagcatatgtggagccaggccctgcaaacctatcgctacctgcgcgaaaaggtcaatcgcggtgaacttcagctaccggagcgcgcgcgcggcaccaatacgtttggccatttgaaaaaacaggctcagcaaaaaaacccctaa

SEQ ID NO: 138146 - DNA, 804 bp, Enterobacter cloacae
atgactagcaccctgaaaaaaatctcgcgccatgtcgcgcttaccctcgccgtcagcgcctgtttttcccctgtcacccaggcggcggaactgctgaccgagggcgtctttaaggtggggatggaggtcacctacccgccgtttgagtcctatgacagcaataacaatatcgtcggtctcgacccggagtttgccgcgctgatcgcccaacatctgcaggccaaaccgcagctgatcgacaccaagttcaccagcctgatcctcggcatcggcaagaaatatgacgcggtgatctccgggatgtacgtgacgccggagcgccagaaacaggccgacgccatcccttacgccctctccggcgcgtcgatcatcgccctgaagggcggcgcggtgcagccgaaaaccgaagatgagctgtgcggcgtgaaggtcggtctgcaggcgggcaccacctgggtgaccagcctgaaaaaacactccgatgagtggtgcctgaaaaacggcaaaccggccatcaccattcaggagttcccgacggcgccggaagcctcccaggcgctgctgtcgaagaacatcggcgcccagcttgagattgccccggcggcgcagatcattgtcgacaagagccgcggccgcctggcgataagctctacgcgcctggtctacccgctgccgctggggatctacgtcgccaaaggcaacaccgagctggcgaaggcgatcaaggccaccctggccacgctgaaagccaacggccaatatgccgcgctgatcaaaaaatacaacttagaaagcatcgattaa

SEQ ID NO: 138147 - DNA, 1521 bp, Enterobacter cloacae
atggcgttcgattggggatactttttttcattgtttagcattggagcattctggcaggcgtgcgtgaccgtcatcgtaatcagcaccttgtcctgggggatcggcctggtggtcggttttctgttagcctgcgcgaagctctcggcgccgcgctgggtcaagatccccgtcgaactctatatctggttttttcgcagcgtgccgctgatggtgctgctggtgtttgtctacaacctgccgcagctgtttccggtgacccagccgctgctcggggtgccgtttatcgccgggctggtgtcgatgaccgtcaccgaggcggcctatatggcggagatccaccgcggcgggctactgtcggtggccaaggggcagagcgaggcgggccatgcgctgagcttcagctttatcggcatccagcggctgattgtgatccctcaggcgtttcgcatctcgctaccgacgctgatcaatgaatacatcaccatcattaagctgagctcgattctgtcggtggtctccttacccgagctgctgctcaccggccagcgcttgtatgcgcagaatttccttgtgatggagaccctgctggcggtagcggtgtactacgtgatggtggttaccgtcttcacctggctgttccgggcgctggaaaatcgtctcgatattcagcgtaagcgtccgcaaaccctcagcgaggcggaatgccaggcgctgcgccagagcctgccggcgctgagcgaagagagcaacaccccggccgtcaacggcgcgccgccggcgctcgatctgcggggcattcgcaaatcctgggggcagcatgaggtgctgaaaggcatcgatctgcaggtggagaacggggaggtgatcagcatcatcggcccgtccggctccggcaaaaccaccctgatccgcaccatcaacgccctcgaaagccttgatggcggggagatcattctctacggcgaggactatcttaagggcggagctatcgtcgacaaacgccagatgcgcgccggggtacggcgcatcggcatggtcttccagagcttcaacctgttcccccaccgcacggtgctcgacaacgtgatgctggccccgcgctatcaccagctgctggaccagccggtcgcccgcgagcaggccctggcgctgctcgaccgcgtcggcctgctggcccatgcccacaagtaccccggacagctctccggcggccagcagcagcgcgtggcgatcgcccgggcgctggcgctgaagccggacattatgctgtttgacgaaccgacctcggcgctggatcccgagctggtaggcgaagtgctgaaggtcattcagtcgctggcccgcgaaggcatgaccatgctgattgtcactcacgagatggacttcgccctgtcgatttccgaccgcgtggtgctgatggagaacggcgtggtgcaggccgatatcgccccgcaggtgatccgcagcccgctggaggcgccttctctgcaacgaatccgtgaatttatgggagtacgctaa

SEQ ID NO: 138148 - DNA, 729 bp, Enterobacter cloacae
atggcaactgagcaacacctgcgccagcagctggccgccgcctaccggctggcggcgctgttcggctgggaggataccctctacactcacttctccgtgcgcctgcccggcgacggcgagccgcgttttttaattaatcccttcggcatgatgtttgacgaagtcaccgccagcaacctgatcgtagtggatatgcagggcaaggtcgtagcgggcgacgcgccggctaactcggcgggctttaccatccatagcgcggtgcatatggcccgggaagacgcccactgcgtgatccacacccatacgctgccgggaatggcggtggccgcctgcgaggatggcctgctgcagctcaaccagatcagcaccgagttttaccagcgcgtcggctaccatccctatgaaggggtggcctttgacctcgacgaacgggcgcgcatccagcgctcgctggggaataatatcgccatgatcctgcagagccacggcctgctgtcggtgggccgcaccgtggctgacgcgttttacatcatgtactacctgaaccgcgcctgcgaaatccagatggccgccgcccagctggcggccctcagcccgatccacaccatcgccccgcacctcagccagcacgcctgcgagcagctgatgggcgtggagcatgaacgtcaacaggtctggcaggcgtggctgcgccgtcttgaccgtctcgatacctcttacaaagactaa

SEQ ID NO: 138149 - DNA, 933 bp, Enterobacter cloacae
atgtctgatatcactatcgtggtggattgtaacgacgcggatttcgcccgcgatatttgcgccgccctgcagcagtttcccgacgtcacggcgcttctgccccatcaccaggcggcgcgcgacgcccagtacgccagctgctggttcccggacccgcagctgttgacccgttcgccggggctgaagctgatccaggccgcgtccgccggggtcgatcatctgccgcccgcgctgttcgccagcgagatcccgctgtgccgggtgatcgatgaagattttcgccacggcatgttcgaatatgccctgtggagcgtcctgtggtttcagcgccatttcgaccgggcgctggcccaccagcggacccaaacctggaagctctatccccagcgcgccgccgccgacttccatatcggcattatggggctcggcgaaattggcggctatatcgccgaccagctggcccgcctcggctatcgggtctccggctggtcgcgcagtgaaaagcagttggctggcgtcacctgctatcgcggcgaggaggcgctcgacagcttcctcgggtcgcttgacgggctgattaacctcctgccgctcaccgcgcagacccgaggtatcctcgccgcgccgctgttcaaccggctacccgccggggcggtgttgatcaattgcggccgcggggagcatatggtcaatgaggatgtgctggcggcgctggagagcggccagctcgccggggcggtgctcgacgtcttcccgcaggagccattgccggcggacgatccgctgtggcgccatccgcaggtggtcatcaccccacatatggcctctgcggcctctgccgaggtgatcgcccgccagctgctggagaacattcagcgccagcgccgcgggctgccgctgaaaaacctggtcaataagcacgccggttactga

SEQ ID NO: 138150 - DNA, 795 bp, Enterobacter cloacae
atgaagattgatttagcgggaaaagtcgcgctggtcaccgcctccacggcgggtattggcttcgccatcgccaaaggcctggcggagagcggcgcagaggtcatccttaacgggcgcagcgagcagagcgtgaacgccgcgatcgcccggctgcaaaatgaggtgccgggcgcgaaggcgcgccccgccatcgccgacctcagcgacgccgacggcgcagcgcagctgctgcgggccgtgaccggcgtcgatattctggtcaataacgccgggatctatggcccgcaggatttctacgccaccgacgacgcgacctgggacaactactggcagaccaacgtcatgtccggcgtgcgcttgtcgcgagggctgctcccggcgatggtcaacaaaggctgggggcgggtggtgtttatctcctcggaatcggcgcgcaatatcccggcggacatgatccactatggcgtcaccaagaccgcgcagctctcgctggcccgcggcctggcgaaatatgtcgccggcagcggagtgaccgttaacagcgttctgccagggccaacaatttccgacggctttgccgaaatgctgaaagacgaagtggcgaaaaccggtcagtcgctggaggaactggcgaaagcgtttgtcatgacccatcgtccgagctcggtgatccagcgggcggcctcggtggcagaggtcgccaatatggtggtctacgtctgctcgccgcaggcgtcagccacctccggcgccgcgctgcgcgtcgatggcggcgtggtggatgatattctctga

SEQ ID NO: 138151 - DNA, 621 bp, Enterobacter cloacae
atgtctctgttacgaagcttgcttttctttttaggcgcggcggtcgcggccgccctcgcggtactctgcctgtgggtggatattcgggtgtttggcaacgacatcccggaggtgtcgctcaccgaagtggtccaggagagcgtgctggccgttatcgtgctggttcatctgctgctggcgcggaaatatgcccacttgcgctatagcaatatcctcatcggcggcttctttctcgccatgctgatccgcgaactggatggcctgtttgatttactctcccacggcagctgggtgtggtttgccctgctggccaccgcggggtcgctggtgttgccgttgcgccatctgcgtcagaccctgtcgcagctggcggagtatacccgcaccccatattacgggatgatgattagcggcctgctggcgattctggtcttctcgcggctgtttggcatgcacggcctgtggtacgccgtgctggaagagaactacgcccgggtggtgaaaaatacggtggaggaaggcagcgagtcgtttggctatatgctgtgcctgaccgccaccctcggctacgcctgctacttccgcggcctggcgcgacaggcgctgtcgccgcagcgctaa

SEQ ID NO: 138152 - DNA, 891 bp, Enterobacter cloacae
ttgccccacgtcgggttgtatgtcccggtgtttaaaaataggatgaatgccctggctcgcgcggcggatactgtgactgatgcggccggtcactctggcatgaaaaacgataactttaaggatggcgaaatgagactgacggtggggctggcgctgacgctggcgataatgacctgcggcgcccaggcgcgcgatatgcaatccatcgagcacagcggtgaactgaaggtgggcgtgccgggcgattacgcgccgctggcgtttcgcaatgccgccggcgaactgcagggctatgacgtggacatggcccgcgatctcgggcgcacgctcggactcaaggtgagcttcgtctacaccagctggcccgcgctcgccgccgatctgcaggcggacaagtttgatattgcgatgggtggggttaccgagaccccggcgcgggcgcaagccttcgccctcagccatccggtggtggcgaacggaaaaatcgccttagccaactgccaggccgccccgcggctcggttcgctggaaaaaattgaccgtccggacgtgaaagtgatcgtcaaccctggcggcacaaaccagagttttgtcgatgaacacatcaagcaggcgcaaattattcgcgtgcagaacaatgtcgataacctgcaggcgctgcggcagaaaacggccgatatgatggtgaccgatctgattgaaggcgactattaccagagcaaagagcccggcgtgttctgcgttgctaacgaaacaccgttcgccggtaccgccagcaacaaggtgtatatgatgagtaaagataacccggcgctgctggagaaagtgaatcagtggctggatagccaggacaaagaggttctcaaacggaagtggaaaattcgcggttaa

SEQ ID NO: 138153 - DNA, 1194 bp, Enterobacter cloacae
atgaacaaaaacagagggttaacgcctctggcggtcgttctgatgctctcaggcagcttagcgctaacaggatgtgacgataaaccggctcaacagggagcccagcacatgccggaagtcggtattgtgacgctcaaatccgcacctctacaaataaccaccgaactgccaggccgcaccagcgcctatcgcattgcggaagtccgtcctcaggtcagtggcattattttaaaacgtaacttcgtggaaggtagcgatatccaggccggcgtctccctgtatcagatcgatccagccacctatcaggccagctatgacagcgccaaaggcgacctggcaaaagcccaggcggcggcaaacatggatcaactgacggtcaagcgttatcagaaactgttgggcaccaaatatattagtcaacaagactacgataccgccgttgcgacggcgcagcagagcaatgcggccgtggtcgcggcgaaagcggccgttgaaaccgcgcgcatcaatctggcctacaccaaagtgacctcgccgatcagcggccggatcggtaaatccgccgtgaccgaaggggcgctggtacagaatggtcaaacgaccgctctggcaaccgttcagcagctggatccaatctatgttgacgtcacccagtcgagcaatgatttcctgcgcctgaagcaggagctagccgacggccgcctgaaacaggaaaacggcaaagcgaaagtggagctggtgactaatgacgggcttaagtatccgcagtccggcacgctggaattctcggatgtcaccgtcgatcagaccaccggctcaatcacgctacgcgctattttcccgaacccggatcacaccctgttaccggggatgttcgtccgtgcccgtctggaagaagggattaaccctgacgccctgctggtaccgcaacagggtgttacccgtacgccgcgcggcgacgccagcgtcatggtagtgggtgaaggcgataaagtcgaagtccgccaggtcactgcttctcaggcgatcggcgataaatggctggtcactgacggtctgaaatccggcgatcgcgttatcgtcaccggcctgcaaaaaatcaaaccaggtgtgcaggtaaaagcgcaggaagtagcttctgatgataaacagcaagccgcaggcaacgcgccatcagaacaaaccaagtcttaa

SEQ ID NO: 138154 - DNA, 651 bp, Enterobacter cloacae
atggcacgaaaaaccaaacaacaggcacgtgaaacccggcaactgattctggatgttgctctgcgtctgttttcgcagcaaggcgtatcatctacctcgttggcaacaattgcaaaagctgcgggtgtaacgaggggggctatctactggcatttcaagaataaatcagatttattcaacgaaatttgggagctgtcagacgccagtattagcgatctcgaaattgagtatcgggcaaaattccccaacgatccactctcagttatcagggagattctagtctatgttcttgaagcgacagtgacagaagaacgtcgacgattaatgatggagattatctatcataagtgtgagttcgtcggtgaaatgaccgtggtgcagcaggcccagcggcagctctccctggcgagttatgagcgtatcgagcagaccttgaaagagtgcatcgcggcgaagctgctgcccgccaatttactcacccggcgggcggccgtgttaatgcgcagctacctttccgggctgatggaaaactggctgtttgcccccgattcgttcgacctgcatgcggaagcgcgggactacgtcgctattctgctggagatgtatcaattctgcccgacgctacgcggcccggagagcttgtcagcttaa

SEQ ID NO: 138155 - DNA, 3240 bp, Enterobacter cloacae
atgctgcacacgatctccaggcaacgcgccacgttcatctttattatcacgctgctctgttttattggccttttcagcccagtccagggccgcgccgcggatctccccgatcgggcagaggtgcagagccagctcaatacgttaaacaagcaaaaagaactgactccgcaggacaaactggtccagcaggatctgactcagacgctggaaacgctggataaaatcgagcgtatcaaaagcgagacggcacagctgcgacagcaggtcgagcaggcgccggcgaagctgcgccaggcggtggagagcctcaataacctgagcgatgtcccgaacgacgacgcgacgcgcaaaacgctaagtacgctctccctgcgtcagctggagtcgcgcgtcacccagacgctggacgatctgcagaatgcgcaaaacgatctggcgacctataacagccaactggtttccctgcaaacgcagccggaacgcgtgcaaaatgcgatgttcaacgcctcccagcagctgcagcagatccgcaatcgtctgaatggcacctcggtgggcgacgagaccctgcagaagcagcgtgactacgtcaccgcctggagcaaccggctggagcatcagctacagctgctgcaggaggccgtgaacagcaaacggctgaccctgaccgagaaaaccgcccaggaggcggttacccccgacgaaacggcgcgtattcaggccaacccgctggtcaagcaggagctggatattaaccatcagctcagcgagaagctgatccaggcaacagagaacggtaaccagctggtgcagcgcaatatccaggtcaagaactggctcgaccgcgcgctgcagtctgaacgggatattaaagagcaaatttcagttctgcgggggagcctgctgctgtcgcgtattctttaccaacagcaacagacattaccgtcggcggatgagctgcaggatatgaccaaccgcatcgccgacctgcggcttgaacagtttgaggtgaaccagcagcgcgacgcgctgttccagagcgatgcctttgtcgccaaactggaggaggggcacagcagcgaagtgaacgatgaagtccacgccgcgctactggaagtgatcgacatgcgtcgcgaactgcttgatcagttcaacaaacagttgggtaaccagctgatgatggccatcaacctgcagatcaaccagcagcagctgatgagcgtctcgagcagtctgaaggaaattctgacccagcaaattttctgggtgaacagcaataaaccgatggactgggagtggattaaggccttcccggaggcgctgaaaggtcagtttaaggcgatgaaaatcaccgtgaactgggaaaaagcgtggcctgcggtgtttgtcgctttcctggccggtttaccgctgctgttgattgccggcctcatccgctggcgtctgcagtggctcaaggattatcaggcaaagcttgcttcccaggtgggacagctgcgcaacgatacccaactgcatacgccgaaggcgatcctgatcgatctgatccgcgccttaccggtggtgctgttgattctggctatcggtctgatcttactcaccatgcagttaaatattagcggactgctgtgggcgtacagtaaaaagctggctatgttctggctggtgtttggcctgtgctggaaagtgctggaaaagaacggcgtcgcggtcaaccactttaatatgccggcgcagttgaccagccactggcggcggcagattgttcgcgtcagcctggcgctgctgccgctgaatttctggtcggtgatttccgaactgtcgccgctgaacctgatggacgacgtgctggggcagttggtgattttcttcaacttactgctgatcgcggtgctggtttggccgatgtgccgggaaagctggcgcgataaagagtcgcacagcctgcgcctgctgacgatcacggtgttgtctatcgttccggtggccctgatggtgctgacggcaaccggctatttctacacgacgctgcgtctggcgggacgctggatcgagaccgtgtatctggtgatgatctggaacctgctgtaccagaccgtgctgcgcggcctgagcgtggcggcgcggcgtatcgcctggcgccgcgcgctggcgcgccgtcaacatctggtgaaggaaggggcggaaggcgccgagccgcaggaagagccaactatcgctctcgagcaggtcaaccagcagacgctgcgcatcaccatgttggtgatggtcgcgctgttcgcggtgatgttctgggcgatttggtctgatttgatcaccgttttcgcctacctcgacagcattaccctctggcactacaacggtaccgaggcgggggccagcgtggtacgcagcgtgacgatgggcagtttgttgttcgccattgtggcgtcaatggtcgcctgggcgctgatccgcaacctgccgggtttgctggaggtgctggtgctgtcgcggctcaacatgcgtcaggggacctcctacgccatcaccaccattctcaactatgcgattatcgctatcggggcgatgacggtattcggggcgctgggcgtctcctgggataaactgcaatggctggcggccgcgctgtcggttggtttaggttttggtctgcaggagatcttcggtaactttgtctccggcctaatcattctgttcgaacgtccggtgcgcattggggatacggtcactatcggaaccttctcggggacggtaagcaaaatccgtattcgcgccaccaccatcaccgacttcgatcgcaaagaggtgattatcccgaacaaggcgttcgttaccgagcgcttgatcaactggtcgctctccgacaccgtgacccgggtggtgatccgcctcggcgtcgcctatggctcagacctggataaggtgaaagaggtgctgctgaaggccgcgcacgatcatccgaaagtgatgcaggagccagcgccagcggttttcttcaccacctttggggccagtaccctggatcatgaactgcgtctgtatgttcgtgaactgcgcgatcgcagctacacggtggatgagctcaaccgcgccatcgaccgcctgtgccgggagaatgacatcaacattgcctttaaccagctggaagttcatctgcgcaatgaaaaaggcgatgaagtcaccgaagtgaaacgggacgggaaaggcgacgatctggcgcccaccaccgcgtcctga

SEQ ID NO: 138156 - DNA, 900 bp, Enterobacter cloacae
atggaaaaagtcagtcaaaccccacacgacgcggtgtttcgccagatgctcatgcatcaggcggtcgcgaaggattttttgcagttgtacctccccgcgccgtttctggcgatctgcgaactggattcgctgcagctggtctccggtagctttgttgaagaggacctgcgcgccagctattccgatatcctttactcactgcgcacgcgtcatggagcgggctatgtgtacgcgctgattgagcaccagagtaccccggataagctgatggcgtttcgcctgctgcgctatgcgctggccgccatgcagcgtcatctggacgccggccacgacacgctgccgctggtggtgccgattctgttttatcacggcaaagtgagcccctggccctgggcccgcaactggcaacagctattcgccgatccggcgctggcgaaggcgctctatagcaatgattttccgctggtggacctcaccgtaatgccagataatcagatcgcccgtcatcggcggatggccatgctggagctgctgcaaaagcatatccgccatcgcgatctggccgagctgcaggtgccgctgattgcgctgatgacgcaaggctatctgacagaagcgcagctgaatacgctgctgcgctatatgttgcaggcgggaactacggaacatccgggggcgctgatccgcacgctggcggcgcagtcgcccaggcataaggagctgatgatgaccattgccgaatggctggaagagaaaggccgtaaacagggacagcaagagggtgagcaggaagctacccgcagcatcgccgccagaatgctggcgcgcggcctcgaacgtcaaaccgtgcaggagctcaccgggctgagcgatgaagaactcgccgcgctggcgccctga

SEQ ID NO: 138157 - DNA, 174 bp, Enterobacter cloacae
atgtcgctggaaaatgcatccgatgaggtcaaactggccgtcgatttaatcatgttgctggaatcgcatcaaatcccggcgcaaaccgtgctgagcgcgctggaaattgtccggcgggattatgcaaacaagttaaaaaacgcggaaagcgggtcgcaaaacccagagaagtag

SEQ ID NO: 138158 - DNA, 528 bp, Enterobacter cloacae
gtgaaaactgctcaacttttacaaacgctgaacgaccagctgagtgagctggccgcgctggtggcgccgctggcggagcacgcgaccctcagcccgcgctttgaccggcagctcttccacacccgcagcacgctgatgcaggcctatctggcggaagcccaacacaactttaaccagctccgccaggccgtcgagcgccagcagctgccgcaggtggtctggattgccgagcgtctggcggcacaaatcgccgcgctgcgccgtgaaaccgccacctggtccttgcgcagttgggaccacgcgtcgccaacgttgagccgctggcagcgccgtcgcctgcagcatcaggagtatgagcgccgcctgctggcgatgcgcgaccaacgccagcgtcagctggcgcaggcgaccagccttgacgagcagcagcggctggggaaagaagttgaagcctacagcggccggttggcgcgctgccgacaggcgctggacaagattgaaaacgtactggcgcggctgacgcgctaa

SEQ ID NO: 138159 - DNA, 378 bp, Enterobacter cloacae
atgccacctgttattttaaccattatcggctggctggcggtagcgctgggtacgctgggcgtcttcttaccgttgctgccgacgacgccgtttattctgctcgccgcctggtgctttgcccgctcatcgccgcgctttcaccagtggctgctgtatcgctcctggtttggcggctatcttcgccactggcaacagtaccgcgccatgcctcgcggcgctaaaccgcgcgccattgcgatgatcgtggtgacttttgctatttcgctatggctggttaagcttacgtgggtgcgcatcatgctgttggtcattctggcctgtctgctgatctttatgtggcgcattccggtggttgacgcaaagcaacaaaagcactga

SEQ ID NO: 138160 - DNA, 552 bp, Enterobacter cloacae
atgaccgcaactgcacagcagcttgaatatctgaagaacagcatccagagtatcgaggattatccaaaacctggcattcttttccgcgatgtcaccagcttactggaagacccgaaggcctacgcgcttagcattgaactgctgaccgagcgctacaaagacgcgggtattaccaaagtggtagggactgaggcgcgtggcttcctgttcggcgcaccggtcgcgctggcgctgggcgtgggctttgttccggtacgcaagccgcgtaagttgccgcgtgaaaccattgccgagacctatgagctggagtatggcaccgatcagctggagatccacgttgacgccattaaaccgggcgataaagtgctggtggttgacgatctgctggcgaccggcggcactatcgacgccacggtcaaactgatccgccgcctcggtggcgaagtgcacgatgccgctttcattatcaatctcttcgatctgggcggcgaacagcgcctggagaagctggggatccactgctactgtctggtgccgttcccgggccactaa

SEQ ID NO: 138161 - DNA, 204 bp, Enterobacter cloacae
atggacttcgtcgatgagatagaccttaaagcggccgcgggccggcgcgtactggacgttgtccagcagatcgcgggtatcttcgactttggttcgcgaggcggcgtcaatctcaatcagatcgacaaagcgcccctgttcaatttcccggcagttatcgcacacgccgcagggggtggcggtgatgccggtttcacagtttaa

SEQ ID NO: 138162 - DNA, 429 bp, Enterobacter cloacae
atgaaacgccagggcacgcagcagcgtcatttcgacgcccatccgccggtccggggcgtaaggcagctctttgcggccaatcagcagcgtttggtagtagagctgaacgtcgccgggcggtacggttcgcgccagttcgcgcatccgcacttcgaccgcggccatgtcggcgcccagcgccgaaggcgacagctgaaccatggcgatgcggtgcagcaggctctgcatctcgaccagcagcgcctcccactcgacgccgcgtgcggcggcgtcattgacgcccgccatgacccgctcgccgtcggcagcaaccagcgcttcaatcagcgacagcgcctgatcgtcatcaagggtgccgagcatggtgctcaccgatgcggccgtcagctgcccttccccactggcaatcgcctgatcggtcaggcttaa

SEQ ID NO: 138163 - DNA, 1560 bp, Enterobacter cloacae
atggaattgttaatggatccctcaatctgggccggcctgttgacgcttatcgttctggaaattgtgctcggtatcgacaacctggtgtttattgccatcctggcggacaaactgccgccgaagcagcgcgataaagcgcgtctgatcggcctgtcactggcgctggtgatgcgcctggggctgctgtcggtcatctcctggatggtgacgctgacgaaaccactgattaccatcgccgatttctccttttccgggcgcgatctcatcatgctgctcggcgggatcttcttgttgtttaaggcgacaaccgagctgcatgaacggctggaaaaccgccagcacgatgccggtcacggtaaaggctatgccagtttctgggtagtagtattgcagatagtggtgctggatgccgtcttctccctggacgccgtgatcacggcggtcgggatggttaaccatctgccggtgatgatggcggcggtggtgatcgcgatgatcttgatgctgctggcctccaagccgttgacgcgctttgtcaaccagcacccgacggtggtcgtgctctgtctgagcttcctgttgatgattggccttagcctggtggcggaagggtttggcttccatattccaaaagggtatctgtacgcggcgatcggtttctcgatcattatcgagttctttaaccaggtggcgcgccgtaactttgttcgccaccagtcgacgctgccgctgcgcgctcggaccgcggatgccatcctgcgcctgatgggcggccgcaaacaggcctccgtcagccatgacgcagacagtccagccgcggtgcccgttcctgagggcgcctttgcggaagaagagcgctacatgattaacggcgtgctgaccctggcccagcgctccctgcgcagcatcatgaccccgcgcggagaaatcagctgggtcgacgctgagcagagtgaagatgaaattcgtcgtcagctgctgtcgtcgccgcacagcctcttcccggtctgccgcggagagctggatgaaatcattggtatcgtgcgggcgaaagagatgctggtggccctggagtcgggggaaaacgtcgcggcgctggcttctgcctccccggcaattgtcgttccggaaacgctggacccgatcaatctgctcggggtcctgcgtcgggcgcgcggcagcttcgtcatcgtaactaatgaatttggcgtggtgcaggggctggtcacgccgctggacgtccttgaagccatcgccggtgaattcccggacgctgatgagacgccagagattgtcatcgatggcgatggctggcttattaaggggtcgaccgacctgcatgcgctgcagcaggcgctggggctggatccactgatcaatgacgatgaggatattgccaccgttgccgggctggtgatctccgccaatggtcatatcccgcgcattggcgacgtcgtgtcgcttccgccgctgcattttaccgtagtggaagcgaatgattaccgggtcgatctggtgcgcgcggtggtcactcgtccgccgagcgacgaagaagagtaa

SEQ ID NO: 138164 - DNA, 1590 bp, Enterobacter cloacae
atgcagactgcacaaaaagtcattacggcctatcgtcacaaacgcattattgtctgcctgctggtagccctggcgaccctgggcgccacattagccatccgatttatttcgcagcgcagcgtaaatgaagattatattcgcacggccgccagccaacgggtggcggcgctcaatgacatcttgcgcccgctaagcgcgcagcgagccaccctgctccctctggtgggcaaaccctgccctgatatccatctgacgctgcgcaaaatggcggcctcgttgcaaaccattcgttccgtcgccctcgtcacgtcaggtatcgtttactgttccagtatttttggcccgcgacaggcagacttacatcgcctgcagcccgcgcttcctgcgccccgccctctgctgctcttctcgaacgacagctccttgctcaaaggctcgccggtactgatccaatggtatccagccgcggagagcggcctggacggcgtgatgctggtggtgaatattgagctgctgggaaccttaattcttaatgaaaaatcggccctgatcagcgacgtcagcctgcaggttggcgatcgttattttagcagccgccatgggcttctcgaaaaagcgcatgtcccgcagggcacggtgatttatcgccagcgctctacggagtttccgtttactgtcaatattaacggccctggcgcctcggcgattgcgcttgaggagctgcccggcgagctgccgctggcgctgatttttagcctgctaatgaccggcatcgcctggctggccaccgccggcagaatgagtttctcgcgggaaataagccttggcatttcggcccgggagtttgccctctggtgccagccgctgcaggatgcgcgcagcggccgctgctgcggggtggagatcctgctgcgctggaataatccccgccgtgggacgatttcgccggaggtatttatccccatcgccgaaggcaataatctgattatccctctcacccgctatgtgattgccgaaaccgctcgccgcctggacgcttttcctcgcgaccgccattttcacatcgcgattaatgtcgccgcgcgccatttcgctaacggactcctgctgcgcgacctgcacaattactggttcagcgtggatccggtgcagcagctggtggtcgagctaaccgaacgcgatgtcctgcaggatggcgaccagcatatggccgaacatctgcactttaagggcgtacagctggcgatcgatgattttggtaccggcaatacttcgctctcatggctggaaaagctgcgcccggatgttttgaagatcgatcgctcgttcaccagctcggtcggcatagatagcgtgaacgcgacggtgacagatattattatcgccctcgccaaccgcctgcatattgttaccgttgccgaaggggtggagacgctggagcaggaaaactacctgcgtagccacggcgtcgatgtgctgcaggggttttattatgcgcggccgattccggtggaggcgttcccggcgtggctggccagcagggaggagagtgagagtgagagtgagggtgagagcgagacgacagaataa

SEQ ID NO: 138165 - DNA, 1365 bp, Enterobacter cloacae
gtgattagtctattcgacatgttcaaggtggggattggtccctcatcttcccacactgttggcccgatgaaggccggaaaacagttcgtcgatgacctggtcgaaaaaggattgcttaatgcagtgactcgtgtggcggttgacgtctacggttcactgtcattaaccggcaaaggccaccatacggacatcgccattatcatgggactggcgggcaatcagcccgatacggtcgatattgacgcgatcccggcttttatccgtgacgtcgaagcgcgcggtcgtctgctgctggccaacggccagcacgaggtcgacttcccggcggatgacggcatgcgttttcgcagcgacaacctgccgctgcacgaaaacggcatgaccattcacgcctgggccggcgagaaagagatctactgcaagacctactactctatcggcggcggctttattgtcgacgaagagcacttcggcaaggaaaacgccaacgaactgcaggtgccctacccatttaaatcggcgcaggaaatgctggcctactgcaaagagactggcctgtcgctctccgggatggtgatgcagaacgaactggctctgcacagcaaaaaagagatcgaggattatttcgccaacgtctggcagaccatgcgcgcctgtatcgaccgcgggatgaacaccgagggcgtgctgcctggcccgctgcgcgtaccgcgtcgcgcctcggcgctgcgtcgtctgctggtggccagcgataagctctccagcgatccaatgaacgttgttgactgggtcaatatgttcgcgctggcggtcaatgaagagaacgccgccggcggtcgcgtggtaaccgcgccgaccaacggcgcctgcggcatcgttccggcggtactcgcctattacgatcactttatcgagtccgtcagcccggagatctatattcgctactttatggcctgtggggcgatcggcgcgctgtataagatgaatgcgtccatttccggcgcggaagtcggctgtcagggcgaggtgggcgtcgcctgctcgatggcggcggcgggcctggctgaactgctcggcgccagcccggaacaggtttgcgtggcggcggagatcggcatggaacacaacctcggcctgacctgtgatccggtcgccggccaggtgcaggtgccatgcattgaacgtaacgccatcgcttccgtcaaggcgatcaacgccgcgcgaatggcgatgcgccgcaccagcgaaccgcgcgtctcgctcgataaggtgatcgagaccatgtatgaaaccggtaaagacatgaacgccaagtaccgcgaaacctcgcgcggcggcctggcgattaaagttcagtgtgactaa

SEQ ID NO: 138166 - DNA, 579 bp, Enterobacter cloacae
atggcggatcgcgcccttaatctggatgattttctgtcccgctttcagcttctgcgcccgcagccttcgcgccatgcgctcaatcagcggcaggcggcggtgctggtgccgatcgtgcgccggccgcagcccggcctgctgctgacccagcgttcgccgctgctgcgcaagcacgccggccaggtcgcctttcccggcggcgcagtagataataccgacgcgacgcttatcgccgccgccctgcgcgaagctcaggaagaggtggcgatcccgccggaggcggtcgaggtgatcggcgtcctgccgccggtggacagtgtcaccggctttcaggtgacgccggtggtgggcattattcccccggatctgcactatcacgccagccaggacgaagtctccgcggtatttgaaatgccgctcgccgaagccctgcgccttgggcgctaccatccgctcgatatccaccgccggggcaacgaccaccgcgtctggctctcctggtaccagcattattttgtctggggaatgaccgccgggatcattcgcgagctggcgctgcaaattggcgcacgtccttag

SEQ ID NO: 138167 - DNA, 1356 bp, Enterobacter cloacae
atgttgtcccccgcgattattaccctgccctggcgcccggatgcggccgaacactattttgcgccgttaagcgccctgccctgggcgatgctgctgcattccggctttgccgaccatccgcataaccgctttgatattctggtggctgccccgcgcgccacgctgctgacgcgcggtgaacagacgtgggtcgacgacggcgaaaccgttgttgtctcagcggaagatccgctgcagctcctgcagcagcagttggatcgtcagccgttcacgccgcaaccccatgacgatctgccgtttctcggcggcgcgctgggattattcggttacgacctgggccgtcgctttgagcgtctcccttcgcacgcgcaggccgatatcgcgctggcggatatggcggtggggatctatgactgggcgcttatcgtcgaccaccagcgccaacagatatcgctgctcagctatgacgacccgcagcagcgtctacagtggctggaggcgcaaacgccgacgccgggtgaaaccttcgccctgacctctgcctggcagtcaaatatgagccgccagcagtacggcgaaaaatttcgccaggtacaggcctatctgcacagcggcgactgctatcaggtcaacctcgcccagcgttttcaggccagctacgtcggtgatgaatggcaggccttccgccagctgaacgccgtcaaccgcgccccctttagcgcctttattcgcctcgatgaaggggcgattttaagcctgtcgccggagcgctttatccagctgcgccagggggagatccagacgcggccgataaaaggcaccctgccgcggctcgattcgccgctggcagatgcgcagcaggctgagaagctggcgaattcgccgaaagatcgcgccgagaatttaatgattgtcgacctgatgcgcaacgacatcggccgcgtcgccgtcccgggcagcgtgcgggtccccgagctgttcgtggtggagccgttcccggcggtccatcatctggtcagtaccattaccgcccgcctgccaatgacgctgcacgccagcgacctgctgcgcgccgcctttcccggcggctcgatcaccggcgcgccgaaagtgcgggcgatggagattatcgatgaactggagccccagcgtcgcaacgcctggtgtgggagcattggctacctgagctattgcggcaatatggataccagcatcaccattcgcaccctgacggcatggcagggacagctgtactgctccgccggcggcggaattgtagcggatagcgaggaagcggccgaatatcaggaaacttttgataaagttaatcgtatcctgcagcaactggagaactag

SEQ ID NO: 138168 - DNA, 186 bp, Enterobacter cloacae
atgtttgcaggtttaccttcgctgagccacgagcaacagcaaaaagcggtcgaacgtatccatgagctaatggctcaggggataagcagcggccaggcgattgccctggtggcggaagagctgcgcgcaacgcataccggcgagcagatcgtcgcgcgctttgaagatgaggatgaggacgagtaa

SEQ ID NO: 138169 - DNA, 345 bp, Enterobacter cloacae
atgacaattacgcgtattgatgccgaagcccgttggtcagacgtggtgatccacaaccagaccctgtactacaccggcgtgccggcaaatctcgatgccgacgctttcgagcagaccgccaataccctggcgcagattgacgcggtgctggaaaaacagggcagcgacaagtcgcgtattcttgacgccaccatcttcctcgccgataaaagcgactttgcggcgatgaataaagcctgggacgcgtgggtggtggctggtcacgccccggtgcgctgcacggtggaagcgacgctgatgaacccgcagtataaagttgagatcaaaattatcgccgcggtgtaa

SEQ ID NO: 138170 - DNA, 363 bp, Enterobacter cloacae
  misc_feature (346)..(355): n is a, c, g, or t
gtgatcgacgattttgcagcagacggccagctagccaaagccataccgggatttaaaccgcgcgagccgcagcgccagatggcggtggcggtcagcgaagcgattgaggcctcccggccgctggtggtggaagcggggaccggaaccggtaaaacctacgcttacctggcgcctgcgctgcgggcgaaaaaaaaggtgattatctccaccggctcgaaagcgctgcaggatcagctttacagccgcgatctgcccaccgtcgccaaagcgctcaaattcaccgggaaactggcgctgctcaaagggcgctccaactacctgtgtctcgaacgtcttgagcagcagnnnnnnnnnncgtcttga

SEQ ID NO: 138171 - DNA, 1602 bp, Enterobacter cloacae
  misc_feature (12)..(21): n is a, c, g, or t
ttgagcagcagnnnnnnnnnncgtcttgagcagcaggcgctggcgggcggcgatctgccggtgcaaaccctcagcgatgtgatcctcctgcgctcctggtcgaatcaaacccaggatggcgatatcagcacctgcgccagcgtcgcggaagactctcaggcctggccgctggtcaccagcaccaacgataactgtctcggtagcgactgcccactgtataaagattgtttcgtggtgaaggcgcgtaaaaaagcgatggacgccgacgtggtggtggtcaaccatcacctgtttctggccgatatggtggtcaaagagagcggctttgccgagctgatccccgaggcggaagtgatgatcttcgatgaagcccatcagctgccggatatcgccagtcagtactttggccagtcgctctccagccgccagctgctggacctggcgaaagacatcaccattgcctaccgcaccgaactgaaagacactcagcagctgcaaaaatgcgccgaccgcctggcgcaaagcgcgcaggatttccgcctgcagctgggagacccgggctaccgcggcaatctgcgcgagctgctggcggacagccacattcagcgagcgctgctgctgctcgatgacgcgctcgagctatgctatgacgtcgccaaactttcgctgggtcgctcggcgctgctcgacgccgcttttgagcgcgccaccctctatcgcgggcgcctgaagcggttgaaagagatcaaccagccgggctacagctactggtatgagtgtacctcgcgccactttactctcgcgctgacgccgctgaccgtggccgagaagtttaaagaggtgatggcgcagaagtcggggagctggatctttacctcggcgacgctgtcggtgaacgacgatctgcatcactttaccgcccggctggggatcgacgaggcgcagactctactgctgccgagtccctttgactatcagcaccaggcgctgctctgcgtgccgcgcaacctacccctgccgaaccagcccggcgcggcgcgacacctggcggcgatgctcaagccgctgatcgaggccaacgatggtcgctgctttatgttgtgcacctcgcacgccatgatgcgcgatctggctgagcagttccgcgccaccatgacgctaccggtgctgctgcagggcgagaccagtaaaggccagctgctgcagcagttcgtcagcgccggcaacgcgctgctggtggctaccagcagcttctgggagggagtcgatgtgcgcggcgacgcgctgtcgctggtgattatcgataagctaccgttcacctcgccggacgatccgctgctaaaagcgcggatggaagattgccggctgcgcggcggcgatcccttcgatgaagtgcagctcccggatgcggtgatcaccctcaagcagggggtgggtcgcctgatccgcgatatcgacgatcgcggggtgctggtgatctgcgacaaccggctggtgatgcgcccctacggcgcggtgttcctggccagtctgccgccggcgccgcgaacccgcgatatccgtcgggcggtgcgctttctcgccgtaccgccggcaaggtaa

SEQ ID NO: 138172 - DNA, 696 bp, Enterobacter cloacae
atgcgaattttggctatcgataccgccacagaggcctgctccgcggctctgtggaatgatggcacccttagtgctcatttcgaaatttgtccccgcgaacatacccaacgtatcctgccgctggtgcaggaggtcctcaccgagagcggcaccacgctgagcgagctggacgcgctggcctttggccgcggtccgggcagctttaccggcgtgcgcatcggcatcggtatcgctcaggggctggcgctgggcgcggagctgccgatgattggcgtttccacgctggccaccatggcgcagggcgcctggcgcaaaaccggcgccacccgtgtgctggcggccattgatgcgcgtatgggcgaagtctactgggccgagtaccagcgcgacgagcagggcgtctggcatggcgaagagacggaagcggtgctcaaaccggaagcggtagccgaacggctggcacagctttccggcgaatgggccaccgtcggcaccggctggcaggcgtggccggatctggcgaaagcgagcggactgaccttaagcagcggcgaaattgaattgccggcggcggaggatatgctgccgttagcctgttacctgctggcggcgggaaaaaccgtggccgtggagaaagcggagccggtttatttgcgaaacgaggtggcgtggaagaaacttccaggccgcgagtga

SEQ ID NO: 138173 - DNA, 666 bp, Enterobacter cloacae
atggacggaatggaaaatctgatgccacgggagaagatgctgcaatacggcatcgaaacgctaacggatgttgagctgctggcgctgtttctgcgcgtcggcacgcgtcgtcaggatgtgctcagctatgcccaggcgttactgcagcgttttggctcactctacgctctgctttccgctgataaagcgcaactgattgctgtagacggactggggctggcgaaatatgcccaactgaagggcattgccgagctggcgcgacgctattttagctcgcagctggtcgaggaggccgcgctggtcacgccctcgatgacgcgcgagtttttacaaagccagctgacggaagaggagcgcgagatctttatggtgatctttttagataatcagaaccgggtgttgaaacatagtcgtcttttttctggtactcttagccacgttgaggtgcatccgcgagaaattgtacgcgaagccatcaaagtgaacgccgccgccgtgatccttgcgcataatcatccctccggtagcccggagccaagtcaggccgacagactgattaccgaaagggtgataaaatgttgtagattcatggagatacgcgtgcttgatcatctggttatcggccgcggtgcgtatgtatcttttgccgaacgtggctggatttag

SEQ ID NO: 138174 - DNA, 1218 bp, Enterobacter cloacae
atgatgactctggcgggtaaaaaaatcgtcctgggcgtcagcggcggcatcgcggcgtataaaaccccggaactggtgcgccggctgcgtgaacgcggcgcggaagtgcgtgtcgcgatgacggaggcggcaaaagcgttcatcaccccactcagcctgcaggcggtatccggctatccggtttccgacagcctgctcgatccggcggcggaagcggcaatgggccatattgagctcggtaaatgggccgacctggtgatcctcgccccagcgaccgccgatttaatcgctcgcgtggcggccggcatggccaacgatctggtgtcgacgatctgtcttgccaccccatccccggttgccgtggtgcccgccatgaaccagcagatgtatcgcgcgcaggccacccagcataatctgcagacgctcgctacccgcgggctgctgctatggggaccagacagcggtagccaggcctgcggcgacgtcggcccggggagaatgctcgatccgttaactatcgtagacatggccgcgcagcatttcgcctcccctgtcaaagatttgcaacatctcaacctcatgattaccgcgggcccgacccgtgagccattggatccggtgcgttatatcaccaaccacagctctggcaagatgggcttcgcgattgccgccgccgcagcgcagcggggcgcgaacgtgaccttgatcagcgggccggtatcgctaccgaccccgccgtttgtgcagcgcattgatgtcactaccgcgctggagatggaagcggccgtccaggctggcgcccagcagcagcacatttttattggctgcgccgcggtagcggattaccgcgccgccgtcatcgccgaagataaaataaaaaaacaaggtgatgaattaacaataaaaatggttaaaaacccagatatcgtggccggggtcgcggcgctaaaatcacatcgcccctacgtcgttgggtttgccgccgaaacgaataatgtggaagaatatgcgcggcaaaaacgtgcccgcaagaacctcgacctgatttgcgccaacgatgtttcccagcctaatcagggctttaacagcgacagcaacgcactacaccttttctggcaggatggggaaaagcgcttaccacttgagcgcaaggaactcctgggccaattattactcgacgagatcgtgacccgttatgatgaaaaaaatcgacgttaa

SEQ ID NO: 138175 - DNA, 459 bp, Enterobacter cloacae
atgatgaaaaaaatcgacgttaagattctggacccgcgtgtcggccagcaatttccgctgccgacctatgccacctccggctccgccggacttgacctgcgagcctgtctcgacgacgccgtagagctggcgccgggcgcaaccacgctgttgccgacaggccttgcgattcatatcgccgatccctctctggcggcggtgatcctgccgcgctccggcctgggtcataagcatggcgtagtcctgggcaacctggtgggccttatcgactccgattaccaggggcagctgatggtgtccgtctggaaccgcggtcagcagagctttattatcgagccgggcgaacgtatcgcacagatggtctttgtgccggtcgttcaggcggaatttaacctggtggaatccttcgatgccaccgaccgcggcgaaggcggcttcggtcactcagggcgtaaataa

SEQ ID NO: 138176 - DNA, 597 bp, Enterobacter cloacae
atggcagaaaagcaaactgcgaaacggaatcgtcgcgaagaaatacttcaatctctggcgctgatgctggaatccagcgatggtagtcagcgtattaccaccgcgaaactggcggcttccgtcggcgtctctgaagccgcgctgtatcgccattttcccagcaaaacccgcatgtttgacagcctgatcgagttcattgaagacagtctgattacgcgcatcaatttgattttgaaagatgaaaaggacaccaccgcgcgcctgcgcctgatcgttctgttgattcttggctttggcgagcgtaatcctgggctgacgcgtatcctcaccgggcacgcgctgatgttcgaacaggaccggcttcagggtcgcatcaaccagctttttgagcgcatcgaagcgcagctacgccaggtgatgcgcgagaaaaaaatgcgcgaaggcgaaggctacaccctcgacgaaaccctgctggccagccagctgctggctttctgcgagggcatgctgtcgcgctttgtgcgcagcgagttcaaatatcgtccgacggatgatttcgacgcccgctggccgctggtcgccgcacagctgcagtaa

SEQ ID NO: 138177 - DNA, 1017 bp, Enterobacter cloacae
atggcgacgtcacggcgggatttactgaagataggcgggttggcaaccgcatcgctactggtcagtcaaaaaagcttcgcagcatgggccccctctgaacgctatccggacccacgcatcgtggccgtcgatgatagctttcgtcgctatatgcttgccagcgcaaaggtcgaacgcatcgccagcggcttccgctgggcggaaggcccggtctggttcggcgacatgcgaatgctgctgtggagcgacattccgaataacgccatcatgcgctgggatgaagtcagcggagaaaccagcatctttcgctacccggccaattatagcaatggtcacgcccgcgacagacaggggcgcttaatcagttgcgagcacgacacccgccgcattacgcgtaccgaatacgatgggtctgttaccgtactggccgatagctaccagggtcatcgcctcaattctccaaacgatatcgttgtgaagtcagacggcaccatctggtttaccgatccgccatttggcatcagtggtttttacgaaggccacaaagcaacatcagaattgccgcaaaacgtctattgtctggagccggaaagccgcaaactgagcgtggtactgggcgacgtaaaagggccaaatggtttgtgtttctcgccggacgaaaagaccttatacgtggtggaaagccgggcgacaccgaaccgcttaattctggcgtgggatgtggaaggcaatacgctgaaaaataaacgggtatatctcgactgtgggaacggtaccgccgatgggatcgcctgcgacgcagacggcaatctgtggtgcggatggggaagcggaaacgaagaactcgacggcgtgcggatcttcaacccacagggtaagcatatcggcaccattaaactgccagagcgctgcgcgaacttgtgctttggcggcgaacagcgcaatcgtctgtttatggcgtccagcacgtcaatctattcgctgtacgtcaatgcgcagggcgctaagctgatatag

SEQ ID NO: 138178 - DNA, 642 bp, Enterobacter cloacae
atgaagccgtatcagcgccagtttattgagtttgcgcttagcaagcaggttcttaagtttggcgaattcacgctgaaatccgggcgcaagagcccctatttcttcaacgccggcctgtttaacaccgggcgcgatctggctctgctgggccgtttttatgccgaggcgctggtggattccggaattgagtttgacctgctgtttggcccggcctacaaaggaatcccaatcgccaccaccaccgcggtggcgttagccgagcatcatgaccgcgatctgccttactgctttaaccgcaaagaggcaaaaacccatggcgaaggcggcaatctggtcggtagcccgctgcagggccgggtaatgctggtggatgacgtgatcaccgccggtacggcgattcgcgaatccatggagattatccacgcccagggcgcgcagctggcgggcgttctgatctccctggatcgtcaggaacgcggccgcggcgagatctccgccattcaggaagtggagcgggattacggctgccaggttatctcaatcatcactctgaaagagctgattacttatctggaagagaaacccgagatggcggaacacctggcgtcagttcgcgcctatcgtgaagcctacggcgtctga

SEQ ID NO: 138179 - DNA, 717 bp, Enterobacter cloacae
atgcgtccagcaggccgtagcgctaatcaggtgcgtcccgtcaccctgacccgtaattacacaaaacacgctgaaggctccgtgctggtcgaattcggtgataccaaagtgctgtgcactgcctctattgacgaaggcgttccgcgtttcctgaaaggccagggccagggctggatcaccgctgaatacggcatgctgccgcgttctacgcacacgcgtaacgcgcgtgaagcggcaaaaggcaagcagggcggccggacgatggaaattcagcgcctgattgcccgtgcgctgcgcgcagcggttgacctgaaagcgctgggcgaattcacgattactctcgactgcgatgtactgcaggccgacggcggcacccgcactgcctccattaccggtgcctgcgtggcgctggccgatgcgctgaataagctggtcgccgccggcaagctgaaaaccaatccgatgaaagggatggtggccgcggtctccgtcggtatcgtaaatggcgaagccatctgcgatctggagtacatcgaagactccgccgcggagaccgacatgaacgtggtgatgaccgaagatggccgtattattgaggtgcagggcactgcggaaggtgagccgtttacccatgaagaactcctcactctcctggcgttagcccgaggggggatcgagtccattatcacgacgcagaaggcggcgttagaaaattaa

SEQ ID NO: 138180 - DNA, 1095 bp, Enterobacter cloacae
gtggttattaaggaaattcacgagctacgccgtgataaagtcagcatcagtatggtgctcctgacacctctttttcagctgatcattcttggctatgccatcaatatggatccgcataatcttccgaccgccttactaaattatgataccgaacgcatgagtcaaatctttgtgacggaagcgcaaaataccgggtatttttcgatgattcctgtcgattcagaagaggcggcgcagaaagcctttgtgcggggggatgtcacttttatcgtgacgatccctgaagggtttacgcgcaagttactgcgtggagaaaagccacaactattaattcagggggatgccatcgatccgatcaccacggggaatgcgctcagcgcccttgtgcaggtggcgaagtcgatgtttcagcacgatttgccgggcgacatgcgtgtggtgcaaaaagaggatgatttcgagcttatcattcatcgcatgtttaaccctgaggggataacccagtttaatactattcccggtattatggggtctatactcagtacaacgttaatcctgatgaccgccctgtcaattacccgcgagcgagaaaacggggcgttagaaaatttactggtctctccgttgtccgggcttgaggtcattattgggaaaataacgccttttgttatcattggtctgtttcaggcgacgttaatcctgattgccgccgttttgttgttcgatatcccccttcacggtagcgtcttcctactattttttgtgctgttaatttatgtctttctttgtctgtcaattggtatcggtatttctggcttagcacaaaaccagctgcaggcgctgcaaatgtcctctttttactttatcccttccattatgctgtccggctttattagcccctttattagtatgcctgactgggcgaaagccattggctcctgtttaccgctgacctacttcatccgcctggttaagggcattatgctgaaaggctattcagcaacggcattgttgcctgacctcttgccgctgataggcctggcggtgattgtcattggcgtggggttgaaatcttatcgtaaaacgctggactga

SEQ ID NO: 138181 - DNA, 918 bp, Enterobacter cloacae
atgaataatctttgtattgatgtgaaaaatctcaataaacattttggcgagcatcacgtcgtaaaggatttctctttacaggtggcaaaaggcgagatctatggttttctcggtccgaacggtagcggaaaaacgacatcgattcgaatgatgtgtggtttgattacgccggattccggtgaaggtacttgtctgggtatggatatctttacgcagcgggaaaaaataaaaaaaaagataggctacatgacccagtatttctcaatgtggggaaatttaactattcgggaaaacttactttttattgcgcggttatatagcctcgatcagcgtagagatcgggttgaacgtgcgctttctgagttaggcctcactgcccgacagcaccagctggctaaggagctttctgggggctggaagcaaagaatggccctcgccgcctgtatgttgcatgaacctgttttgctatttctggatgagccgactgctggcgtggatcccaaggcgcggcgagagttctggcaaatgctgcaccagctctctgaccgggggatctcgatactggtgagcacgcattatatggatgaggctgagcgctgccataaggttgcctatctctcatatggtcggctgctggcgaatggcactattgcgtcgattatagcctcccagaatttgatcaccatgcgaaccagcggcgccggtctgacgctgcttgaaagccagctacagcgcttgccggatattgagcaaacggtcatttttggcaatcagctttatattacatccagagatgaagcgaagttaaaatccgcgctttttgcctttacgcaacagggttatgagttctgtaaggtggataccaatctggaagatgcatttacctacttgatgaaaaataattgtgaaaaaaattaa

SEQ ID NO: 138182 - DNA, 966 bp, Enterobacter cloacae
atgcgaaagccaataaatgtatttattatattgatatcggtgctgatactcaccgggtgtgataacaaaccagataacatgttatccggttattcgcatggagaatttgtatacctttcatattctggtaatgaaaaaatagaacggatcttgatcaataaaggagataacgtcgccgcaggacaggagttagtgaagattgagtccttcgatgcgcaaaatattttcctgcgcgctgaggaaaagctatcagcagagagcgctctattacgaaatctggaatctggagaacggcctgaagagctggatattatacgttcgcagattaaaaaagcacaatcggcagaatcccaggtaaagcggcagcttgggcgatatcgtaatctttacgccaatcatgccatatcgcttgcggaatgggaggatatccgggatgaattaactcaaaaaggcgcacaggttgaagagttaattaatcaactcaaagcacggcaactccctgcccggcaggatgagcttagcaagcagcgctcaatggtggccgcggcaaaactcgaacgggataaggcgctgtgggatgtccagcaaacgacgattgtttctccggtcaatgctaaggtcttcgatattatttatcgtgccggggagcgcccttctgctggtaaaccaataatcagtctgttacctcgtgagaatataaaagtacgcttctttatacccgaagcgaagctcggtaaatttaaaatcggatctaaggtaaaacttatatgcgatggttgcgctgagcccattgctggcattattaactatatcagccctgaggccgagtttacgcctccagttatttatagtacgaaacgtcgtgagaagctcatttttatggcggaggctatccctgcgctgcagcaggcagggcggatgaaaatcggccaaccgtttgatgtggagattattggcgatgaataa

SEQ ID NO: 138183 - DNA, 1518 bp, Enterobacter cloacae
atggacgctatctttgacagagtcgtaagggaattttttccaaatacaaccatacctttttggaaaaaatggctgttcaggacggcatttggcaataaggtattttctcgcttaatatataacgagcgactcgttaataaaaatggggtcgagtgggttaatgcagttgttgaactccttgagttgaaatgtgaaagcgaacaccaccaatttaacaacatacctgagcatggggctacggttgttatttcaaatcatccgacggttatcgatggacttagcttaatacatacggtctcccgagtcaggagtgatataaaaataatagccaatcacgttttgccaattatattcccccaggtatcggaacttaccattggaattgagaatatggccggtaagatgagccataaaaaattccgcgagatgaacgatcacctgcgaaaaggaggcgtattgattatatgtcctgcgggtaagctggctaactggtctctttccgggttacaggagcataagtggaaccccggttttttacagcttgctatgagaaataatgcagcattggtaccaattcatattacgggagcaaacagtaagatttattatcttactgcaacattctggcggcaactgtcgaatatgatggttattcgtgaagctctccgccatcatggcaagaccatgaaaatcaatataggacagcaaatagccttatcctcgtttaaagaatacaataaagatctttctgccgcggcaaatgtatgtttgacgcacctccagagtatagcgaagaatggcccggctatgttagatacgattgcgccgcaagaattagaaccaggtaaaaaggagctaattagcgcaatagaggagtgcgaaatattaaggcagtttgaagacggtagaaaactagtgatatatcgctgtaatactaaccgaacctcacctattattgatgagttagggcgcttacgcgaacgctgttatcgcgatattggtgccggaactggtaacgaccgagataacgatgtttttgatgaaagttattatcatatcattttgtgggatccttctgatgtggaaatcctgggagcatatcgtgttatgcccgttggcgagcagctggcccaacatggtgtaacaggcctctatagcaacagcttgtttaaataccatgataatgcctattcctgtttagagaagtgtgtggaaattggccgcggctttattcagaaaccttatcaaaaaagtaaggtgcttgattatttatggcaagggatatttgactttataaaaagatatccggactataaatacttgctgggtgtgctgaccattcctggaacttttcctgaaaaagtacagaaactcatcatcagtttctataatatatacttttcctcgacagctgatttttgtacgccgatagcattgttcactgccgaaaatgtacaggatgatactccattttgtggcgaagattttagagcagactggagcatgcttacctgctga

SEQ ID NO: 138184 - DNA, 2310 bp, Enterobacter cloacae
atggatccccccgcgctgaccggtgatttcagagcccggcaggttcacgatacgttcctgcgcgtgatacatcatggtcatcccggctggaacgcgctgactcaccaccgcacgcgccgtcagggcgccgttggcgttgaagacttcgatccagtcgttatcttcgatacccagatctttcgcatccgcttcgctcatccagacaatcggcccaccgcgcgacagggtcagcatcagcaggttatcgctgtaggtcgagtggataccccatttctggtgcggggtcaggaagttcagcgccttctccgggttgccgttggacttctcgcccatcaccgctttcaccgaacgggtgtcgatcggcggccgatagaccagcaggctttcgccgaagtcgcgcatccactggtgatcctgatacagcgactgacgtccggacagcgtgcgccacgggatcagctcgtgaacgttggtgtaaccggcgttgtaggagacatgctcatcttccaggccagaccaggtcgggctggagataatcttccgcggctgcgcctgaatgtcgcggaagcggatcttctcgtcttctttgttcagcgcgaggtgcgtatgctcgcgaccggtgatctcgctcagcgcttgccacgctttcaccgccacctgcccgttggtttccggggccagggtgaggatcatttccgcggcgtcgatggccgtttccagcttcggctggcctttcgccgggccttccgccttggtgtagttgagcttacgcagcagatccatctcgctctgggtgttccaggcgatgcctttcccgccgttgccgatggtttccagcagcgggccgatcgaggtgaaacgctcgtaggtcgccgggtaatcacgctcaaccggaataatatgcggcgcggttttcccggggatgagatcgcattcgccttttttccagtctttgacatccagcggctgcgccatttccgcggcggagtcgtgctggatcggcagggtcaccacgtcggtttctttaccgaggtggcccatgcagacttcagagaatttcttcgcgatacctttatagatctcccagtcgctcttcgattcccaggctggatcaacggcggccgacagcgggtgaataaacggatgcatatccgaggtattcatgtcgtctttttcgtaccaggtggcggtcggcagcacgatgtcggagtagagacaggtgctcgacagacggaaatcgagggtcaccaccagatccagtttgccgtcgaggccgttatcccgccattcgacttcttccggcttcacgccgccctgcttgcccaggtctttgccctgaatgccgttctcggtacccagcaggtacttgagcatgtattcatggcctttaccggaggagcccagcaggttggaacgccagataaacaggttacgcgggtggtttttgccattttccggctgctcggccgcaaagcgaatcgagccctctttcagcgacttcacggtgtaatccaccggggtcatgccggcttttttcgcttcgtcagcgatacgcagcgggttgacgccaagctgcggcgccgacggcagccagcccatccgctctgcgcgcacgttaaagtcgatcaggtggccgctgtaacgggatttatccgccatcggcgacagcagttcctgcgcggtcaccgtttcatagcgccactggctggagtggttatagaagtacgaggtactattcatgtgacgtgccggacgctgccagtcaagggcgaacgccagcggctgccagccggtctgcggacgcagtttttcctggcccacatagtgcgcccaaccgccgccgctctgaccgacgcagccgcagaagatcagcatattgatcaggccgcggtagttcatgtcgaggtggaaccagtggttgaggcccgccccgacgataatcatcgaacgaccgtgagttttatcggcgttatcggcaaattcacgggcggtacggatgatatgcgcgcgggagacgccggtgatcttctccgcccacgccggggtgtaggctttcacttcatcgtagccggcggcgcagttgtcatcgttcagaccgcgctccaggccgtagttagccatggtcaggtcatacacggtggtgaccagggcggtagagccgtcggccagctgcaggcgtttggccggcagtttgtgcagcagaatgttttccagatcgactttgttgaagtgctcagacccttcgccgccgaagtacgggaagccgacgttcgccacttcatcatggctgcccagcaggctcagacgtag

SEQ ID NO: 138185 - DNA, 1389 bp, Enterobacter cloacae
atgagtcaatcttccctcccggagaaggctaaccgctcggtcataaccgactggcggcctgaagatcctgaattctggcaacagcgcggccatcgtgtggcaagccgcaatttatggatctccgttccctgtctgttactggcgttctgcgtttggatgttgttcagcgcggttgccgttaacctcaacaaagtaggctttcagtttacaaccgatcagctgtttatgctgaccgcgctgccggcgctgtcaggcgccttattacgcgtgccttacgcctttatggtgccgctgttcggcggccgtcgctggacggcgttcagcaccgggatcatgattgtgccgtgcgtctggctgggcttcgcggtccaggatacctctacgccgtttagcatcttcgtgattatctctctgctgtgcggcttcgccggagccaactttgcctccagtatggccaacatcagcttcttcttcccgaaagcgaagcagggcggggcgctcggcgttaacggcggacttggcaatatgggcgtcagcgtgatgcagctggtcgcgccgctggtggtctcgatctctatctttgccgtttttggcggtaacggtagcgagcaaccggacggctcgatgctgtatctggaaaacgccgcgtggatctgggtacctttcctgattattttcactctggcggcgtggttctttatgaacgacctgtcggcttcgaaagcgtcgctgagcgagcagttgccggtacttaagcgcctgcatctgtggattatggcgctgctctatctcgcgaccttcgggtcctttatcggcttttccgccgggttcgcgatgctgtcaaaaactcagttcccggatgtgcagatcctgcattacgccttcttcggcccgttcattggcgcgctggcgcgttcgatgggcggggcgatctccgaccgcctcggtgggacccgcgtaacgctggtcaactttgtggtgatggctgtcttctgcgcgctgctgttcctgaccctgccgaccaacggccagggcggtaactttatcgccttcttcgcggtgtttatggtgctgttcctgaccgccgggctggggagcgcctccaccttccagatgatctccgtgatcttccgtaagctgactatggaccgcgtgaaggcccagggcggcagcgaagcgcaggcgatgcgcgaggcggcgaccgataccgcggcggcgctgggctttatctccgccattggcgctatcggcggcttctttattccgaaagcgttcggtatctcgctggatctgaccggctcgccggccggggcgatgaaagtgttcctcgtgttctatattgcctgcgtggtgatcacctgggcggtatacggtcgtaagcgtcagtaa

SEQ ID NO: 138186 - DNA, 1779 bp, Enterobacter cloacae
atgttaaaacgtctttttaccccgctgacgctggtcaatcaactggcgttaatcgtgctgctcgccacgattattggcgtcgccggcatggcgatctccgcgcgcctggtgaacggcgtgcagggcagcgcgcacgccattaacaaggccggttcattgcgtatgcaaagctaccggctgctggcggcgatcccgctgaatgaaaacgatcaaaaactggtggcggacatgaccgccaccgtcttcagcccggagctgcaaaattccgcccgccgcgacggccaggaaatccagcttaaagccctgcagcagtactggcagctggcgctggcccccggcatgcagcgcgcagtcaatcaggcggaagtggcccaggatgtcgccgactttgtcgatcgtatcgaccagttggtcaccgcattcgaccacaccaccgagcagcgtatcgaacgggtggtctggatccatcgcatcctcgccattggtatggcgctgctgctgatcttcactatcatctggctacgcgcccgcctgctgcggccgtggaaacagctgctgagcatggcgcgcgcggtgagtcagcgtgatttcacccagcgggcgcacatcagcggccgcaacgaaatggcgaccctgggcatggcgctgaataacatgtcggaagagctggcggaaagctatgccgtgctcgagcggcgggtgcaggagaagactgccggactggagcagaagaacgagatcctcgctttcttatggcaggccaaccgccggctgcactccagcgccccgctctgcgaacgtatttcgccggtactgaatggcctgcaggggctgacgctgctgcgcgatatcgaggtacgggtttacgacctggaagacgaagataatcaccaggagtttacctgccactcggatgatgactgtgatgataaaggctgctacctctgtccacgcaatctgccgccgctgccggatgggggaacaacgctgaagtggcggctgtcggatgcgcatagtcagtacggcatcctgctggcgacgctgccggttggccgccatctcagccacgatcagcagcagctggtggataccctggtggaacagctgaccagcaccctggcgctggaccgccatcaggagaagcagcagcagctgatcgtcatggaagaacgggccactatcgcccgcgagctgcacgactccatcgcccagtcgctatcctgtatgaagatgcaggttagctgtctgcagatgcaaggcgacgccttgccgacggagagccgccagctgctggggcagatccgtaacgaactgaatacctcgtgggcccagctgcgggagctgttaaccaccttccgcctgcagttgaccgagccggggctgcgcccggcgctggaggccagctgtcaggagtacagcgcccacttcggctttacggtgcagcttgattaccagctcccgccgcgctttgtgccctcgcatcaggcgatccacctgctgcagatcgctcgcgaagcgttgagcaacgctctgaagcatgccagcgcaaccgaagtaaccgtgacggtgtcacaacgcgataatcaggttcgtctggtggtagcggataacggccgcggcgtaccggaccacgccgaacggagtaaccattacggtttaattattatgcgggatcgcgcccagagcttgcgcggtgactgtcaggtacgacgccgggaaaccggtggaaccgaagtgatcgtcacgtttatcccggaaaaaacgttttccatccaataa

SEQ ID NO: 138187 - DNA, 1392 bp, Enterobacter cloacae
  misc_feature (1208)..(1217): n is a, c, g, or t
atgcctgtgtcgttccgtttgttgccaacgttgacctttctcctgctgttgccgggcgttcccgtctgggcgctgaccgccagcgacaccacccgccctgcgcaagcgcaagatccgctgcccgatatggggattgctccccaggttgatgacgacgcccggcactttgccgaagtggcgaagaagtttggcgaggccagcatgagcgacaatggtctgacggcgggtgaacaggcgcagctgtttgccatcagtaaaatcggcaatgaagtgagtcatcagctggagagttggctctcgccgtggggcaacgccaatgtcgacctgctggtcgataaagaggggaaattcaccggcagtaaagggagctggttcgtgccgttgcaggataacgaccgttatctgacgtggaaccagtactcggtgacccggcgcgagcacgatctggtgggcaacatcgggcttggccagcgttggcgggttggcggttggctgctgggctataactcgttttacgataaagtgctgagcgaaagcctggcgcgcggcagcgttggcgccgaagcgtggggagaatatctccgcctgtcggcaaactattaccatccgctgggcgactggcagctacgcgataatcagactcaggagcagcggatggccgcagggtatgacgtcaccgcccaggcgcggctgccgttctaccagcacatcaacaccagcgtcagcgtcgaacagtatttcggcgatagcgtcgatctgtttcactccggcaccggctaccataatccggtggccgtctccgttgggctcaattacaccccggtcccgctggtcacggtgaccgctaagcataagcagggggaaaatggcgtcagccagaacaatgtgggcctgaagctaaactatcgctttggcgtaccccttaagcagcagcttgcggcagacgaggtggcgatcagcaactcgctgcgcgggagccgcttcgatagtccggagcgggataatctgccggtggtggagtatcgtcagcgcaaaaatctgacggtctatctggccacgccgccctgggatctgcagtccggggagacggtgcagttgaagctgcagatccatagtctgcatggcatcaaggcgctgcactggcagggagacacccaggccctcagcctgacgccgccggtagatgccagcagccccgatggctggannnnnnnnnncatcattatgccggtgtggaacagtgaaccgggcgccgcgaaccgctggcgcctgtcggtggtggtggaggataaacaggggcagcgcgtctcctccaatgaaatcgccctggcgctgaccgagccgctggtcaagtttaccacgccaggcgtctcctggacggactcgccttag

SEQ ID NO: 138188 - DNA, 975 bp, Enterobacter cloacae
  misc_feature (807)..(816): n is a, c, g, or t
atgcagcatatcgcggagccaatggtggaggtggcgccgcaggatgccgttcgctatcagcttcccgctgacgggctggcgcggatctggtcgcggcatggggtgatggtggcgaaagtggcgatcagcgaagggcagcgccccggctcgctgtttgttccgatgcactggaacaaccagtttgcccgtcaggggcgggtgaataacctgctggccgccgtcacggacccgtattccggccagccggaaagtaaacaggcggcggtggcgatcgccgcctggcaaccggcctggcacagcgagcttttttgccgcgaatcgctaccatttcctgcggcctggcactggcggcggcgggcggcgccaggcgtgctgcactactcgctggccggggaggcatctgcccgacagtggctcagcgcgtggtgcgcccggcgcggctggcagttacaggtggctgacggcggcgcggtgtggaacctgctggcctggcatcagggaaggctgatgctcggctggtggagcgatgcgcgcgagccggcggtggattgcgcatggataagcgctgcctttgccgcgccgccgtccgatgctgtccaacgacatgccttgcttagcggccgaccgggcgccgccgtcgcgccgcgggggcggatcgtctgcagctgctttggggtgggggaatggtcaattaacgaggccatcgccagcggctgcgccagcgtcggggcgctgggtgggaagctgaaatgcgggaccaactgcggctcttgcgtgccggagctcaacgcgctgctggcggcgcannnnnnnnnnggcgtaacggtggcgcgcagcgacgcctccggttgggctgcaccttacccaaccggtttcagcttattcctggaattgcccacagggctgcgggagcagggaaaaaacgataaactaacacttctatccatttttgtgagcttgcgcaaactctgttaa

SEQ ID NO: 138189 - DNA, 927 bp, Enterobacter cloacae
atgccctatctgttactgacgctggcggctctgttctggggcgggaattatgttgtcgggcacgtgctggtgcagggcgtggatccgatcctgatgaccgaagcgcgctgggcgctgacggcgctgctgctgggcctgctctaccgacagcaaatcgccggcagtcgccgcctgctgcgggcaaacgcgccagcggtggtggtgctaaccctctgcggccaggtcagtttcccgctcacgctctatattggcctgcaaaccacctccgcgctcaacgccgccatctatatgtccgccacgccgagcatggtactgttgattaaccggctgattttccgcgacccggtatcggcgcgtaactggctgggggtcatcttcagcaccctcggcgtaatgatcctgttattccagggaaacccactgcacgccgcctcgctgcatagctttgccgtcggcgatctgtgggcgatgggatcggcgctgagctgggcgctctactgttcgctgttacgtctgaaggaccgccgaatcccggcgaatggctttgtcgccgtcagctcgctgctcggcgccctgatcctggtgccaatcgtcatcttctggctgatgcgccacccggcgcaggactgggcagcctggcgcgagccgttttacctcagcggcctggcgtatctggtaattttcccgtcatggctggcctatctgttctggaacaaaggtatcgccagcattggcgctacgcggggcgaaatttacacccacatcatccccctctccggcggggtgttgagtatcctcttcctgcacacccagctgcaggcctggcacctgttcagcgcgctgtttatcatgctggggattgtcatttgctccctggaaaaacgccaggcgaccgggcgcctgaccacgcccggtcacaaaagttaa

SEQ ID NO: 138190 - DNA, 1101 bp, Enterobacter cloacae
atgcgtaacacagataatggggtgattggaagcgaccagaccgcggtgatggccaggctggcgctggatgagttaattgaccagcttttgcacagcaacgcgctgtcgctgaagctgacggccaacccgctggtggccgacagagcctggcatctcactgagaatacctgcatccgcgccttctccgctgacgatccacaggccaaaaagcgtgcgcaccacgcgctgttcattctctatcagtcctggcttgccgacccgctctcgccagcggctgccaatcagtttcatccgctgctttccgggatcagaaattacatcgagtctgagtggctgcgggcggaaagcaaacgcttccaccaccagagaccaatgcttaacgccggcaatatcgtcgacgaactgcgcgccttatgccagcagcacccggcgtctcatcatccgctgttcgatttccttgccagcgaggcctctgcggcgcaaatcgactatttcttcaaaagcgacagcgccctcaatctgcttttcttcgatctggtggcgatggggctggtgggctcgctgccggaaacccgcgctgagattgcgcaaaatctgtgggatgagataggccagggcagcaccgagatcacccacgttaacctgtacaaggatttactgaagcggcggaatatcgctttgccggacaatcattttgcccatttgtacgagtggcaggggctggccgggtataacgcctttatgctgggcggcgttaaccgtcagcattactacaaatcactgggcgtgatggccatgaccgagctgctcgacccgccgcagtatgaaaaactggtggcgggctgtcggcggattgggctttccgatcgcgacgtgcattactatgccgaacatatcacggtcgatatcggccatgcggacggctggctgaacaatgtgattgtgccgattggcaaaaaacatccggcggcgatggaagaggtcttctttggcgccgcgctgcgtctgcaaacctgcaacgattactatgatggtctgctggcggccctgcagtcgctgggcggcagcttatcatctcacagcgtaccgccttctgagtaa

SEQ ID NO: 138191 - DNA, 579 bp, Enterobacter cloacae
atgaagccaaaacaagcggacattctccgccacgccagcacgctgtttaatcgcgaaggatatcagtcgcccagcatcgagcggattgctgaacatgctggcatctccaaaatgaccttctaccgctattacgccgataaagaggcgctcattctggctatcctcaagcagaaagagagcgaatttatgcaggatttggcgcagatcaccgcggataaagccagcgcacgggaaaagctgttcgccgtgttcgactactaccatcgctggtttacctgcgaaacgttccacggctgcatgtttactcgcgcgctgtttgaatatggcgcgtcatcgccggcgatccgggagcaatgctcccgatttaagtcgctcctctggcagttcttccgcgatatcctcctgcaggtgttaaaaccggaacctgccgagcgggtggccatgatgatggtgatgctcatcgatggcgccatcgccgcccagcaggccgagtccgccgaatgccgggagatcccgccaggggtgaccgcctggagcgcggccaaagcgcttatttactcagaaggcggtacgctgtga

SEQ ID NO: 138192 - DNA, 537 bp, Enterobacter cloacae
atgatgttacccctgaccacgccccggctgctgctgcgccggttcagaacggaagatctgccgtctttcagccattatcgcaatctgccggaggtggcccgctttcagagctggacccactacggcatgacagaggcgacagccttctatgaacaacagcgttcgcaggcctttgctgaggatgagagctggttccagcttgccgtagagatccaggccaacggtgcgctggcgggagatgtggggatccacttcttagatcacggcagacaggccgagctggggatgaccttttcccctgcgtatcagcatcaggggtatgcccgggaagccatgcgggcggtgatggccttactctttgaacagttagcccaccaccggctgacagcggtggtagacacccgcaataccggcgcgatcaaactcctggaagggctgggctttcgtcgcgaggcgcattaccggcagaatatcttttttaaaggcgagtggggcgatgagtacctgtacgcgctgttgcgtagcgaatatcagtga

SEQ ID NO: 138193 - DNA, 537 bp, Enterobacter cloacae
atggtcacttcgcagatggcggtgttcgccgaggatttcggcattagccaggcggtggtgtttggcatggcggcgctgccgctggcgttaacgatagaccgctttaccaacggcttaacccggccgctgtttgggtttatttccgaccgcttcggccgcgagcaaaccatgtttatcgcctttgcgctggagggggtagcgatgatgctctggctggcgtgccgggaagatccgctgctgtttgtcctgctctccggggtggtgttctttggctggggggagatcttctcgctcttcccgtcgacgctcaccgatacgttcggcagcgagcatgccgccagcaactatggctggctgtatatttcgcagggcatcgggtcaatctttggcggtccgctggcggcactgctctatcagtacactcacggctggcatgtggtcttcagctgcgcgattggccttgattttgtcaccgccgccctcgcgctgtgggtgctaaaaccgtggcgcgcgcgctttgtccgccagcatagctaa

SEQ ID NO: 138194 - DNA, 732 bp, Enterobacter cloacae
  misc_feature (613)..(621): n is a, c, g, or t
atgcgtttcacggaagcctgcttactgaaaacggagaacaacatgacgacactcagcgaaccgttggttaccccgaaatatggcaaatggcgccagctggtgctgggcctgatctgtatggccgccatctccagtccgcaatatgtctggacgctgttgacaaaacccctggccgctaaacttggcgtcggtctgccagaattgcaggtcaccttctcgctactgatcatcctgcagaccttcttttccccttttcaggggcggttagtggaaaaatttggcccacggcggctgatcgctattggcacggtgatggcgggaatgagctgggtgctttccgcgcaggtgaatggcctggcaacgctctggctggtttatggctgcatgggcggcctcgggaccgggatcgtctacatcggcgttgtcggcctgatggtcaaatggttcccacagcagcggggatttgccgccggcgcggtggcggcgggctacgggatgggggccatcataaccaccttccccatctccctgtcgctgaccactaacggccttgaacatacgatgacgactttcgggatccttttcgccctcgtcggcttcctcgccagtcagnnnnnnnnngctgcgccagccgctgttctggctgatgttcgtcatgatggcgatgatgtcgacttccgggctgatggtcacttcgcagatggcggtgttcgccgaggatttcggcattag

SEQ ID NO: 138195 - DNA, 1059 bp, Enterobacter cloacae
gtgattttggtgaagagtttagacgcggacggtagcccgaaagaaaaacgacgtaaaggaacgggtaagataaccctgaccgaggtggctgagtttgtcggtgtgagcgccatgaccgtctcgcgagcgctgagaatgcctgaaaaagtgaatcctgagcttcgcgatcgcatcgatgcggccgtcagtcaactcggctatgtccctaatctgcaggcacgtaatctggcgtcggtccattccgatcttattctcgccgtcgttcccaccttctcttcgccgggttttttgccggtctctgaagcgctgcaaaaagtgctgaccgaacgcggatataccatgatgtttatggaatccgggcatgacggtcaaagtgaacaaaagacgtttgaaaaaatgctcgcctataacccggcggccattattcagttcaatatcgataccattgagagctgcacccagttgctggccaacgtggatgttcctattctggaaattggcgcgctaaatacccaccccgtgggtatgtgcatcggcgtggattacggtaaggccgtaaaacagatcgtgactcatctggccgacgcctcattaaaaaacatcgcactgctctgtaccccggctaataacacaatgtttcgccagttgctgagcggttggaatacggcgatgctcgctctgaaccgctccccgcaccgggtggtaaccacgcatttgccatccaccatcgccacaggcgtcaatatattcaaggatatgatgattacctggggcgatctggatgcgttaatttgcacgtcggatgaaatggcctgtggatgtatgatggcctgccacagtgccggcatcaaggtgcccaataccgtagccattgcgagtttaggcggaggagtgttatcgacagtctgttcccctgccctgacaaccgttgagtttccctggcatgacattggggtgaaagccggtaaagcccttctcgaactgcttaacgataagcctggtgaaaagttcattgaaattccgtcagtgctcaaagtccgggccagtaccgcggcatga

SEQ ID NO: 138196 - DNA, 438 bp, Enterobacter cloacae
atgatcagagactggttaaccccggataaaattaaagtcattaactcaatagatagctgggaaaatgccgttcgacttgcagcagaacccttgctgatgcaagggtatatagccgggtcgtatattgaggcgattttgcaaagccataaagaacttgggccctattacgtattagctcccggcttggcgatgcctcatgcccgtcctgaacagggggtattaagaaatggattatcgcttcttcatattaaagaaggggtgtcgttcggctcgaaagagaacgatccggtatacgtggtaatcatgctatgcgctcgttccgggaatgaacatatcacgatgatcggtgaactggctgaaatctttagcgatcagcaaaagttacaccgattgttaaatgccgatgatagcaaggcgattcaggccgttattgactga

SEQ ID NO: 138197 - DNA, 267 bp, Enterobacter cloacae
atgaaaaaagtgcttatcgtgtgcggtaatggtttaggcagcagcttcatcgttgaaatgaatgtcaaaaagatccttgccgaaatgaataaagaagctgaagtcgcacataccgatctgacgtcggcaaaaagcgaaactgccgatcttattctcagcgccaaagacattgcagaacatcttagcagtcactctgcaaaggtcgttggattaagtaatttacttgataacaataaaattaaagaaattttagcagaaaacatttaa

SEQ ID NO: 138198 - DNA, 1263 bp, Enterobacter cloacae
atgcttcattttcttatttatgatgtgctaggaacaccggcgatactggttggtttattttcactgatcggtctgctgttgcaaaaaaaaggaatttcagacgttatttcaggcacgctgaaaaccatcatgggttttgtcatattgaccgccggcgccggtattatagcctatacgttaaccatctttagccagttatttgaacattctttccatattcagggcgtggtgcccaacactgatgccatggccgctctggcgcagaagaattacggcacggaaaccgccaccattatggtattgggcatgctgatcaatatcgccctggcgcgtctaacgccattaaagtacatctttctgaccggacatcatacgctttatatggctgcgatgctggcggttatcctgtctgtagggggcttgtcagggggatgggtggtggccatcggggcggttattctcggtgcgatgatggtcatctccccggctatcttgcagccgtttacccgtaaaataaccaacaccgacgatctggcgctcgggcattttggatctattggctacctgctgtccgcgctggtgggcaaaattattggtaaaggcagtccctcgattgaagagatcaaagtacctaagtcgctcaatttccttcgcgactcatcagtagccatctctctcaccatgatgattctgtttctggtgctggtgctcgttgcgggaaaatcctttgtcgaggagaccctgagcgctggtcagaactttattatcttcgccattattcagtccctcacgtttgctgcaggagtttatatcatcctcgccggggttcggatggtgattgccgagatcgtcccggcgtttaaagggattgcggacaaactggttaaagacgcgaagccggcgctggactgtccgacggtgtttcccttcgctccgaatgccgttatcgtcggcttcctcgcaagctttgtcgcagggctggtcagtatgttcctctgcccgctgttcggcttgagcgtcatcgtcccgggcctggttccccactttttctgcggggccacagcgggggtttacggcaacattaccggcggacgtcgcggggcggtggtaggggcttttgctcacggtctgctcatttcgttcctgcctgccattctcttgcccatgatgggggatatgggactgggctccacaacctttggagacgcagactttggcgttgtcggcatcgtgctgggtcatatcatcgcaatgtttaactaa

SEQ ID NO: 138199 - DNA, 681 bp, Enterobacter cloacae
atgagcgctaaattttcaccgtcactgatgtgcatggatttaacgcagttcaaagagcagatcacggcaatgaataaaaaagcggatttttaccatgttgatataatggatggcaattacgtccgcaatatcacactgtctcccttttttattgagaatctgaaaaaaattactactgtgcccattgatgttcatctgatggtgaatcatccggaagatatcattcccatgtgtctcgaggccggcgccgatatcatcagctttcatcccgagacggcgaataacaaaatattccgcctgctgaatcagatcaaggatgcgggcaaaaagtgcggggtggtgctgaacccggcgacaccggcagaaagcattgccgaatatgcgcatctgctggataaagtgacgatcatgtcggttgaccctggctatgccggacaaaagtttattcctgagtcgctgaacaagattagaaagctcatcaacatgcgcaaaaataatggctatcactatctgacggaaattgatggctcttgcaatgagaaaaccttcggtcagattgctgaatccggggtagatgtctttatcgtcggcacatcgggtctgttttcgctccatgaggatgtcagccaggcgtgggacagaatgatcgagatcttccagcgggaaactgtcgctgcataa

SEQ ID NO: 138200 - DNA, 471 bp, Enterobacter cloacae
atggatatttcgacagtgcttaatgttaaaaacatcaagttaaatatgaccgccagaaccaaagaagaggtgatagaagaactcaccgatttacttatccaggatggcgccgtcaccaataaggaagactttattcgtgatgtctggttacgcgaggagctaggctctaccggctttgaaaaccatatcgctattccacatggtaaatcttccggtgtttcccgtaccgcattagccatcggacgcacgcaacatgccattccctgggagaccatggatggcagcgacgtccgctgtgttattttatttgcggtttgcctggtggatcaaaatgccacccatattcgcctgttggcacaagtgtctgggtcactggcggatgaagacattatcgctaaattacttgttgaatctgatccacataaaatcattgcgcttttcaattcagaaacagaaaacgccgatgcttaa

SEQ ID NO: 138201 - DNA, 282 bp, Enterobacter cloacae
atgttttgtgtgatctatcgaagtactaaacgtgaacaaacctatttatacgtcgaaaaaaaggacgatttctcgcgcgttcctgacgagctaatgcgcagctttggcacgccgcaaatggcgatgctgctgccgctggatgggcgcaaaaaactggttaacgccgatctggaaaaagtgaaacaggcgttaagcgaacagggctattacctgcaactgcctccgccgtctgaaaatctactaaagaaacacctggcggaacaggggaaacaatccgattaa

SEQ ID NO: 138202 - DNA, 660 bp, Enterobacter cloacae
atgtaccaacatcataactggcagggtgcgcttctggattatccagtaagcaaagtagtgtgcgtcggcagtaattatgcgaaacacatcaaggaaatgggcagtgcgacgccggaagagccggtgctgtttattaaacctgagactgcgctgtgcgatcttcgtcagccgttggtgcttcctgaggggctgggctcggtgcatcacgaagtcgagctggcggtgcttatcggcagcacgctgcgtcaggcgacggaagagcatgtgctgaaagggattgccggctatggcgtcgcgctggatctcacgctgcgcgacctgcaggcgaaaatgaaaaaagcgggacaaccctgggagaaggccaaaggcttcgataacgcctgtccgatctccggctttatcccggccgctgagttccacggcgacccgcagaatacgtcgttaagcctgaagattaatggcgaagtgcgccagcagggcaccactgccgacatgatccataggattgtgccgctgatcgcctatatgtcgcgcttctttaccctcaaagccggggatgtgatcctcaccggcaccccggaaggcgtggggccgctgcacagcggtgacgagctggaggtcggcttcaacggcctggcgctcactacccgcgtgctgtaa

SEQ ID NO: 138203 - DNA, 447 bp, Enterobacter cloacae
atgagcgaacaacctttctggcaacaaaaaacactggatgacatgagcgacgcggagtgggaatcgctgtgtgacggctgcggccagtgctgcctgcacaagctgatggatgaagacactgacgagatctacttcaccaacgtcgcctgtcgtcagctcaatatcaaaacctgccagtgtcgtaactacgcgcgtcgctttgagtatgagccggactgcatcaagcttacccgcgaaaatctgccgaccttcgaatggctgccgccgacctgtgcctatcgcctgctggcggaaggcaagcctctgccggcctggcacccgctgctgactggctcaaaagcggcgatgcacggcgaacgcatctccgttcgccatattgcagtgcctgagtccacggtggtcgactggcaggaccatatcctcaatctgcctgacagggcgcgctaa

SEQ ID NO: 138204 - DNA, 345 bp, Enterobacter cloacae
atgtcatctttactgatccccgcagactggaaagttaaacgctccaccccattctttaccaaagagaatgtccctgccgccctgctgagccaccataacaccgcggctggcgtcttcggccagctgtgcgtcatggagggaacggtcacctattacggttttgccaatgaacaggcgacggagccggagaaaaaagtcgtgattcatgccgggcagtttgctaccagtccgccgcagtactggcaccgcgtcgaactcagtgacgacgcccgcttcaatattcacttctgggtggcagaagaaaccgacggtgaaaacgggctgttccacgcgaagaaagcgtga

SEQ ID NO: 138205 - DNA, 531 bp, Enterobacter cloacae
atgttgcaatatttaaaccagtgctcaagaggacgcggtgcctggctcctgatggcgttgaccgcttttattctcgaacttgtcgcgctgtggttccagcacgtgatgctgctgcagccgtgtgtcatgtgtatttacgaacgctgcgcgctgttcggcatcatgggcgcgggactggtgggcgctatcgcccccaaaacgccgctgcgctatgtcgccatggcaatctggttgtacagcgcgatacgcggactacagctggcgtgggagcatacgatgatccagctgcacccttcaccgttccagacctgcgatttcgccgcccgcttcccaacctggctgccgctggataaatggctgccgcaggttttcgttgcgtccggagactgttcagtacgtcagtggcagttcctgtcgctggagatgccgcaatggctggtggggattttcgccgcctatctgctggtcgctattctggtgatcgttgctcagcctttcaaagcgaaaaaacgcgatctgtttggtcgttaa

SEQ ID NO: 138206 - DNA, 1731 bp, Enterobacter cloacae
atggcaagtgaattaaaaagggatcgccgtttcattttccgcttttactttgcgcttttccttatcttcacaaaccgccagcacggcgcgaagaaagttgcttctcattttgctcaactggtactcttgccaatcgttatgcacaaaaccatgcactcattgacggggaaggattctgtcgtggaaatttcttatggccgcgcgctgtggcgcaattttcttggccagtcgccggactggtacaagctggcattaatcattttcttaatcgtaaatccgctggtgttcgccgtggcgccgtttgtcgccggctggctgctggtggtcgagtttatctttaccctcgccatggcgctgaagtgctatccgctgctgccgggtggtctgctggctatcgaggcgctgctgatcggcatgaccagcccggcgcacgtgcgggacgagatcgccggcaatctggaggtgctgctcctgctgatgttcatggtggcgggtatctactttattaaacagcttttgctgttcgtgtttacgcgcctgctgctggggatccgcagcaaaatgctgctatcgctggcgttctgcctggcggccgcgttcctctcggcctttctcgatgcgctgacggtggtggcggtagtgatcagcgtcgccgtcgggttctacggcatctatcaccgcgtcgcctcggcgcgcccggacgatagcgacctgctcgatgacagccatatcgagcagcactaccgtgaggtgctggagcagttccgcggctttctgcgcagcctgatgatgcacgccggcgtcgggaccgcgctcggcggcgtcatgaccatggtcggcgagccgcaaaacttgattatcgccaaagccgcgggctggcattttggcgagttctttcttcgcatggcgcccgtgaccctgccggtgatggtctgcggtctgttaacctgtctgctggtcgaaaagtatcgcctgtttggctacggcgaaccgctaccgccgacggtgcgcaaggtgctgcaggagtttgacgatcgcagccgcgcccagcgcagccgtcaggagcgactgcggctgattgcccaggcgctcattggcgtttggctgatcgtggccctggcttttcacctggctgaggtcggcctgattggcctgtcggtgatcatcctcgccaccacctttaccggcgttaccgatgagcacgccattggcaaggcgttcaccgaggcgctgccctttaccgcgctgctgacggtcttcttctccatcgtcgcggttatcatcgatcagcagctgttcacgccggtgatcgagtttgtcctgcaggcctcgccgcacgcgcagctgtcgctgttttatctgttcaacggcctgctgtcgtccatttcggataacgtgtttgtcggcacggtctacatcaacgaagcgaaagcggcgctcgaacatggcgccatcagcctgccccagtttgagatgctggcggtagcgatcaacaccggcaccaacctgccctcggtggccaccccgaacggccaggcggcgtttctcttcctgctgacttccgccctggcgccgcttattaggctctcctatggccgtatggtgtggatggcgctgccctacaccatcgtactgacgctggtcggcctgttatgcgtcgagttcaccctgatgccagtcaccgactggctgctggcgcacggctggctggtgacgcccagcctgccctga

SEQ ID NO: 138207 - DNA, 720 bp, Enterobacter cloacae
atggtcattaaggcgcagagccctgcgggtttcgcggaagagtacatcattgagagtatctggaataaccgcttccctcccggatcgattctccccgctgaacgcgagctttctgagctgatcggtgtcacccgcacaaccctgcgcgaagtattgcagcgtctggcccgtgacggctggctgaccattcagcatggtaagcccactaaagtgaataacttttgggaaacctccggcctgaatatcctcgaaacgctggcgcgcctcgatcacgacagcgtgccgcagctgattgataatctgctctccgtgcgcaccaacatttccacgatttttatccgcaccgcgtttcgccagcatccggataaagcgctggcggtcctggacagcgcccgggaggtggaggatcacgccgacgccttcgccgagcttgattataatattttccgtggtctggcgttcgcctccggcaacccgatctacggtctgatcctcaacggcatgaaggggttgtatacccgcatcggccgccactatttctccagcccggaagcgcgcagcctggcgctcggtttctatcatcagctggcgaaagtgtgtgaggctggcctgcatgaccaggtttacgagctggttcgtcgctacggccatgacagcggcgagatctggcaccggatgcagaaatcgctgcccggtgatttagccatgaatatgcgttaa

SEQ ID NO: 138208 - DNA, 1533 bp, Enterobacter cloacae
atggctacgattgactccatgaacagggacaccacccgtttaagcgatggacccgactggacgttcgagttactggaaacctacctggccgaagtggaccgggtcgccaagctctatcgtcttgacacctacccgcaccagatcgaagtcattacttccgagcagatgatggacgcctactccagcgtcggcatgcccatcaactatccgcactggtcgtttggcaaaaaatttattgagaccgagcaggcctataagcacggtcagcagggtctggcgtatgagatagtcatcaactccaacccctgtatcgcctacctgatggaggaaaacaccatcaccatgcaggcgctggtgatggcccatgcctgctacgggcataactcgttttttaaaaataactatctgtttcgcagctggaccgacgccagctcgatcatcgactatctgatctttgcccgtaagtacatcaccgagtgcgaagagcgctatggcgtcgacgaagtagagaaactgctcgactcctgccacgcgctgatgaactacggcgtcgaccgctataaacgtccgcaaaaaatctctctgcaggaggagaaagcgcggcagaaaagccgggaagagtatctgcaaagccaggtgaatatgctgtggcgcaccctgccgaagcgcgaagaggaaaaagcgattgaatcggctcgtcgctacccttccgaaccgcaggagaacctgctgtactttatggagaagaacgccccgctgctcgaaccgtggcagcgcgagatcctgcgcatcgtgcgtaaagtcagccagtatttctacccgcagaaacagacccaggtgatgaacgaggggtgggccaccttctggcactacaccatcctcaaccatctctacgatgaagggaaagtgactgagcgctttatgctggagtttctccacagccataccaacgtggtgttccagccgccgtacaacagtccgtggtacagcgggattaacccctacgcgctgggcttcgccatgttccaggacatcaagcgcatctgtcagtcgcccacggaagaggataagtactggttccccgatatcgccggttctgactggctggaaacgctgcatttcgccatgcgcgactttaaggatgaaagctttatcagtcagttcctgtcgccgaagatcatgcgcgatttccgcttctttaccgtgctcgacgacgatcacaacaattatctggagatctcggcgattcacaacgaagagggttatcgcgagatccgcaataagctctccgcgcagtataacctcagcaatcttgagccgaacatccaggtgtggaacgttgacctgcgcggcgaccgatcgctgaccttgcgctatgtgccgcacaaccgcgtcccgctggacaaaggccggcgcgaagtgctgaagcatgtgcatcgtctgtgggggttcgatgtgctgctggagcagcagaacgccgacggcagcattgagctgttggaccgctgcccggcgcggccgaacgcgctatag

SEQ ID NO: 138209 - DNA, 1299 bp, Enterobacter cloacae
atgcgtgtcgtcatactgggaagtggggtggttggggtagccagcgcgtggtatttgagtcaggcgggtcatgacgtgacggtcatcgaccgtcagcccggtccggcagaggagaccagcgcggccaacgccgggcagatttctcccggctatgcggcgccctgggcggcgccgggggtgccgctgaaggcgatcaaatggatgtttcagcgccatgcgccgctggcgatcggtcttgacggcacctcgttccagttgaagtggatgtggcagatgctgcgcaactgcgacacccgccactatatggagaacaaaggccgtatggtgcgcctggcggagtacagccgcgactgcctgaaggcgctgcgcgacaccaccggcattcagtatgaagggcgccagggcgggacgctgcagctgttccgtaccgccaaacagtatgaaaatgccacccgcgacatcgcggtgctggaggacgccggcgtgccgtatcagctgctggaagcgaagcggttggcggaggtggagccggcgctggctgaggtcagccacaaactgaccggcggcctgcgtctgccaaatgatgaaaccggcgactgccagctgtttaccacccgtctggcggcgatggcggagcaggccggcgtgaccttccgcttcaacaccgcagtggattcgctgctgcacgagggcgatcgcattgccggggtgaaatgcggcgatgagattatcaagggcgacgcctatgtgatggccttcggctcctactcgacggcgatgcttaaagggttggtggatataccggtctacccgctgaaaggctactcattgactattccgatcgctcaggaggacggcgcgccggtttcaactatccttgatgagacttacaaaatcgccatcacccgcttcgatcagcgcattcgggtcggcggcatggcggagatcgtcggttttaacaaagcgctgctgcagccgcgtcgcgaaaccttggagatggtggtgcgcgatctgttcccgcgcggcggccacgtggagcaggcgacgttctggacgggcctgcggccgatgacgccggacggcacgccggtggtcggccgcacagcgtataaaaatctgtggctcaacaccggccacggcacgcttggctggaccatggcctgcggctccgggcagcttatcagcgatctgatctccggccgcacgccggcgatcccttacgacgatctggcggttgcccgctacagccccggttttaccccggcgcgcccgcagcacctgcacggcgcacacaactaa

SEQ ID NO: 138210 - DNA, 1071 bp, Enterobacter cloacae
atgacccgtccggtagtggccagcatcgacctgctggccttgcggcagaatttacagatagtgcgtcgcgcggcccccgggtcgcgcctgtgggcggtggtcaaggccaacgcctacggccacggcgtggcgcgcgtatggagtgcgttaagcgcggcggatggtttcgccttgctcaacctggaagaggcgatcctgctgcgggagcagggctggaaaggcccgatcctgctgctggagggcttcttccatgccgatgagctggcggtgctggatcaatatcgtttaaccaccagcgtccacagcaactggcagattaaggccctgcaacaggcgaagctgcgcgcgccgctggatatctatctcaaggtgaacagcggcatgaaccggctgggctttatgcctgagcgggtccacaccgtctggcagcagctgcgggcgataagcaacgtcggcgagatgacgctgatgtcgcacttcgcggaggcggagaacccgcagggaattgtcgagccgatgcgccgtatcgaacaggcggcggaggggctggattgcccgcgctcgctggccaactcggcggcgaccctctggcatccggaagcgcattttgactgggttcgtccaggcatcgtgctgtatggcgcgtcgccttccgggcagtggcaggacatcgccaacaccgggctgaagccggtcatgacgctgcgcagcgagatcatcggcgtgcagaacctgcgtcccggcgaggcgattggctatggcggcctgtaccgcaccacccaggagcagcggatcggcatcgtcgcctgcggctatgccgacggctacccgcgggtggcgccgagcggcacgccggtgctggtggatggcgtacgtaccactaccgtgggacgcgtatcgatggatatgctggcggtcgatttaacgccttgtccgcaggccgggatcggcgcgccggtcgagctgtggggcaaagagattaaaatcgacgacgtggcggccagcagcggcaccgtcggctatgagctgatgtgcgccctggcgccgcgggtgccagttgtgaccctgtaa

SEQ ID NO: 138211 - DNA, 141 bp, Enterobacter cloacae
gtggtgcagcagctgctgggcgccgcgccggtggtgggcgaccaggtggagttcgccgggatggtgtggacggtagctgaaaaagagaacgatcacgtgctgaaggttggggtgcgggtcgcggaagacgaggcggagtga

SEQ ID NO: 138212 - DNA, 591 bp, Enterobacter cloacae
gtgctcgacagaatcaaagcctgctttaccgaaagcattcaaacccaaattgccgcagcggaagcactcccggacgccatctcccgggcggcgatgacgctcgtccagtccctgcttaacggcaacaaaatcctctgttgtggtaatggcacctccgccgccaacgcacagcattttgctgccagcatgattaatcgctttgaaacggaacgccctggtttacctgccattgcactaaataccgataatgtggtcttaaccgccatcgctaacgatcgcttgcatgacgagatctacgccaagcaggtgcgcgccctgggacacgccggcgatgtgctgctggcgatctctacgcgcggaaacagtcgggacatcgtcaaggcggtggaagccgccgtgacccgcgacatgaccatcgtcgcgttaaccggctatgacggcggtgagctggcgggcctgttaggtcaacaggatgtcgaaatccgcatcccctcccatcgcagcgcgcgtatccaggagatgcacatgctgaccgtcaactgtctgtgcgatttgatagataacactctttttccacaccaggacgattaa

SEQ ID NO: 138213 - DNA, 387 bp, Enterobacter cloacae
atggctcaagtaccagcagggaaaaatcgttccggccagctaagcaaacagaccggcgatgcctgggaaaaccaggctcgccgctggctggaaggccagggcctgcgttttatcgccgccaatgcccgcgagcgtggcggcgaaattgaccttatcatgcgcgacggcacggtcaccgtttttatcgaagtgcgctaccgccgtagcgcccggtacggtgatgcggcagccagcgtcactccgcaaaaacaacaacgactgcttaaagccgcccgtttgtggctctgccgacagaatgggagctttgagactgtggattgccgtttcgatgtggtagccttcaccggaaacgacatccaatggctaaaaaacgcctttggcgaatag

SEQ ID NO: 138214 - DNA, 2025 bp, Enterobacter cloacae
atggtaccgtcaacatttcttcgttctaagcccgcgcgctgcctgcccgtattgctggcgactcttatttttgctggctgcggcacccacacgcaggatcaaagcgcggcgtttatgcagggtacgtcgcaggccaactccagtttctacttacagcagatgcagcaaagcacgaatgatagcaagaccaactggcaattactcgccattcgtgcactactgcaggaagggaagaagcagcaggctatcgacctgtttaaccagctgccggcgaacctgaacagcactcaggcccgtgaacagtcgctgctggcggtggaagtgaagctggcgcagaacgattatcaggccgcccgtaatctgctggctaagatcgatccgacaaaccttgagcagcctcagcaggcgcgctactggcaggcgcaaatcgatgccagccagggcaaaccatcgctgaccctgctgcgcgccttaatcgcccagcagccgctgctgagtgacgccaaacagcgccagaaaaatattgatgcgacctggcaagcgctcacctcgatgccccaggaccaggccaatgcgctggtgatcaacgccgatgaaaatatcctccagggctggctggatctgcagcggatgtggtttgacaaccgcaacgatccgacgctactgaaagcgggcgttaaagactggcagacgcgctatccgcaaaacccgggcgctaaaatgctgccgacggcgcttgtgaatatgcaaaactataagcctgcgtccatcaacaagattgcgctttttctgccgctgaacggtcaggcgtcgatcttcggccgcactatccagcagggctttgaagccgctaaaaacggcgcgccgtcggtgacgggcagcgcggttcccgcccaggtcgcccaggcggcgaatgtctccggtaatgatgatgtggtgagtccgtcgcaggcagaaatcagcgatcttaccgccaccggaagccgcgctgatccggttcaggccccgacgcaggaccaggcagcgcctgctgcggaaccggcagcccaggcgccggcaacatccaccacgccgcagactaccgcttccccggccacccagccggttaccgcgccggccgcacagccgcagcccgtggtcgcaaccgccgctaacccttctgcggaactgaaaatttacgacaccaccagccagccgataagccagctgctcgcccaggcgcagcaggatggcgccaccctggtggttgggccgttgctgaaagaaaacgttgaagaggttatcaagagcaacacgccgctcaatgtgctggccctcaaccagccggaaaaagtcgaaagccgcgctaacctctgctatttcgcgctttctccggaagacgaagcgcgtgacgccgcccgacatatccaccaacaggggaaacagaccccgctgctgctggttccttttggatccacggccgagctgcgcgccggcgtgaacggcggcgggggcattgcgctgagcggcaccccggtctccaccctgccatcagcgcagaacagcatcctcggcagtgcggatgagatgccggtaagcagcggcggcagcgtcgatgcggcctatatcctcgccaccccggaacagattgcctatatcaaaccgatgatcgccatgcgcaacggcagccagagcaatgtcaccctgtacgccagctcgcgcagcgcccagggcaccgcggggccggatttccgtctggagatggaaggcttgcagtatagtgagatcccaatgctggccggcagcaatccgtcgctaatgcagcaggcgctgtccgcggtgcgtaatgactactcgctggcgcgtctgtatgccatgggcgctgacgcctggtcactggcaaatcacttcacgcaaatgcgccagacgcctggcttcgagctgaacggcaataccggcgatctgacggccaaccaggattgcgtgattaacaggaaactgtcatggctcaagtaccagcagggaaaaatcgttccggccagctaa

SEQ ID NO: 138215 - DNA, 864 bp, Enterobacter cloacae
atgaaacaacacgaatcagcggataattctcaggggcagctctatattgtgcccactccgataggaaatctgtctgatatcacgcagcgtgcactggaagtgctgcaagccgttgatttaattgcagcggaagatacccgtcataccggtttgctgctgcaacattttgcgataaacgcccgtttgtttgcgcttcacgaccataatgagcagcaaaaggcggaaaccctgcttgccaaactgaaagaagggcaaaacatcgcgctggtttccgatgccggcacgccgctgattaacgatcctggttaccatctggtgcgcacctgccgcgaagcgaatattcgcgtggtgccgctgccgggcccctgtgcggctatcgccgccctgagcgccgccggcctgccttccgaccgtttctgttatgaaggcttcctgccggcgaaatcgaaaggccgccgcgataccctgaaagcgctggaagaagagccgcgcacccttattttctatgagtcgacccaccgtctggtggagagtctggaggatatctgcgcggtactgggagaatcccgctatgtggtgctggctcgtgagctgaccaaaacctgggagtcgatccatggcgcgccgattggtgagctggtggcgtgggtgaaggaagatgaaaaccgtcgcaaaggcgagatggtgctgatcgtcgaaggtttcaaggctcaggaagaggcgctgccggcggccgcgctgcgtactctggcgctgctgcaggcggagctgccgctgaagaaagccgccgcgctggccgcggaaatccacggcgtgaagaaaaacgcgttgtataagtacgccctggagcagcagggggagtga

SEQ ID NO: 138216 - DNA, 438 bp, Enterobacter cloacae
gtggtggaaaaagcgctggggtcgattgccaaatcagggaaaagcgccatcgttgaggtgctctctccggggcagcgtccgaccaaacgcggcctcatttacgccgcaacccccgccagcgattttgtctgcggcacccagcaggtagcctctggcatcacggtgcaggtattcaccaccggtcgcggtacgccgtacgggctgatggcggtaccggtgataaaaatggcgacccgtaccgagctggccaaccgctggtatgacttaatggacattaacgccgggaccatcgccactggcgaagagacgattgaggatgtcgggcggaagctgttcgaatttattctcgacgtcgccagcggacgcaaaaaaaccttctccgatcaatggggcctgcacaaccagctggcggtatttaacccggcgccggtaacctga

SEQ ID NO: 138217 - DNA, 1179 bp, Enterobacter cloacae
  misc_feature (1086)..(1095): n is a, c, g, or t
atggctgacattgcaattcgacaacaatcgccgaccgcgttttatattaaagttgacccgacagataatgtggcgattattgtcaacgatcgcggcttaaccgccggaacgcgtttcccggacggcctgacgctcgtcgagcatatcccgcagggtcacaaagttgccctggtggatatccccgcccatggtgaaatcatccgctacggcgaagtcattggctatgccgtacgcgatatcccgcagggaagctggattgacgagtcgctggtggagctgcccaccgccccgccgctgaataccctgccgctggccactaaagtgcctgaaccgctaccgccgctggaaggttacaccttcgaaggctaccgcaatgctgacggcagcgtgggtaccaagaatctgctgggtattaccaccagcgtgcactgcgtcgctggcgtggtcgattacgtggtgaaaatcattgaacgcgacctgctgccaaactatcccaacgtcgatggcgtggtgggcctgaatcatctctacggctgcggcgtggcgattaatgcgccggcggcggtagtgccgattcgcaccattcataatatcgccctcaacccaaacttcggcggcgaggtgatggtcattggcctcggctgtgagaagctgcagccggaacgcctgctgcagggcacggaagacgtcaaaagtatcccggtggacagcgccagcatcgtcagcctgcaggatgaaaagcatgttggttttaaatcgatggtcgatgacattctgcaggtcgccgagcgccacctggcgaaactgaaccagcgccagcgggaaacctgcccggcctctgagctggtggtcgggatgcagtgcggcggcagcgacgccttttcaggcgtgaccgccaacccggcggtaggttacgcgtccgacctgctggtgcgctgcggggcgacggtgatgttctcggaagtgaccgaagtacgcgacgccattcatctgttgaccccgcgggcgattaacgaagaggtcggtaaacgtctgctggaagagatggcctggtacgataactatcttgatatgggcaaaaccgannnnnnnnnncggcaacaaaaaaggcggtctggccaacgtggtggaaaaagcgctggggtcgattgccaaatcagggaaaagcgccatcgttga

SEQ ID NO: 138218 - DNA, 150 bp, Enterobacter cloacae
atgacttatggcataagcacaattatggctttaaataataactttatattgtggttatgcatagtgtctggcgggggcgtgctgattatactgagtcatgtttttgaggtgatcgatatgcgaatagacagtttcaatatcgtcttttaa

SEQ ID NO: 138219 - DNA, 1332 bp, Enterobacter cloacae
atgattttggattctacattagatgaaaaaaaaggaataccgacccgctatttaattctgttgatgatatttgtggtgacggcagtgaactatggcgaccgcgcgaccttgtctatcgccggtactgaagtcgcgaaagagctggggctcagcgcggtgtcgatgggatacattttttccgccttcggctgggcttatctgctgatgcagatccctggcggctggctgctggataaatttggctcgaaaaaggtttattcatacagtctgtttttctggtcactgtttaccttcctgcaaggctttattgatgtgttcccgctcgcctgggccggggtctccatgttctttatgcgttttatgctgggcttttccgaagcgccctcgtttcccgccaacgcccgcattgtggcggcctggtttccggccaaagagcggggtacggcttcagctatctttaatgccgctcagtacttctcgctggctctgttctcgccgctgctcggctggctgaccttcgcgctgggctgggaacatgtctttaccgtgatggggataatagggtttgtgctcaccatcatctgggggaagtttgtgcataaccccaccgatcatccgcgaatgtccgccgcggagctgaaatatatctcagaaggcggcgcagtggtcgatatggaccataaaaaagaggccaccccggcggccgggccgaagatggactatatccgccagttgctgactaaccgaatgatgttaggcgtatttttcggtcagtatttcctgaataccattacatggttcttcctgacgtggtttccgatctacctcgtgcaggacaaaggaatgtcgattctgaaagtggggtttgtggcttcgattccggcgctgtttggctttgctggcggcgtactgggcgggctgttttcggattatctgattggccgcggctgcacgctgacttttgcgcgtaagctgcccattgtgctgggaatgctgctggcgtcgtccatcatcctgtgtaactacacggccagcacgccgctggtcattacgcttatggcgctggcgttctttggcaaaggctttggcgcgctgggctggccggttatctcggatgtcgcgccgaaggagattgttggcctgtgcggcggggtattcaacgtctttggcaatgtggcctcgatcgccacgccgctggttattggctacatcgtgagcgaactgcactcatttaatggcgcactgatttttgttggcggctccgcgctgatgatgatggtctgctacctgtttgtggttggcgatatcaaacgtatggaattgcagaagtaa

SEQ ID NO: 138220 - DNA, 771 bp, Enterobacter cloacae
atggataacgcaatttttccgaacaaatttaaggccgcgctggcggcgcatcaggtgcagattggctgctggtgcgctttggctaacccgattagcaccgaggtgctgggtctggcggggttcgactggctggtgctggacgcggaacacgcgccaaacgacgtcaccacgctcattccgcagctgatggccctgaaaggtagctccagcgcgcaggtagtccgtgtgccgaccaatgaacccatcatcatcaagcgtatgctggacatcggcttctataacttcctggtgccgtttgtcgagacggctgaacaggcggcgcaggcggtggcttcgacccgttatccgccggaagggatccgcggggtctccgtttcccaccgcggcaatatgtttggcaccgtgccggactacttcgcccagtccaacaagaacatttccattctggtgcagattgagagccagaccggagtagacaacgtcgaggcgattgccgcgaccgagggcgtggacggtgtgtttgtcggcccgagcgacctggccgccgccttaggccatttgggcaatgccgcccatcctgaggtgcagcgcgctatccaacatatcttcgccagcgcgaagaagcacggtaagccaagcggcattctggcgccagtggaagccgatgcgcgccgctatctggaatggggcgcgaccttcgtcgccgttggcagcgatctgggcgtcttccgttctgcaacccagaaacttgccgacgcgtttaaaaaataa

SEQ ID NO: 138221 - DNA, 891 bp, Enterobacter cloacae
atgacaatcaaagtaggttttatcggtcttggcattatgggcaaaccgatgagcaaaaatttgctgaaagcgggttactcgctggtggtgtctgaccgtaacccggaagcgattgccgacgtgatcgccgctggcgctgagaccgcgacgacgccgaaagcgattgccgaacagtgcgaggtgatcatcaccatgctgccgaactctccgcatgttaaagaggtggcgctgggtgaaaacggcattattgaaggggcgaaaccgggcaccgtggtgatcgatatgagctccattgcgccgctggcgagtcgggaaatcagcgaagcgctgaaagccaaaggtattgatatgctggatgcgccggtgagcggcggcgaaccgaaagccatcgacggcacgctgtcggtcatggtcggcggcgataaagcgatcttcgataaatactacgatctgatgaaagcgatggccggctccgtagtgcataccggcgatattggcgcgggcaacgtcaccaaactggctaaccaggtgattgtcgcgctgaacatcgcggcgatgtctgaagcgctgaccctggcgactaaagccggcgtcaatccggatctggtttatcaggctattcgcggcggtctggcgggcagtaccgtgctggatgcgaaagccccgatggtgatggaccgtaacttcaaaccgggtttccgtatcgacctgcatattaaagatctggccaatgcgttggatacctcacacggcgtgggcgcccaactgccgctgacggcggcggtaatggagatgatgcaggcgctgcgcgcggacggtctcggcactgcagaccatagcgcgctggcgtgctattacgaaaaactggcgaaagtggaagtcactcgctaa

SEQ ID NO: 138222 - DNA, 1146 bp, Enterobacter cloacae
atgaaaatcgtcattgccccagactcttacaaagaaagcctttctgccagcgaggtagctcaggcgatagaaaaaggatttcgggaaattttccctgatgcacagtatgtttccctgcccgtcgccgacggcggcgaggggacggtggaagccatgattgccgccacccagggaaaggaacatttcgcatgggtaacgggtccgctgggtgagagagtgaaggcctgctggggcatgtccggcgacggcgtcaccgcgtttattgagatggcggcagccagcggtctggggctcgttccgcccgacaaacgtaacccgctcatcaccacttcacggggtaccggggagctaatattacaggcgctggagcatggtgcggaacggatcattatcggcatcggcggtagtgcgaccaacgacggtggggcgggtatgatgcaggcgctaggcgcccgcctctgtgacgccgagggacaagagatcggccatggcgggggcagtttgagccgtctgagccggatcgatctttccgccatcgatccgcgcttacgtgacaggatgatccacgtggcctgcgatgttaccaatccgctggtaggcgagcgtggggcgtcgcggatctttggcccacagaaaggggcgaccgaggcgatgatcgtcgagctggatcgtaatctggcgcattatgccgacgtcattaagacgtcgctgcaggtggacgtgaagtcgatccccggcgcgggagcggccggcggcatgggtgcggcgctgatggcctttctcaatgcggagctgcgcagcgggattgagatcgttaccgaggcgctgaagctggaagaacaaatccatgactgctcactggtggtcaccggggaagggcggctcgatagccagtctgttcacggtaaggtgccggtgggggtggcccgggtggcgaagaaataccgtaagccggtgatcggtattgctggcagcctgactcacgatgtcggcgtggttcaccagcacggtatcgatgccgtattcagcgtgttaacttccgtttcgacgctggaagaggcatttcgcggggcgtttgataatatttaccgcgcgtcgcgtaatattgctgccaccctgcaggttgggatgaccactgagggatga

SEQ ID NO: 138223 - DNA, 393 bp, Enterobacter cloacae
atgcacgacggcgaagaaaggaaaaaactttcgctgtaccttcacccggaggactctgccgatcgtcttgcactggctgaaatcgaaactgtcccccggaaaaaccggggggagttatatcggcaggctttgataaccggcctgataatgcatcagcttgatgcgcgaattcccgccgtgttaaccgcactattcaccagagaactgaatgcggatgaggtcattagtcagattgctacgataacaggctggaaaccctcctcaggcgatttgaaagaggtactgaaggcgttaggagggcttcagagtacagcttcaccagaacactctcaggatgacggtgagcaggcccgtctgaaagcggccagggcgaagatgcaaaacctgatctga

SEQ ID NO: 138224 - DNA, 975 bp, Enterobacter cloacae
atgaaaattttttgcgatgatggttctacaaacgtgaaacttgcctggtttgaagggaagacgctgaaaagtgcggtatcagtgaactcttttcgccataactggaaagtcgagggcttaggcagcagtcgtacctataactatctgctcgatggccgcaaatatacttacgacccggtcagcgaagctgcgatcagcacgactcacattgagtaccagtactctgatacaaacgtgctggcagttcaccacgcattactgaacagtggaattgaaccccaggagatagatctcaccgttacgttacctatcagcgagttttacacggccgactgccagaaaaacacgcttaacattgagagaaaaattagcaacctgatgcgggaagtcaccctgaacaaaggggtaacttttaccattaaaagcgttgaagtgatgcctgaatcactcccagctgtctttacacgcctggttgctgacaatgtgggtcagtacgaaaaatcactggttatcgatctcggtggtacgaccctggatgtcggggttattgttggccagtttgaggacgtttcggcagtacatggtaatcctgatattggcgtatcaatggtcacgaaagccacgctcactgcactgaaaatggccagcagtgataccagtccaatgattgctgacgagctgatcaaaaacagggagaacctggattttgtggggcaggttgtaaatgaggctgctaaacaaaatctggtactggataccattgatacagcgatacataagctgggcgagctggttgttgatgatttgctgcagtatcgaaacgtaaaccgcgtatacattgttggtggcggtgccgcacttattgccgatgctgttcgtaaggcatggaaccaccttggcgaaaaggttgttcttatggacgaacctcagacagcgctggtccaggcgattgcacgcttcaaagcggaggagtaa

SEQ ID NO: 138225 - DNA, 375 bp, Enterobacter cloacae
atggctgatgcatcaaaacttaaaactaaaagagcccgtggtgggctgggtgtacccccaggccctgacgaagtggctaccagcctgaacgcgcctgagatagctcctgcagtcgctgccactgatgtacagatacagcaggcggacttatcgccagtgcaccatgatcctgtgggtacacaaacagtgaccgaggcatatacccgccgcgatggccgttctgccagaaaaacaaacaggacgctggcatttgcaacacgtgtcacacctgctttcgaccaggagatcagggatatcgcagagcgtgaggggttgaaactggtggaagttctggaaaaagcagttgaggcatataaggaaaaacagggatactaa

SEQ ID NO: 138226 - DNA, 633 bp, Enterobacter cloacae
atggcctggatagttggttttatttcccagaaaggtggtgtgggcaaaagcactaaagcgagagcgttagcgcgtgaagcatccgcctgtggcatcaaaacaaaattagctgacctcgacctggaacaggcaacgagtgctgagtggcaccgccgacgtctgtcagctggtttaccaccggttgcttcagtcgaagtattttcaacagcaaagcaggccatagaatctgccggcgagtttgatcttctcattcttgatggaccagctcgtgcaagcaaagggacttcggaaattgctaaggtggccgaccttatcgtccagccaacgggggcttcccttgacgatcttgtcccggccattaaagttttcaacgcgctggtaaaagaaggagtgccacgttcaaaactggtctttgctttaagccgtgtaggtaccgaagcggaagagctggatgctcgtgcatatatcagtgaggcgggttatgaaactttagctggatgtctttttgagaagccagcttacagaaaagcgatgaactcaggacttgcagtgacagaaacacgctataaaggtttaaacgagagagctgatgaacttatccaggcgctcatcgataagattggagaagagtaa

SEQ ID NO: 138227 - DNA, 366 bp, Enterobacter cloacae
atgatggaatatttcaagattttcagtaccgggaaacaactatggtggaggcaggacgggtttggatacaccgatgagcaagatgccggattctggcctgagagttctctgcgagagatgggactggatgagactcagaccgctgtccgttttgtcccccccgcgcagacactggcgctaattgagcgtggcctctatgagtttggtgatctctctcccatagatggatgcaccaaaggtgaatctgagcggatcgaactgcgccgtgaacgtgaggaacgctggcagcgtgaaatggacgatatggaacccgaatatgtccggccctacaaccctgcgtggatgcaccagatccccgttgactga

SEQ ID NO: 138228 - DNA, 393 bp, Enterobacter cloacae
atgaacacaaccagtgacgaaacacagacaggcacggacgtgatggacgtcgccttacgcaccatgcgcaagtacggcatgaatatcatcaccgccacgcagcatttggatgttaatggttacgtgaaatctgacccgcggatgcccagaacgcggctgcgccgctacctggggcagtatggcctgcgcggtgaggcgctgaacagggaggtcagacgtatcgttgcggggcctgagcgacgcgacagtaagctgaaggacgggatttactatacctggccttatggctgggagccctgtgattttacgccgatgatgcgccgtatttttcgcgggaagcggacccgccatgtgatgatgttagatgaaatgccagcgctgtttctcaactaa

SEQ ID NO: 138229 - DNA, 945 bp, Enterobacter cloacae
atggcgaagatccaggccagaaatgttgacgatgcgctgtttgcgcgcattgagcagtcagcgatgaaaaatgaacgttcactcgaaggggagatccgcctggcgctggccagacagtatcctgccgggaccacctctccggaaatcctctccagccggcaacagtggcagaaggaatgtggcgggcgtctgcgcgccctgtttgaccgtctgtccgctgacggctttttcccgggggccgggcatcccgggccgacgcggatcgccgaccaggtacggatagctcaccggttacatgtttccccgggactgatcctggactgtatcgatggcgccggtgagttaacccgtgatctagctgaacggattgaaagccggttcggcaccagtgcggactggctgactaccggtgacgggatgatgttcccgctggtgatactgggaacgtattccggtgtcagctgggaggaatttttcttcccggatgatgatgaaaggtatgtctttgagttcatccgcatcgacggtgggcgccatgatggcaccctgatgatcctgcgccagcatgagcagaacggtcgtatcactgccggcgtggtaacagaggcgtttttccttggtgccggtatggggtcgggaggatacggaaacctgaaagattttttgttgttcctcagacaacactgcgggaatctggtcatgaatgcctatgtgttctcgcccccggagccggattttgatttctggtccgtcatgggtcagcaccatccggtatggttccgtgacgcaaagcgtcgctccccttcccgctggctgcagcaggtactcagtggtgaagatccgggggaatggtttcagggcggctggacaccaatcctgaaggaagtggcagcggccaccgggccggagaccgcttccgggcatactgacccccaggaagaatga

SEQ ID NO: 138230 - DNA, 249 bp, Enterobacter cloacae
atggtaactattcgtttagcacgtcacggcgctaaaaagcgtccgttctaccaggttgttgtcaccgacagccgtaatgcacgcaacggtcgcttcatcgagcgcgttggtttcttcaacccgatcgctaacggtgcggaagaagaaactcgcctggatctggatcgtatcgctcactgggttggccagggcgctactgtttccgatcgcgttgccgcgctgatcaaagccgctaacaaagcagcttaa

SEQ ID NO: 138231 - DNA, 1365 bp, Enterobacter cloacae
atgtttgataatttaaccgatcgtttgtcgcgtacgctgcgcaacattagcggccgcggacgccttacagaagacaatattaaagacaccctgcgcgaagtgcgcatggcgctgctggaagcggacgttgcgcttccggtggtccgtgatttcatcagccgcgtcaaagagagcgcggtcggccatgaagtcaataaaagcctgaccccgggtcaggagttcgtcaaaatcgtccgcaacgagctggtggcggcgatgggcgaagagaaccagacgctcgacctggccgcgcagccgccggccgtggtgctgatggcgggcctgcaaggtgctggtaaaaccaccagcgtcggtaagctggggaaattcctgcgcgagaagcacaagaagaaagtgctggtcgtttccgcggacgtttaccgcccggcggcgatcaaacagctggaaaccctggccgagcaggtcggcgtcgatttcttcccgtctgatgtcgggcagaagccggttgatatcgtcaacgcggcgctgaaagaagcgaaactcaaattctacgacgtgctgctggtggataccgccggtcgtctgcacgttgacgaagcgatgatggacgaaatcaagcacgtccacgccgccattaacccggttgaaaccctgttcgtcgtcgatgcgatgaccggtcaggatgcggcgaataccgcgaaggcctttaacgaagcgctgccgctgaccggcgtggtgctgactaaagtggacggcgacgcccgcggcggcgcggcgctgtcgattcgccatattaccggcaagccgattaaattcctcggcgtcggcgagaaaaccgaagcgctggagccgttccatccggaccgcgtcgcttcccgtatcctcggcatgggcgacgtgctgtcgctgatcgaagatatcgagagcaaggttgaccgcgcgcaggccgagaagctggcctccaagctgaagaaaggcgacggtttcgacctcaccgacttccttgagcagctgcgccagatgaaaaacatgggcggcatggccagcctgatgggcaagctgccgggcatggggcagatcccggacaacgtgaaagcgcagatggacgacaaagtgctggtgcgtatggaagcgatcatcaactcgatgaccctgaaagagcgcgctaagccggaaatcatcaaaggttcgcgtaagcgccgtatcgccgccggctgcggcatgcaggtgcaggatgtgaaccgtctgctcaagcagttcgacgacatgcagcgcatgatgaagaagatgaagtcgaaaggcggcatgatgaagatgatgcgcgggatgaaagggatgatgccgccaggcttcccgggtcgttaa

SEQ ID NO: 138232 - DNA, 792 bp, Enterobacter cloacae
atgcctgtttttgctctactcgcccttgtcgcctactccgtcagcctcgcgctgattatccccggcttgctgcaaaaaaacagcagctggcggcgaatggcgattttatctgcgactatcgccttgatctgccatgcttttgcgctggaagcacggatattccccggcggcgagagcgggcaaaatctcagcttactgaacgtcgggtcgctggtcagcctgatgatctgtacggtgatgactatcgtggcctcgcgcaatcgcggctggctgctgctgcctatcgtctatgccttcgcgctgatcaacctggccttcgccacattcgtgcctaacgaatatatcacccacctggaaaccaccccggggatgctggtgcatatcggcctgtcgctcttctcgtacgccacgctgatcattgccgcgctgtatgcgttgcagctggcgtggatcgactaccagctcaagaataaaaagctggccttcagcagcgaaatgccgccgctgatgagcattgagcgcaaaatgttccacatcacccaggtcggcgtggtgctgctgaccctgacgctgtgcagcggcctgttctacatgcacaatctgttcagcagcgaaaatattgataaagcggtgctgtcgattattgcgtggttcgtctatatcgtcctgctgtgggggcactatcatgaagggtggcgcggacgtcgtgtggtctggttcagcgtcgctggcgccggtctgctgacgctggcctattttggtagccgcgtgctgcagcagttcgtgagctaa

SEQ ID NO: 138233 - DNA, 1287 bp, Enterobacter cloacae
gtggaacatatctccaccaccacgctgatcataacgctgatcgtcatggtgattatctctgcctatttctccggttccgaaaccggcatgatgacgctgaaccgctaccggttgcgccacatggcgaaacaaggcaaccgccccgccaagcgcgtggagaagctgctgcgcaagccggaccgcctgattagccttgtgctgatcggcaataaccttgtcaacattctcgcctcggcgctgggcaccatcgtcggcatgcgcctgtacggcgacgccggcgtcgcgatcgccaccggcgtacttacctttgtggtgctggtatttgccgaagtgctgccgaagaccatcgccgccctctatccggaaaaggtcgcctaccccagcagcttcctgttggcgcccctgcaggtgctgatgatgccgctggtgtggctgctgaataccatcacccgcatactgatgcgcatgatgggcatccgcaccgataccgtcatcagcagcgccctgagcaaagatgaactgcgcacgattgtgaatgaatcccgttcacaaatctcacgacgcaatcaggatatgctgctgtcggtgctggacctggagaaggtcagcgttaacgacatcatggtgccgcgcaatgagattgtcggcatcgatatcaatgatgactggaaatctatcgtccgccagctgacccactccccgcatggccgcatcgtgctctaccgcgattcgctggacgatgccatcagcatgctgcgcgttcgcgaagcctaccgtctgatgacggagaagaaagagttcacaaaagagatcatgctgcgggcggcagatgagatctactttgtgccggaaggcacgccgctcagcacccagctggtgaaatttcagcgcaataaaaagaaagtcggtctggtggtcgatgaatacggcgatattcaggggctggtcaccgtcgaagatattcttgaagagattgtcggcgacttcaccacctccatgtcacccaccctggcggaggaagtgaccccgcttaacgacggcacggtgattatcgacggcagcgccaacgttcgcgaaatcaacaaagcgtttaactggcacctgccggaagatgaagcgcgcaccgtcaacggtattatcctcgaagcgctggaagagatcccggtcccgggcacccgcgtgcgcattgagcagtacgatatagatatcctcgacgtgcaggacaacatgatcaaacaggtgaaagtgatgccggtgaaatcattacgcgagagcgtcgcggagtag

SEQ ID NO: 138234 - DNA, 591 bp, Enterobacter cloacae
atgagtagtaaagaacagaaaacgcctgaggggcaagccccggaagaaattatcacggagcagcacgacgacgttgaggcggtagagcctgaagtttcggctgagcaggtggatccgcgcgatgaaaaaattgcgaatctggaagcccagctggctgaagcgcagaaacgtgaacgtgaagtgatgctgcgtgccaaagccgacgaagataacctgcgtcgccgtaccgagcaggatatcgagaaagcgcacaaattcgcgctggaaaaattcgtcaatgaactgctgccggtgatcgacagcctggaccgcgcgctggaagtggctgacaaggctaacccggagctggcgccgatggtggaggggatcgaactgaccctgaaatctatgctggacgtagtgcgtaagttcggcgtggaagtgatcgccgacaccaacgttccgctggatccgaacgtccaccaggccattgcgatggtcgagtctgaagatgtggcggcgggcaacgtgctggccgtgatgcagaaaggttataccctgaacggccgtactattcgcgccgcgatggtgacggtagcgaaagcgaaataa

SEQ ID NO: 138235 - DNA, 879 bp, Enterobacter cloacae
atgaagaaccatttcaagtgtatcggcattgtgggacatcctcgtcaccccaccgccctgaccacacatgaaatgctctggcgctggctgtgcagcaaagggtatgaagtgctggttgaacagcagatcgcccatgaacttcagctcagcaacgtgaaaaccggcacgctggcggagattggccaacaggccgacctcgcggtggtggtgggcggcgacggcaatatgctcggcgcggcgcggaccctggcccgttacgacattaacgtcatcggcattaaccgcggtaacctcggctttctcaccgatcttgacccggacaacgccctgcagcagctcgccgacgtgctggaaggccactacatcgccgagaaacgctttctgctggaggcccaggtgtgtcagcaggattgccagaaacgtatcagcaccgccatcaacgaagtggtgctgcaccccggcaaagtggcgcatatgattgagttcgaagtctatatcgacgaagtctttgcgttctctcagcgatccgatggcctgattatctccactccgaccggctccaccgcctattcgctgtcggccggcggcccaatccttacgccgtcgctggacgccatcaccctggtgccgatgttcccgcacaccctttcagcgcgaccgctggtgatcaacggcgacagcaccatccgcctgcgcttctctcaccgctgcagcgatctggagatcagctgcgacagccagattgccctgccgatccaggatggcgaagatgtcctcattcgccgctgtgattatcacctcaatctgattcaccctaaagattatagctatttcaatacattaagcaccaagctcggctggtcgaaaaaattgttctga

SEQ ID NO: 138236 - DNA, 1662 bp, Enterobacter cloacae
atgttggcgcaactcaccatcagtaattttgctatcgttcgtgaactggaaattgatttccacagcggcatgaccgccatcaccggggaaaccggcgccgggaaatccattgccatcgacgcgctggggctgtgcctcggcggcagagcggaagccgacatggtgcgtcgcggcgccacccgtgccgacctgtgcgcgcgcttcgcgctgaaagatacccctgccgcccagcgctggctggaagagaatcagctggagagcgggcgtgagtgtttacttcgccgggtgatcagcgccgacggccgctcgcgcggcttcatcaacggcaccgccgtcccgctctcgcagctgcgcgagctgggccagctgctgatccagatccacggccagcatgcccaccagctgctgaccaaacccgaacaccaaaaaacgctgctcgacggctataccggtgagtatgcgcttactcagcgtatggccgagcactatcgccagtggcaccagagctgccgcgagttggcccagcatcagcagcagagccaggagcgcgccgcccgcgccgatctgctgcagtatcagcttaaagagctgaacgaatttaacccgctgccgggagaattcgagcagattgacgaagagtacaagcgcctggccaacagcggccagctgctcagcacctgccagcacgcccttacggtactggcggacggcgaagaggccaatctgcagagccagctttataccgcgaagcagctggtcagcgagctggtgggcatggacagcaagctttccggcgtcctggatatgctggaagaggcggccattcagcttagcgaggccagcgacgagttgcgccactaccatgaccgtctggatctcgatccgaaccgtctgtttgaacttgagcaacggatttcccgacaaatcgcgctggcgcgtaaacatcaggtgatgccggaagagctgccggcggtttatcaggcgatgctggaagagcagcgcctgctggacgacagcgccggctcgctggaatccctcagccagcaggtggtcgaacatcatcagctggcgctggagaccgcacgccagctgcatgccctgcgccaggccagcgccgacgagctgacccagcttatcaccgaaagtatgcactcactttcgatgccgcacggggtcttcgcgattgaggtcgcgttcgatgaacgccatctcaccgccgacggcgccgaccatattgagttccgcgtcaccactaaccccggtcagccgctgcagccaatcgccaaagtggcctccggcggcgaactgtcgcgcattgcgctggcgattcaggtgatcaccgcgcgtaaaatggaaaccccggcgctcatcttcgacgaagtggacgtcggcatcagcggcccgaccgccgccgtggtcggcaagctgctgcgccagctgggcgagtccacgcaggtgatgtgcgtgacccacctgccgcaggtcgcaggctgcggccaccatcatttctttgtctgcaaagagaccgatggcgagatgaccgaaacccatatgcagccgctggataaacgtgctcgcttgcaggagctggcccgtctgctgggcggcagcgaagtcacgcgcaacaccctggcgaacgcgaaagagttgcttgcggcgtaa

SEQ ID NO: 138237 - DNA, 342 bp, Enterobacter cloacae
atgcgctgtaaaacgctgactgctgccgcagcggttcttcttatgttgaccgcaggctgttccactctggaacgagtggtttaccgtcctgacatcaaccagggtaactatctggcaccaaacgatgtagcaaaaattcgtgtcggtatgacgcaacagcaggtagcttatgctctggggacgccaatgatgacggatccgttcggcaccaatacctggttctatgtcttccgtcaggagccgggccaccagaaagtgactcagcagaccctaaccctgaccttcaacagcggcggtgtgttgactaacattgataacaagcctgcgctgaccagtcagtaa

SEQ ID NO: 138238 - DNA, 291 bp, Enterobacter cloacae
gtgccggctaatattcgtgttgaagtcgcctacgcgctgcctgaaaagcagtatctgcagcgggtcacgctggacgagggggcgacggtcgagcaggcgattatcgccagcggtctgctggcgctgcgtgatgacatcgatctggcgaaaaacaagctgggtatctatagtcgtccggtaaagctgcatgacgaagttcacgacggcgaccgggtggaaatctatcgtccgctgatcgcagacccgaaagagctgcgtcgccagcgggcagagaaaagcgccgcaaagtaa

SEQ ID NO: 138239 - DNA, 438 bp, Enterobacter cloacae
atgcctcagattagccgtactgcgctggtgcctttcagcgcggaacagatgtatcaactggtaaacgatgtgaagtcctatcctgattttctgccaggctgcaccggtagccgcgtgctggaattggggccgacgcaaatgacggcggcggttgatgtgtccaaagccggcatcagtaagaccttcaccacacgcaatacactgaccagcaaccagagcattttgatgagcctggtggatggcccgttcaagaagctgattggcggctggaagtttattccgctgagccccgaggcctgcaaaatcgaattccatctcgatttcgagtttaccaataaactgattgagatggcttttggccggatcttcaaagagctggccgctaacatggtgcaggcgttcacttcgcgcgccaaagaggtttacagtgccggctaa

SEQ ID NO: 138240 - DNA, 483 bp, Enterobacter cloacae
atgactaagaaaaaagcccacaaacctggatcagccaccattgcgctgaataaacgcgcccgtcacgaatactttatcgaagatgaatacgaggctggtctcgccctgcagggctgggaagtcaaatccctgcgtgcaggtaaagccaacatcggcgatagctatgtcatcctgaaggatggcgaagccttcctgttcggcgccaactttacgcctatggccgtggcttccacccactatgtctgcgacccgacgcgcacccgtaagctgctgctcaaccagcgcgaactcgacacgctgtacggccgcattaaccgcgaaggttacaccgtcgtcgccctgtcgctgtactggaagaacgcctggtgcaaagtgaaaatcggcgtcgccaaaggtaagaaacagcacgacaagcgtaccgacctgaaagatcgtgaatgggcgctggataaggcgcgtattatgaagcacgccggacgttaa

SEQ ID NO: 138241 - DNA, 306 bp, Enterobacter cloacae
atggctacagtaacagtgacgtttaccattaccgaattgtgcctgcgtaccggggtgtcggaagaggagctgacggagatcgtcggcttagggatgattgagccacaccagccgcaggcggacacctggctgttcgacgacagcgcggtgacgatcgtgcatcgcgcggtacgcctgcgtaacgagctggagctggactggccgggaattgcggtggcgctgaccctgctggatgagaacgcgcggctgacccgcgaaaatcgcctgctgcagcagcgcctggcgcgcttcctcgcccacggatag

SEQ ID NO: 138242 - DNA, 918 bp, Enterobacter cloacae
atggaattgaaggattattatgccattctcggggtgcaaccaaccgacgatctgaaaaccatcaagaccgcctaccgccgcctggcgcgcaaatatcaccccgacgtcagtaaagaaaacgatgccgaagccaaatttaaggatctcgccgaagcctgggaagtcctgaaagatgagcaacggcgcgccgaatacgatcagctctggcagcatcgcaacgatcccggcttcggtcgccagcgacagacccacgagcagagctacagtcagcaagatttcgacgacatcttctcctccatgtttggccagcaggcgcatcagcgtcgtcgtcaacacgcggcgcgcggccacgatctggagatcgaagtggcggtgttccttgaagagacgctggccgagcagacgcgcaccatcagctataacctgccggtgtacaacgtgtttggcatgatcgaaagcgaaacgccgaaaacgctgaatgtgaagatccccgccggggtagtcgatggtcagcgtatccgcctaaaaggccaggggacgccgggggagaatggcggcccgaacggcgatctgtggctggttatccacatcgccccgcatccgctattcgatattgtcggtcataacctggagatcgtcctgccgctggcgccatgggaggccgcgctgggcgcgaaagtgacggtgcccaccctgaaagagagcattctgctgacggtgccgccgggcagtcaggcagggcagcgactgcgtatcaaagggaaaggactcgtgagcaaaacccacaccggcgatttgttcgccgttattaaaatagtgatgccgccaaaaccagatgaaaaagcgcgtgagctctggcaacaattggccgccgccgaagccagcttcgatccgcgtaagacatgggggaaagtctga

SEQ ID NO: 138243 - DNA, 759 bp, Enterobacter cloacae
gtggtcaacgcggcccaggcggagtaccctgcgcagcggtttttcttgctcttttttcaggtggtttctctcgatatgtatgcatttcttcaacaatgggacatggcagtgattatgctgcagattgtcgccatcgacttactgctgggtggcgacaatgccgtggtgatcgccatggcctgccgcaaactgccgccgcagaaacgcaccaaagcgatcatcatcggtaccgtgggcgccatcctggcgcgcgttctgctgctggcgatcgctttgtatctcctgtcgctgccgtggctgaaaatagtcggcgcgctgctcctgctgtggattggcatcaagctggtcaggaatgaggaagaagagagcgaggttagcagctctggcagcctgtggcgcaccgcgatcaccatcaccgttgccgatgtgattatgtcgctggataacgtactggcggtagctgctgcggggaaagggcacattgcgctggtcgccctcggcgtggcgatcagcattccggttattgtcgccggcagcaagctggtgctggtcctgctcacccgctttcccgcggtggtgctgctgggcgggatgctcatcggctggattgccgggtcaatgctggtcagcgaccctaccattcgccggctgtttcccagcgccggcgagggcaccgcgcgcctggctggcaccgtcggcgcgctgctggtgctattcaccggatggcgccgccgcccacggccgcaggcgaaagactaa

SEQ ID NO: 138244 - DNA, 744 bp, Enterobacter cloacae
atgtctggccacaagaaatacctctctgtcgccctgctgagcgctgtcttactgccggcgatggcctctgccgctgacgcgccggcgactttcaccccggaacaggaggcgaaaatcgtgctgcaggcgagccagaaactgcagcaaattcaggctgagcagcaggccagcgcggccactcaggcggtgctgaagaacgccgccgtgttaaccctggataaaaataccccgacctacggcccggccaacggcaaagtcacggtgatcgaattcttcgactaccagtgcgtctactgcagccgtctggcgccggtgatggagcaggtgattaaagcgcacccgcagacccgcttcgccttcaaagagtggccgattttcggcggccgctgggaaagctcgctggaggcggcaaaaaccggcctgcagatctatcaacagaaaggggcggatgcctatctggcctaccataacgggatttacgctaccggccataacgaaggcaagctgacgacggcggatatccagcagcaggcgaagaaagccggctttgatgcgaagaaggccgccgacgtcgaaccggtgctgcagagcattaacgatctggcgcaggagattggtctgagcggcacgccgggcgtgatcgtgatgccgaccaccggcgccacggaagccagcatcaccgtcttcccggggctggcagacaaagcctcgctggaagccgccatcaaaaaagccggcggctaa

SEQ ID NO: 138245 - DNA, 450 bp, Enterobacter cloacae
atgaatgaaaatacgctcatcttaaccgaacatcgggtgctgccccggctggtcgacgccggcttaacgctgctggcctggctcggttttctgttctttctgtacgccaatttgctgatgcagttcatcgcgccgccctctccgcgctgggaatcgctgatggactccctgaatacggcgctggtgtatctgctgattgccgcgctgaacggctggctgttgatcctctggtatcactacaaccggcgccgcgcccgtacccggcgtcataccgcggtgctcgctctgcgcgacgatgagctggcgagcagctttaacgtcgcgccgcagattatctcggagatgagccgctataatttgctcaccgtttaccacgatcaaatcgggcagattattgatttaaaaagccacgcgttaccgccgccgcaggaagagagcgatgacgcatga

SEQ ID NO: 138246 - DNA, 1329 bp, Enterobacter cloacae
atgactgatcgcattatcgcattgtgcattttatgcctcgtattcgggctgccgttaggtgtcgcagcggtatttaccggcgagcttatcctcgactttgtctttttctggccgctgtttatgtcagtgttgtggatcaccgggggtctctacttttggtttcagctggaacgtcactggccgtggggggaggataccccgccgccgacgctgccgggcaatccactgatctcgatcctgatcccctgctttaacgaagagaaaaacgcccgggaaaccatcagcgcagcgctggcccagcgttacgccaatcttgaagtgatcgcgattaacgacggctcttcggacaacaccgcccaggtgctccagcagctggcgcaggaggagccgaggctgcgggtgatccatctggccgccaatcagggaaaagcggtggcgctcaaagcgggcgccgccgccgcccgcggcgatctgctggtctgcatcgatggcgacgccctgctggaccgggataccgcggcctggctggtcgcgccgttgatccattatccgcacgtcggggcggtcaccggcaatccgcggatccgcacccgatccacgctgatcggccgcattcaggttggggagttctcgtcgatcattgggcttatcaaacggacgcagcggatctatggccgggtctttaccgtctccggcgtaatcgccgccttccggcgccaggcgctggcggacgtcggctactggagcccggatatgatcactgaagatattgatatcagctggaagcttcagctccgccactgggacatctttttcgagccgcgagcgctgtgctggatcctgatgccggagaccctcaaagggttatggaagcagcgtctgcgctgggcccagggcggcgccgaagtctttctggtcaatctgcgccgcctgtttcactggcagcatcaccggatgtggccgctgtttctggagtatgcctgctccacgctgtgggcctttgcctatgcgatcaccattctgctgtttatcctcagccgcctgatgccgctgcctgacaatctggcggtgcatagcctgtttccaccggaattcaccggcatgctgctcggcctgatgtgcctgctgcagttcgtcgccagcctgtatatcgagcggcgctatgagaaaaaggtcgccaaatcgctgttctgggtgatctggttcccgatggtctactggatgatcggcctgctgaccacgctggtcgcttttccgaaagtgatggtgaaacgtcaacgttcccgcgcgcgctgggtgagcccggaccggggaaaaggaagcctgtga

SEQ ID NO: 138247 - DNA, 2016 bp, Enterobacter cloacae
atgctgaacacgaccctgcgcaacggcctgatgcttctcatctggctgtgccttatcttcagcgtgcgtgctgaggaagtccccttcctcgccccgcagcagcgcccccaactggaggccaatcaaccctggccggcggatcgctttctggtgctggcctaccatgacgtcgaagacgatgccgccgaccagcgttatctttcggtgcgcaccagcgcactcaatgagcagatcgcctggctgctgcataacggctaccatgcgattagcgttcaggacattctcgatgcgcattatggcttaaagtcgctgccgcccaaggcttttctcctcagttttgacgatggttacagcagcttttacacccgcgtatggccgctgcttaaagcctggaacgtcccggcgctatgggcgccggtgggcagctgggtggacactcccgctggtcagcccgttaattttggcggcctgatgacgccgcgcgagcgcttcgctacctgggagatggtgcgcgagctcagccgctcgccgctggtggagatcggcgctcacacctgggcctcgcactacggtctgccggccaatccgcagggcagccgcgagcctgccgccgccaaccgcggctgggataaaaccaccggccgctatgaaagcgacgcgcagtttacccggcgaatgaccgatgacgtgcagaaagtaacggcgaaaatccatgaggttgccgggaaaacgccgcgcgcctgggtgtggccctacggcgccgccagcggcagcaccctggccatcgccaaacagcaagggtatcagctggcgtttacgctgaacgacggcctgggcaacgtgaaggatctggacaatattccacgcctgctgatcgccggtaacccgtcgctcaaggcctttgccagcgccgtgacccagattcaggaagccgatcctgttcgggtgatgcatgtggatctggactatgtctatgaccccaatcccgtccagcaggcaaagaatatcgataagctggtgcagcgcgtctatgacatgaaaatcagccacgtctttctgcaggccttctccgacccgcagggcgacggcacggtcaagtcgctctatttccccaaccgctggctgccgatgcgcgccgacctgtttaacttcgtctcctggcagttgcagacccgcggcaatgtgaaggtttatgcctggatgccggtgctggccttcgatcttgcctcagatctgccgcgcgttcagcgctgggatccgcaaaccgggaaggcgttacttgcccgccagccgtacgtccgtctgtcgccctgggatccccgggttcgccagcagatcaccgacatctacgaagatctggcccgacacgccagcttcagcgggattctgtttcacgacgacgccgtgctgaccgattttgaagacgtgagcccggaggcggtcgccgcctggcggcagacgggtatggcgcacgatgccgccccggtgccccaacgtccgcaagagcgccaggcatggatgcgtttcaaaagccaaaccctgacccgcttcactctggatctacgccaggcagtgcaggccatccgcggcccgcaggtgaaaacggcgcgtaatctcttcgccctgccgatcctggagccgcaaagcgaagcctggtttgcgcagaatctggatgacttccttgccgcctatgactggacggtccccatggcgatgccgctgatggagtccgtgccgatcgacgccagccaggcctggctgacgcggctggtgcaggccgtcgcccgccacccgggcgcgctgaagaaaaccatctttgaactgcaggccagagactggaatcgacgccagcaaaacgccattcccgaccagcagctggcggactggatgcgtttgctgcggctgaacggcgtcaaaaactacggctactaccctgacgattttattaacaaccagcctgatatctctcgtatcaggccgcaattttcttcctggtggtaccctgaccatgactga

SEQ ID NO: 138248 - DNA, 2490 bp, Enterobacter cloacae
gtgttgtgcaatggattcttgatgaacatatggcaaatagaaatggaaagatcaccttattcaaatacgttattgtttaatcgcaacacgaaactctcgctatcaatcggcttgcttttgctcttcccggcgctggttcagggagcggattcgctctatgaccagcaaatcttgcaagcgcgccaaggccagtacgccccctttctcagttaccttcagcagtaccagctgcggcatgccttaaccccttctcaggtggcggactggctgcaggtggccctctgggccggtcaggacgatgaagtggtgaaagtctggcgacgctaccaggtctatatgccgcttcccgcacggggcaccgccgccgcggcgcaggccctgcgcaaccagaagcagtggcaaacctcgctcaccctctggcagcaggcactcagccaggcccctggcagcgacgactatcgtatcggctatatcaaaacgctcgccgatgcccgcaaggacggcgaggcgctcagcgaagcgcgtcgcctggtggcggagcaggcgagcgttgcgcacctgcagacgctctcctatgtctacctgcggctgggcaaaagctgggaccagctattggtggacacgcagatcctcgatcgtgaaccgcaaaacaaaaccgcgctggccagcctgatggcgaccctgacccgcaaccggattgattcccctgctctcggcctggcgaatagcgccgaactgacgcctgcggaaaagcgtaacttgcagctgaacgccgccgccgaactggtgcgccttgccgataccccttcccgcgaagaaaaggcgcgttacgcgctggcccgcacggcgctcacgcagtatgacgcgatgatcgccgcctggcaccccgacccacaggctgcgcccgacatcatccgggcgcgtattgatcgtctgggcgcgctgtacgccagcgccgagtacgcgcaggtcatccgcgaataccaaagcctgatcgcgcagcagcagaccgttcccgactgggccatcggctgggtcatctcctcttttatcgcccttaagcaaattgagcctgcgctgacgcttatccaccagcatccttcgtggctgacaagccaacagaatgaggaacacgagcttttctacgctctgctggacaccggtcagtacccggcggcgcaacggtatgttgcccgcctcaccaggaatgcgccctacatccgtcgtctctacggctcgccaacgccgcagccgaacgacgactggctcaccgcacagtcgcttaacgtgcactatttagcggctaccaacgacctgccgcaggccgaagcccgaatgcagcgcctggcggcgacggcccctggaaaccagggcctgcagatagactatgccgcccttctgcaggagagaggattgccacgggcagccgaacgccagctaaaagcggcggaatctctggaacccgccagcctgcagctggagcgccagcaggcctgggtcgccctcgatttgcaggagtggcggcaaatggatctgctgactgacgacgtcgtcgcccgctcgccacgggatctgaacacccagcgcctggccagagcgcgcgagatccatcatctctccgagctgcgcctgagcgttgacaaagggctgcattccgacaacccggtgagcggcacgcacgacctcagttttgagacggcgatctacagcccgccgctagccgacagctggcggttgttcggcgggcaccgcttcgctgaaggcaattttgaagaggggaaaggcagccgtcgccagctgtttgccggtattgaatggcgtccgcgcgactactggggcgagcttgagctctccagcgtcaattttcacggcgagaacaagcccggcgtccgcctttccgccgcccatgacgttagcgatcgctggcagctgggcggcgaactggagcggatttcgcagcagacgccgctgcgcgcgttacgcaacggcgtcagcgccaaccgcggcgaaggctggctgcgctggtctccaaacgaacgccgggagtaccgcgtcagcgcggccgccagccggtttaccgatcgcaaccgccgccaggagtacaccctctccggtaaagaacgcctatggcaaaccccatggttaacgctggatttgcagcccggtctgtcggccagcgccaatagccgcaccgacaccgcctactacagtccggcacgggacctcgccgccaccgcggcgctggccgtcgatcacacgctttaccagcgctatgacaccgtctggagccagcagttactcgccggcggcggcagctactggcaaaaaaatcacgccgccggggcgatcacggtgctgggttacgggcagcgcctgcgctggaacaacgtcgtcgacaccggggtgatgctgaactgggataagcgcccctacgacggcaaacgtgaaaacaacctcgccatcactcttgatgcaaatatacggttttaa

SEQ ID NO: 138249 - DNA, 231 bp, Enterobacter cloacae
atgcttttcacgttcgggtttttcagcgcgtcatcgacgtttttcttcagcgggatggcgcgaccggcgcgcagcccttcgtcagcggtgatcaccaggcgtgagctggagtcgataatgcgtccggccaccgcctccggcgagaagccgccgaaaatgaccgagtggattgctccgatgcgggcgcaggccagcatcgccaccgcggcttccggcaccatcggcatatag

SEQ ID NO: 138250 - DNA, 1314 bp, Enterobacter cloacae
gtgaagaaaacaaaaaaagtcagtctggcctggcaaattttgctagccctggtgctgggtatccttctgggcagttatctgcattaccacgctgaaagtcgcgattggttaattagcaatttgctgacgccggcgggcgatatctttatccatctgattaaaatgatcgtggtcccgattgtcatttcgaccctggtggtcgggattgccggcgtgggtgacgccaaacagttagggcggatcggtgccaaaaccattatctatttcgaagtgatcaccacggtggcgattgtgctgggtatcaccctggccaacgtcttccagccggggacgggcattgatatgtcgcagctggcggcagttgatatttcgaaatatcagaacaccaccgccgaagtgcagagccatgcgcacggcctgatgggcaccatcctgtcgctggtgccgaccaatatcgtggcatcgatggcgaaaggcgatatgctgccgattatcttcttctcggtgctgtttggcctggggctctcctcgctgccggcgacccaccgtgagccgctggtgacggtcttccgctctatctccgagaccatgtttaaagtcacccatatggtgatgcgctatgcgccggtcggggtattcgccctgatttcggtaaccgtcgccaccttcggtttcgcctcgctgtggccgctggccaagctagtgttgctggtttactttgcgatcctgttcttcgcgctggtggtgctggggattgtcgcgcgcctgtgtggtctgagcatctggatcctgatccgcatcctgaaagatgagctgattctggcttattctaccgccagttcggagagcgtactgccgcgcattattgagaagatggaagcctacggcgcgccggcgtcgatcaccagctttgtggtgccgaccggttactccttcaacctcgatggttcaacgctgtatcagagcatcgcggcgatctttatcgcccagctgtacggtattgacctctctatctggcaggagattaccctggtgctgaccctgatggtgacctcgaaagggatcgccggcgtgccgggcgtctccttcgtggtgctgctggccaccctgggtagcgtcgggatcccgctggaagggcttgcctttattgccggcgtcgaccgtatcctcgatatggcgcgtaccgcgctgaacgtggtgggtaatgcgctggcggtgctggttatcgccaagtgggagcataagttcgatcgcaaaaaagcgctggcctatgaacgcgaagtgctgggcaagtttgataaaaccgcccaataa

SEQ ID NO: 138251 - DNA, 687 bp, Enterobacter cloacae
atgaaatacctctttttatttctactggttttcaccagcggcgcagcggtggccaccgaacctggcagtcagtatcaacagcaggccgaagccggcgatcgacgcgcgcaatattaccttgccgatacctgggtcagctccggcgattatcaaaaagccgaatactgggcgcagaaggcggccgcccagggcgatggcgatgcgctggcgctgctggcgcagctcaaaatccgtaacccccaacaggcggactatccgcaggcccgccagctggcggaaaaagccgtcgaggccggcagtaaatccggagagatcgtcctcgcgcgggtgctggtcaaccgtcaggctggcgccaccgacgtagcgcacgccatcacgctgctgcaggatgctgcccgggatagcgaaagcgatgcggcggtagatgcccagatgctgctggggctgatctacgccagcggcgtacacggcccggaggatgatgtgaaagcaagtgaatactttaaaggcagttcatcactttcccgcaccggctatgccgaatactgggccgggatgatgttccagcagggagagaaaggctttatcgaaccgaataagcagaaggcgctgcactggctcaacgtcagttgcctggaggggtttgataccggctgcgaagagtttgaccggatcagtaaaggataa

SEQ ID NO: 138252 - DNA, 1680 bp, Enterobacter cloacae
atgagtaatgccatcacggagattgataacaccgatctggtgtttatcttcggttacaacccggcggattcccaccctatcgtggcgaatcacgtcattaacgctaaacgcaacggggcgaaaattatcgtctgcgacccgcgcaaaattgaaaccgcgcgcatcgccgatatgcacattgcgctgaagaacggctcgaacatcgcgctgctcaacgccattggccacgtgattattgaagaggatctgtacgataaatccttcgtcgccagccgttccgaaggcttcgaggagtatcgcaaaatcgttgaaggctatacgccggagtcggtggaggagatcaccggggtcagcgcccaggagatccgcgcctgcgcccggatgtatgccagcgccaaatccgccgccatcctgtggggcatgggcgtcacccagttctaccagggcgtggagacggtgcggtcgctgaccagcctcgcgatcctcaccggcaacctcggcaagccgagcgtcggcgtcaacccggtacgcggccagaacaacgttcagggcgcctgcgatatgggtgcgctaccggatacatatccgggctatcagtacgtcaagttcccggagaaccgcgaaaaattcgccaaagcctggggcgtggaaagcctgcctgcgcataccggctatcgcatcagcgaattgccgcaccgcgcggcgcacggtgaagtgcgggcggcgtacattatgggtgaggatccgctgcagaccgacgccgaactctcggcggtccgcaaagcgttcgacgatctggaactggttatcgtccaggacattttcatgaccaaaaccgcctccgcggctgacgtcatcctgccgtccacctcgtggggcgagcacgaaggcgtgtataccgcagcggaccgcggcttccagcgcttctttaaagcggtggagccgaagtgggacctgaaaaccgactggcagatcatcagcgaaatcgccacccggatgggctatccgatgcattacaacaacacccaggagatctgggacgagttgcggcatctgtgcccggacttctacggcgccacctacgagaaaatgggtgagctcggctatgtcatgtggccgtgccgcgatgagtccgacgccgatcagggaacgtcgtatctgtttaaagagaagttcgataccccgaacggactggcgcagttcttcacctgcgactgggtcgcgccgatcgataagcttaccgacgagtacccgatggtattgtcgacggtgcgcgaggtcggccactactcgtgccgttcaatgaccggtaactgcgcggcgctggcggcgctggcggatgaaccaggctatgcgcaaatcaacaccgccgacgccgaacggctaggcatcgaagatgaagagctggtatgggtcaattcgcgtaaggggcgcatcatcacccgcgcgcaggtcagcgatcggccgaataaaggcgcggtgtacatgacctaccagtggtggatcggcgcctgtaacgaactggtctcagagaacctgagtccaataaccaaaacgccggagtacaagtactgcgcggtcaacgttgagcggattgccgatcagcgcgccgcggaacagtacgtgatcgacgagtacaacaagctgaaatcccgcctgcgcgaaagcgcgatgggttaa

SEQ ID NO: 138253 - DNA, 420 bp, Enterobacter cloacae
atgaaaaaagtcgtcacggtttgcccgtattgcgcatcaggttgcaaaatcaacctggtggtcgataacggcaaaatcgttcgggctgaagcggcgcaggggaaaaccaaccagggaaccctgtgcctgaagggctattatggctgggacttcattaacgatacccagatcctaacgccgcgcctgaaaacccccatgatccgccgtcaacgcggcggcaagctggaagccgtctcctgggacgaggcgctggattacgtcgccacccgcctcagcgccattaaagccaaatatggcccggatgcgatccaaaccaccggctcctcccgcggcaccggtaatgaaaccaactatgtgatgcaaaaattcgcgcgcgccgttattggtaccaataacgtcgactgctgcgctcgcgtctga

SEQ ID NO: 138254 - DNA, 729 bp, Enterobacter cloacae
atgaaaccagtcattttagtggtggatgatgacagggcaatgggcgagctgctcagcgatgtgctcggcgcgcacgcgtttgaagtgcttgtcagccagaccggcaacgacgcgctgacgacggtggcgcagcgggcggatatcgcgctggtcttactggatatgatcctgccggatacccatggcctgcaggtgctccagcagctgcagcgcacgcggcctgagctgccggtggtgatgctctccggtctgggcagtgagtctgatgtggtggtgggcctggagatgggcgccgatgattacatcgccaaaccgttcagctcgcgggtggtggtcgcccgggtgaaagcggtactgcgacgcagcggggcgctggccggcgaggcgtcgggcgccggtgctggcctgacgtttaacggctggcggctggataccacgcgctgtgaactgtataacccgcagcagcaggcgatcccgctgacccagggagaatatggcctgctgctggcgctggcgcagaacgcgcgccgggtattgaatcgcgaacagctgctggcgctgacccataacgaaagcaccgaggtattcgaccggaccatcgatgtgctgatcatgcgcctgcggcgcaaaattgagctcaacccgcatcagccgacgttgattaaaaccctgcgcggtctgggctatgtcttttccgccgacgtgacccacagcgagaaggcggcgtag

SEQ ID NO: 138255 - DNA, 852 bp, Enterobacter cloacae
atggaacggaaaggcattattgccgcaggcaacatgctggtcgatcatgtccaccagatcgggcagtggccggagcgcggctggctggtggaaattgtccatagcgaacgcgccaccggcggcgcgccgctgaatgtcctgctgaccctggccaaaatgcacgccgggctgccgctgcaggcggtcggcctgattggcgaggataacgatggcgactacatcaccgccatgctcgatcagtaccatatcaatcgccagctcgtacagcgcaccagctccgcccccacctcgatgacccaggtgatgaccgacgccgaaggccagcgcactttctttcactctcccggcgccaaccgcctgcttgatctcccggcttttgagccgctggatgcgccgctgaaaattttccatctcggctatctgctgctgctcgaaagcctcgatcgccccgatgaagtgtacggcacccgcagcgcgcgactgctggcgcagatgcgcgagcgaggctatgaggtgtccctcgatctggtgtcgcgcaagggcgacccgcgctaccggccgctggtcctgccggcgctgaagcatcttgactacctgaccatcaatgaactggaagccagcgagtttagcgggctggagattcgtctacccaacggcgagccgcacgtcgccaatatcgcccgcgccgccagcgcattgcttgacgccggcgtacgccagcgggtagtgatccattgtccggagggggcatggggcgtctcccgtaccgaagccggggtatcggcagcgtcggcgcgggggacgccttctgcgccggcctgctgtacggcagccacgaacgctggccgttaa

SEQ ID NO: 138256 - DNA, 942 bp, Enterobacter cloacae
atgcgtttaaaaccgatagtcaccgcgctgtgtgctggcgcgctgctggccgcctccccttttgcgtcggccaaagagctgaaagcgattggcgtgacggtgggcgaccttgccaacccgttctttgtacagatcaccaaaggggcggagctggaggcccgcaaactggcgggggataacgtcaaagtgacgctggtctccagcggctacgatctgggccagcaggtggcgcagatcgataactttatcgccgccaaagtcgatatgatcatcctcaacgccgccgattcgaaaggcattggcccggcggtgaagcgggccaaagaggccgggatcgtggtggtggcggttgacgtcgccgccgaaggggccgacgccaccatcacctccgataacacccaggcgggcgagctggcctgtaaatacattagcgaccgcctgaacaacaaaggcaacgtggtgatcatcaacgggccgccggtctccgccgtacaaaaccgcgtcgaaggctgcgaaacggagttcaaaaaacacccggacattaaaatcctctccgccaaccagaacgccaaaggcagccgggaaggcggcctggaggtgatgacctccctgctggcggccaatccgaagattgacggcgtgttcgcgatcaacgatccgacggcgattggtgccgatctggcagcgaaacaggcgcagcgcagcgagttcttcatcgtcggcgtcgacggcagcccggacggcgaagaggcgctgaagcgtaagaactcgctgttcgtcgccaccccagcgcaggacccacaggtgatggcggcgaaggcggtggagattggctacgacatcctgcagggcaaaccggcgccgaccgcgccggtactgatcccggtgacgatgatcgacaaaaataacgtcagctcttacaaaggctggaccgtgaaataa

SEQ ID NO: 138257 - DNA, 144 bp, Enterobacter cloacae
gtggtgggcatgagcgaccgggtctatgtgatgcgcgagggcgttatcgccggcgagctacaggccggtgatattagccaggaaagtatcatgacgctggccaccggcgtgaccgattctcaccttaaggcagggcaactatga

SEQ ID NO: 138258 - DNA, 1260 bp, Enterobacter cloacae
atgaccactcaacttgaacaagcctgggaaattgctaagcagcgctacgccgccgtcggcgtggatgtcgaggaggccctgcgccagctggaccgtctgcccgtctccatgcactgctggcagggtgacgacgtcgccggtttcgaaaacccggcgggaagcctgacaggcggcatccaggcgaccggcaactacccgggcaaagcgcgcaatgcagaagaactccgcgctgaccttgagcaggcgctgagcctgatcccggggccaaagcgtctcaatctgcacgctatttacctggaatccgacgcgccggtagcgcgcaatgagattaagccggagcactttaaaaactgggttacgtgggcgaaagccaacaaactggggctggatttcaacccctcctgcttctcgcatccgctgagcgccgacggctttaccctgtcgcacgccaacgatgagatccgccagttctggatcggccactgcaaagccagccgccgcgtatccgcttattttggcgaacagctgggcacgccgtcggtgatgaatatctgggtgccggacggcatgaaggatataaccgttgaccgcttcgccccgcgccagcggctgctgaacgccctggatgaggtgatcagcgagaagctcgacccggcgcaccatatcgacgccgtggagagcaagctgttcggcatcggcgccgaaagctacaccgtcggctccaacgagttctatatgggttacgccaccagccgtcagacggcgctgtgcctcgatgccggccacttccatccgacggaagtgatctccgacaagatctccgccgccatgctctacatcccgcgcctgctgctgcacgtcagccgtccggtgcgctgggacagcgaccacgtggtgctgctggatgatgaaacccaggccatcgccagcgaaatcattcgccataacctgtttgaccgcgtgcacatcggcctcgacttcttcgatgcctccatcaaccgcatcgcggcctgggtgattggcacccgcaatatgaaaaaagcgctgctgcgcgccctgctggaaccgaccgcccagctgcgccagctggagaacgacggcgattacaccgcccgcctggcgctgctcgaagagcaaaaatcgctgccgtggcaggccatctgggagatgtactgtcagcgtcacgacacgccggcgggcagccagtggctggacagcgtacgggcttatgagaatgcggttctgagccagcgcgggtaa

SEQ ID NO: 138259 - DNA, 1467 bp, Enterobacter cloacae
atgagtattcgtcattgtgtcgctgtcgatttaggcgcctccagcgggcgggtgatgctcgccagctatcagcccgggccgcgcgccctgacgctgcgcgaaattcatcgcttcaccaatagtctgcagaaagtagacggcttcgactgctgggatgtagatagcctggaaggcgagatccgccgcgggctggagaaagtgtgtgagcagggcattctaatagacagtatcggcatcgatacctggggggtagattatgtcctgctggataagcagggccagcgcgtcgggctgccgatttcctatcgtgacgaccgcacccagggcctgctgcgtcacgctgaagcgcagctgggccgggcggaaatctatcgccgcagcggcattcagtttttgccgtttaacacgctttatcagctgcgcgctctggtggagcagcagccggagctggtcagtcaggctgcccatgccctgctgatccccgactatttcagcttccgcctgaccggcaatctgaactgggaatataccaacgccaccaccacccagctggtcaatattaacagcgatagctgggatgagacgctgctgaactggaccggcgcgccgttggcgtggttcggaaagccgacccaccccggcaatgtgataggccactggatctgcccgcagggtaaccgaattccggtagtcgctgtcgccagccacgacaccgccagcgcggtgatcgcctccccgctggccgaccgccatgccgcctatctctcctccggcacctggtcgctgatggggtttgaaagcctgacgccgtacacctgcgacgcggcgctgcagaccaatatcaccaacgaaggcggagccgaaggccgctatcgggtgctgaaaaatatcatgggcctgtggctgctgcagcgggtgctaaaagagcaaaacgtcagcgacctgcaggggctgatcgcccgcaccgccgcgctaccggcgtgccgcttcataattgactgcaacgatgaccgctttatcaacccggccagtatgagcgccgagatccaggccgcctgtcgcgacgccgggcagcctgttcctgaaagcgatgccgaactggcgcgctgcattttcgacagcctggcgctgctctacgcccgggtgcttaacgagctggcggcgctgcgcggccaccccttcagccagctgcatatcgtcggcggcggctgtcagaacacgctgctcaaccagctgtgcgctgacgcctgcgggatcgccgtcgtggccggcccgatagaggcctccaccctcggcaatatcggcatccagttaatgaccctcgacgagctggccaatgtcgatgagtttcgtcaggtagtgcgcggcaacgcggcgctcaccacttttacccccaatcctgatagtgaaattgcccgtttcgtggcgcagtttcagccacaacagaccaaggagctttgcgcatga

SEQ ID NO: 138260 - DNA, 837 bp, Enterobacter cloacae
atgaccatattgcacagtacggatttctttaaggccgggatctcgacggtggctattgaaccccgcctccctcagtcggcctttccggaacatcaccatgatttccatgaaatagttatcgtggagcagggatcgggtattcacgtcttcaatggccagccctacaccattggcggcggttcggtctgttttatccgcgatcacgaccgccatctttacgagcacacggataatctgtgtctgaccaatgtgctctatcgcgcgccggatgcgtttcgctttctcgccggggtcagtcaactactgccccaggaacaggaaggaaactacccctcgcactggcgggtgaatcaaaccgtcctgcaacaggtgcggcatatcgtggcgcagatcgaggccgtggggagcgatacggatactcatgccgtcgccagccgtgagatcctgtttatgcagctgctggtgctgttacgtaaaagcagccttgcggaagaggccaccaacaacgatgcgcggctgaatcagctgttggcctggctcgaagaccattttgcgcaggagatctgctgggaggaggtggcggcgcagttttcgctgtcgctgcgtacgctgcaccgccagctgaagcagcagaccggtctgacgccacagcgctatcttaatcgggtgcgcctgatgaaagcccgccacctgctgcgccacagcgatgaaagcgtgactgatatcgcttatcgctgcggcttcggcgacagtaaccacttttcgacgctttttcgccgggagttcgactggtcgccgcgcgatatccgccaggggcgcgacgccattcttcagtaa

SEQ ID NO: 138261 - DNA, 846 bp, Enterobacter cloacae
gtggccggtctgattttacgtaaagaggagtttttcccttccgccacacaggcagtggcggtggcagaccgctacccgcaaaatgtctttgccgaacatacccatgagttctgcgagctggtgctggtgtggcgaggcaacgggctgcacgtccttaacgatcgcccctggcgcattacccgcggcgatctgttctacattcgcgccgaagataaacactcctatgcttccgttaacgatctggttctgcagaacatcatctattgcctggagcggctgcagctcaattttgactgggccggggcgatccctggcctcttcggcacgccgtggaagccccactggcgcatgggcagcacaggtatggcgcaggcgcgccaggtgattagccagcttgagcatgagtgcgcccggcgcgacgcgcagggaaatgcgatggccgaactgctttttgcccagctggcgctgacgctgcagcgccatcgctacgcgacggatgatcccgcggcgacgcagcgcgaagcgctgctggacaaactgctggccgcgctggcggccagccttagccgcccctttgttctggagcgtttctgcgagcaggagggcggcagcgagcgggcgcttcgccagcagtttcgccagcaaaccgggatgaccatcaatcactatttacgccagctgcggatctgccatgcgcagtatctgctgcagcataccgagcgcttaatcggcgatatcgccatgcagtgcggctttgaggacagtaactacttttcggtggtttttagccgggaaatcggcatgtcaccggggcaatggcggcagcgcagtcgcgccgccgcctga

SEQ ID NO: 138262 - DNA, 1035 bp, Enterobacter cloacae
atgaaccacgcgattacgatgggtattttttggcatttgataggggccgccagtgccgcctgtttctatgccccgttcaagaaagtaaaacactggtcgtgggaaaccatgtggtcggtcggggggatcgtctcctggctgattctgccctgggccatcagcgccacgctgttacccgacttctgggcctactaccgctcttttagcgcctccacgctgctgccggtctttctgttcggcgccatgtggggcattggtaatatcaactatggcctgaccatgcgctttcttggcatgtcgatggggattggcatcgccattggtatcacgctgattgtcggcacgctgatgacgccgattattaacggtcagtttgcagtgctgatgcacacccagggcggtcaaatgacgctgctcggcgtgctggtggcggtgattggcgtcggcatcgtcacccgcgcaggccagctgaaagagcgcaaaatgggcatcaaagccgaagagttcaatctgaagaaagggcttctgctggcggtaatgtgcggtatcttctccgcagggatgtcgttcgcgatgaacgccgccaaaccgatgcatgatgccgccgcggcgctcggcgtcgacccgctgtacgcagcgctgccaagctacgtggtgattatgggcggcggggcgctggttaaccttggcttctgctttattcgtctggcgaaagtgaagaacctgtcagtcaaagccgatttctcgctggccaaaccgcttatcatcagcaaccttctgctctctgccctcggcggtctgatgtggtatctccagttcttcttctatgcctggggccacgccagcattccggcgcagtatgattatatgagctggatgctgcacatgagtttctacgtgctgtgcggcggtgtggtgggtctggtgctgaaggagtggaacaacgccggccgtcgtccggtgagcgtcctgagcctcggctgcgtggtgattatcatcgccgccaatatcgtcggtctgggaatggccagttaa

SEQ ID NO: 138263 - DNA, 621 bp, Enterobacter cloacae
atgagctataccctgccatccctgccttacgcttacgatgctctggaaccgcacttcgacaagcagacgatggagatccatcacactaaacaccaccagacctacgtgaacaatgccaacgccgcgctggaaagcctgccggagttcgctaacctgtccgctgaagagctgattaccaagctggatcagctgccggctgacaaaaaaaccgtactgcgtaacaacgccggcggccacgcgaaccacagcctgttctggaaaggcctgaaaaccggtaccaccctgcagggcgacctgaaagcggctatcgagcgcgatttcggttccgtggagaacttcaaagcggaattcgaaaaagccgctgctacccgtttcggctccggctgggcgtggctggtcctgaaaggtgacaaactggccgttgtctccaccgccaaccaggattccccgctgatgggcgaagccatttccggcgcttccggcttcccgattatcggcctggacgtctgggaacacgcttactacctgaaattccagaaccgccgcccggactacatcaaagccttctgggacgtagtgaactgggacgaagctgcagcgcgttttgccgccaaaaaataa

SEQ ID NO: 138264 - DNA, 675 bp, Enterobacter cloacae
atgcattatccggtgaatgtctttgtcggcaaaatcagggactacgcgggcagtcgccccagcgcgatcggcaaaatccaggtcgacggagaattgcagctcggcgatctcggtctcaatggggaccagcaggcggagaagaaaatccacggcgggccggaccgcgcgctgtgtcattatccgcgcgaacactatgccgactggatccgtgacttcccccagcaggccgagcggttctgcgcgccggcgttcggcgaaaacctctccaccaccgggcttaccgagcaaaacgtttatatcggcgatatctttcgctggggcgaggcgctgatccaggtcacccagccgcgatcgccgtgcttcaagctcaactttcattttgcgatcaatgatatggcgcagctgatgcaaaacagcggaaaaaccggctggctgtaccgggtgattgccggagggcaagtttccagcgatgcgccgctcgagctggtttcccggctgagtgatgtcagcgttcatgaggccggggcgattgcctggcagatgccgtttgatgatgatcagtaccaccgcttactgtcggcagcgggcctgtctgttagctggagccgaacgatgcagaaacggcgtttaagcggcaagatagaggatagttcgcggagattatgggggaaataa

SEQ ID NO: 138265 - DNA, 1374 bp, Enterobacter cloacae
atgattggaagtttgactgcacgcatcttcgccatcttctggctcacgctggcgctggtgttgatgctggtgctgatgttgcccaaactggattcccggcagatgaccgagctgctggaaagcgagcagcgtcagggcatcatgatcgagcagcacgtcgaggccgagctggccaacgatccgccaaacgacctgatgtggtggcgtcgtttgtttcgcgccatcgataaatgggcgcctccgggacaacgcctgctgctggtgaccagcgaaggccgcgtgatcggcgcagaacgcaacgagatgcagatcattcgtaactttatcggccaggccgataacgccgatcatccgcagaaaaaacgctatggccgcctggaaatggtgggcccgttttccgtccgggacggggaggataactatcagctctatctgattcgtcccgccagcacctcacaatccgactttatcaacctgctgtttgaccggccgctgctgctgctgatcgtcacgatgctggtcagcgccccgctgctgctgtggctggcgtggagcctggcgaaaccggcgcgtaagctgaaaaatgccgccgatgaagtcgcccagggcaacctgcgccagcatccggagctggaagccgggccgcaggagtttttagccgctggcgccagttttaaccagatggtgacggccctggagcggatgatgaccagccagcagcggctgctgtccgatatctcgcacgagctgcgcacgccgcttacgcgcctgcaattaggtaccgccctgctgcgtcgccgcagcggagagagcaaggagctggagcgtatcgaaactgaagcgcaccggctggacagcatgatcaacgacctgctggtgatgtcgcgcaatcaggcgaaaaacgccctggtcagcgagacggtgaaagccaatcagctatggaacgaagtgttggacaatgcggcctttgaagctgagcagatggggaaatctttcaccgttgagtatccgccgggcccatggccgctgtacggtaaccccaatgcgctggaaagcgcgctggagaatatcgtgcgcaacgccctgcgctactcgcatacgaaaatttccgtcagcttctcggtggataaagacgggattacggttaacgtcgatgacgacggcccgggagtcagcccggaggatcgcgaacagattttccggccattctaccggaccgacgaggcgcgcgaccgcgagtccggcggcaccggcctggggctggcgattgtcgaaaccgctattcagcagcaccgcggctgggtgaaggccgacgacagcccgctgggtggtctgcgtttaacaatctggctgccgctgtataaacgaacctga

SEQ ID NO: 138266 - DNA, 699 bp, Enterobacter cloacae
atgaataaaatcctgttagttgatgatgaccgggagctcacctccctgttaaaagagctgctcgatatggaaggttttaacgtgctggtggcccatgatggggaacaggcgctggcccttctggacgacagcgttgatttattgctgctcgacgtgatgatgccgaagaaaaacggtatcgatacgctgaaagagctgcgtcagacacaccagactccggttatcatgctaacagcgcgcggaagcgagctggatcgcgttctcggcctcgagctgggcgcggatgactatttgcctaagccattcaacgatcgcgagctggtggcccgtatacgcgcgattctgcgccgttcccactggagcgagcagcagcagacgaccgaagccggctcaccaaccctggaagtggatgccttaagcctcaatccgggccgccaggaagccaatttcgatggccagacgctggagctcaccggcaccgagttcaccctgctctatctgttagcgcagcatctcggtcaggtagtctcccgtgagcatttaagccaggaagtgttaggcaagcgcctgacgccgttcgaccgcgccatcgatatgcatatttccaacctgcggcgtaagctgccggagcgcaaagatggccatccgtggtttaaaacgctgcgtggccgcgggtatctgatggtttccgcttcatga

SEQ ID NO: 138267 - DNA, 2118 bp, Enterobacter cloacae
atgctgaagctgccggacggcaccgtgaaggtgctggtcgaagggctgcagcgtgctcgcatttctgcgctgtctgataatggcgagcatttctcggcgaaagcggagtatctcgactcgccggcgattgacgaacgcgagcaggaagtgctggttcgcaccgctatcagccagtttgaaggctatatcaagctgaacaagaagatcccaccggaagtgctgacgtcgctgaacagcatcgacgatccggcgcgcctggcggataccatcgcggcgcacatgccgctgaagctggctgacaagcagtctgtgcttgagatgtccgacgttaacgaacgtctggaatatctgatggcgatgatggaatcggaaatcgatctgctgcaggttgagaagcgcattcgcaaccgcgtcaaaaagcagatggagaaatcccagcgcgagtactatctgaacgagcaaatgaaagcgattcagaaagaactcggcgagatggacgacgccccggacgaaaacgaagcgctgaagcgtaagatcgacgcggcgaaaatgccgaaagaggcgaaagaaaaaaccgaagcggaactgcagaagctgaagatgatgtcgccgatgtctgcggaagcgaccgtcgtgcgtggctacatcgactggatggtgcaggtgccgtggaatgcgcgcagtaaggtcaaaaaagacctgcgtcaggcccaggagatcctcgataccgatcactatggcctggagcgcgtgaaggatcgcatccttgaatatctcgcggtgcagagccgggtgaacaaaatcaaggggccaatcctttgtctggtgggaccgccgggggtaggtaaaacctcgctgggtcaatccatcgccaaagcgaccggacggaaatacgttcgtatggcgcttggcggcgtgcgcgatgaagcggaaatccgcggtcatcgtcggacctacattggctcgatgccgggcaaactgatccagaaaatggcgaaagtgggggtcaaaaacccgctgttcctgttggacgagatcgacaaaatgtcttccgacatgcgcggcgacccggcttccgcgttgcttgaggtgctggatccggaacagaacgtggcctttaacgaccactacctggaagtggattacgatctcagcgacgtgatgttcgtggcgacttccaactccatgaacattccggcgccgctgctggaccgtatggaagtgattcgtctctccggctataccgaagatgaaaaactgaacatcgccaaacgtcatctgctgccgaagcagatcgaacgtaacgcgctgaagaaaggcgagctgaccgtcgacgatagcgccattatcggcattattcgttactacacgcgggaagcgggggtacgtagcctggagcgtgaaatctccaagctgtgccgcaaggccgttaagcaactgctgctggataaatcgctgaaacacatcgaaattaacggtgagaatctgcatgattatctcggcgtacagcgcttcgactatggccgcgccgatagtgagaaccgcgtcggtcaggtgaccggtctggcgtggacggaagtgggcggcgatctgctgaccatcgaaaccgcctgcgtgccgggcaaaggcaagctgacctacaccggctcgctgggcgaggtgatgcaggagtcgattcaggctgcgctgacggtggtacgttcgcgggctgataagctgggcattaacgccgacttctacgagaagcgtgacattcacgtgcacgtgccggaaggggcgacgcctaaggatggtccgagcgcgggtattgccatgtgcacggcgctggtctcctgcctgaccggtaacccggtacgcgctgatgtggcgatgaccggtgaaatcactctgcgtggtcaggtgctgccgatcggcggtctgaaggaaaaactgctggcggcgcatcgcggcggcattaagactgttctgattcctgatgagaacaaacgcgaccttgaagaaattccggataacgttatcgccgatttggatatccatccggtgaaacgaatcgaggaagttctgacacttgcgctgcagaacgaaccgttcggcatgcaggttgtgaccgcgaaatag

SEQ ID NO: 138268 - DNA, 273 bp, Enterobacter cloacae
gtgaataaatctcaactgattgacaaaattgctgcgggtgcggacatttctaaagctgcagctggacgtgcgttagatgctttaatcgcttctgttactgaatctctgcaggctggggatgacgttgcgctggtaggttttggtacctttgctgttaaagaacgtgccgcccgtactggtcgcaacccgcaaacaggtaaagaaattactatcgctgccgcaaaagtgccgggcttccgtgctggtaaagcgctgaaagacgcggtgaactga

SEQ ID NO: 138269 - DNA, 1875 bp, Enterobacter cloacae
atgatggacaacctacgcacggccgccaacagcgtcgtgctcaagattattttcggtatcattatcgtctcgttcattttgaccggggtgagtggttacctgattggcggtggcaaaaactatgccgcaaaagtgaatggccaggagattggccgtgggcagtttgaaaacgccgtcgccagcgaacgtaaccgtatgcagcagcagcttggcgatcaattctccgagctggcggcgaacgaaaactacatgaaaaccatgcgccagcaggtgctgaaccgcctgatcgatgagtcgcttctggatcagtatgcccgcgagctgggcctcagcatcagcgatgagcaggtgaagcaggcgatcttccagacccaggcgttccagacgaacggtaagttcgacaaccagcgtttcagcggtattgtcgcccagatggggatgaccaccgatcagtacgcccaggcgctgcgtaaccagctgaccacgcagcagctgataaacgccattgcgggtaccgacttcatgctgccgggcgagtccgatcagctggcggcgctggtatctcaacagcgggtggtccgcgaagcgaccatcaacgtaaatgccctggcggcaaaacagaccgccagcgatgaggaaatcaacgccttctggcagcagaatcaggcccgttttatggcgccggagcagttccgcgtcagctacatcaaaatggatgccgccagcatgcaggagagcgcctctgacgaagagattcagtcatggtacgaccagcacaaggatcagttcactcagccgcagcgcaaccgctacagcgtgattcagaccaaaactgaagccgatgcgaaagcggtactggccgagctgcaaaaaggagcggacttcgccacgctggcgaaagaaaaatcgaccgatattatctctgcccgcaacggcggcgatatggggtggatggaagatgcctctaccgtgcctgagctcaaagatgccgggctgaaagagaaaggccagctgtctggcgtgatcaaatcctcggttggcttcctggtggcccgtctggacgacgtccagccggcgcaggtgaagccgctggctgacgtgcgtaatgacattgcggcgaaagtgaagcaggaaaaagcgttggatgcttactacgcgctgcagcagaaggtgagcgatgcggccagcaacgataatgaatcgctggcgagcgcagcgcaggtcgccgggctgaaggtcatagaaaccggctggtttggccgcgataacctgccggaggagctgaactttaaaccggtcgctgacgctatttttaacggcggtctggtgggtgagaacggcgcgccgggcagcaactccgatatcattaccgttgacggcgatcgcgcttttgttctgcgcattagcgaacacaaagccgaggcggtgaagccgcttgccgaagtgaaggcacaggttagcgatatcgttaagcacaataaagcggaacagcaggcgaaactggaggccgacaagctgctggcggcgctgaaagacggcaaaggcgatgaagcgatgaaggcggctggcctgagctttggcgcgccgcagacgctttctcgtaccggccaggatccgctgagccagctggcatttaccctgccgctgccgcagcagggtaaaccggtctacggcgtgggcagcaatatgcaaggcgatgtggtgctggtagcgctggatgaggtgaaagccggcagcatgccggaagagcagaagaaggccatggttcaggggatcacccagaacaatgcccaaatcgctttcgaagcgctgatgagcaacctgcgcaaggcggcgaaaattaagctcggcgacagcatcgaccagcagcagtaa

SEQ ID NO: 138270 - DNA, 369 bp, Enterobacter cloacae
atgaaatatggaataaaagcactgatggccgcgggcgttctggttttcgcggtaggggtacagggggcgctggcggcacccgccagcggcaaagcggcggtgaataaagaaaatgtgcaggcgtcctcttcggcgaaggcggaagcggtgcccggcgagtctgacaacggggcgacaaaggtcagcattaaccgcgccagcgccgaacagctggcgcaggcgttaaatggcgtaggattgaaaaaagcccaggctattgtcagctaccgcgaagagtacgggccgttcaaaaccctcgatgatctgaagcaggtcccgggaatggggagcgcgttggtggagcgcaatttagcccatctgactctgtaa

SEQ ID NO: 138271 - DNA, 402 bp, Enterobacter cloacae
atgcagacacaaattaaagttcgcggctatcatctggacgtctaccagcatgtgaacaacgctcgctacctggagttccttgaggaagcccgctgggacggcctggaaaacagccccgcgtttcagtggatgatggagaaaaacatcgccttcgtggtggtgaatatcaatattaactaccgtcgtccggcggtactgggcgatgtgctgacggtgagcagcaaactggagcaactcaacggcaaaagcggcaccctaagccaggtggtcaccctcaaccccaatggcgaagtagtggccgatgcgctgattaccttcgtttgtatcgatttgaaaacccagaaggcgctgccgctggaaggggaattgcgtgcgaaacttgaccagatgaacctgcgctga

SEQ ID NO: 138272 - DNA, 702 bp, Enterobacter cloacae
atgaaacgcgccgtagttgtcttcagcggaggacaagattcaaccacctgtctggtgcaggctctgcaacagtatgatgaagtgcattgcgtcacttttgattatggccaacgccaccgcgcggaaatcgacgttgcgcgcgaactcgccctgaaactgggcgccgtcgcgcataaagtgctggacgtcactctgctcaacgaactggcagtcagcagcctgacccgcgataacattccggtaccggactatcagcctgatgccgagggcattcccaacacctttgtccccgggcgtaatattctgtttttaaccctgacggcaatctacgcctatcaggtaaaagccgaagccatcatcaccggcgtgtgcgagaccgacttctccggctacccggactgccgcgatgagtttgtcaaagcgctgcaccacgccgtcagcctggggatggcgaaagacattcgctttgagacgccgctgatgtggctgaataaagccgagacctgggcgctcgccgactactggggtcagctggatctggtgcgccgggaaaccctcacctgctacaacggcattaagggcgatggctgtggccagtgcgccgcctgtaacctgcgggcaaacggactcaaccagtatctggcggacaaggtcggggtaatggcggtgatgcagcaaaaaaccggactggcgcaggcataa

SEQ ID NO: 138273 - DNA, 1701 bp, Enterobacter cloacae
atgcgactcttacaccgtttaaatcaataccagcgcctatggcaaccctcagccggggcgccgcagcaggtcaccgtcggcgaactggcggagcgctgtttttgcagcgagcgccacgtccgtactctgctgcgtcaggcgcaggaggccgggtggctaagctggcaggccagctccgggcgcggcaaacgcggacagctcttatttcacaaaaccccggaaagtctgcgcaacgagatgatggagcaggcgctgaacaacggtcagcaacaaaccgcgctggagctggcgcagcttgccccggtggagctgaaagccctgctccatcccttcctcggcggtcagtggcaaaacaatacccccacgctgcgtattccttactatcgcccgctggagccgctgcgtcccggctttctccccggccgcgccgagcagcatctggccggacaaatctatgccgggctgacgcgcttcgacgaaggcgacaatatgccgatcggcgatctggcgcaccactggcaggtctccccggacggcctgcgctggcatttttatatccgctccacgctgtgctggcacaatggcgatacggtggaaaccgcgcagttgcgacagcggttactgctgctgcttgagctgcccgccttgcggaccctcttcgccagcatcagccgtatcgatgtcacccatgcccagtgtttaacaataaccctgcatcgccctgactactggctgccgttccgcctcgccagctactgcagcgtgctggcgcatcccgacgatccggccattggctgcggaccgttccgcctgaagcggtttagtccggaactcgtccgcctggaaaaccatccccgctaccacctgcagcatccgctgatccaggcggtggagtactggatcactcctcagctctttgaccgcgatctcggcaccagctgccgccatccggtgcagatcaccatcggcgatcgcgaagagctgcataatctgcgtcaggtcagcaaccgtatcagccttggcttctgctatttgaccctgcgccacagccctcggcttagcaaagcgcaggcccagcggctggtgtcgataatccatcactcgtcgctactggatacgctgccgctggaggaggatctgattacgccaagccatgaggtgctgccgggatggtccatcccgcagggaccggcaaacaacgcggtaccgctgccggccaggctcaccctgctctatcatctgccggtcgagctacatgcgatggccgaacagctgaggcaacgtctggctctgctgggctgcgagctgacgctcctgttccacgacgctaaaaactgggaaggctgccagcatctggggcaggccgacctgatgatgggcgaccgtctgatcggcgaagcgccggagtacgccctggaacagtggctgcgctgcgatatgctgtggcctaatttgctgaccggggcgcaatatgctcatctgcaggcgacattagacgcggtgcagtctcagcccgacgctcgcagccgcaacgatgcgctgcgcaacgtattcaacagcctgatggaagacgccatcatgacgccgctgttcaagtataactatcggatcagcgcgccaccgggggtcaatggtctgcgcctcaacgcccggggctggttcgacttcgccagcgcctggctgccggcctcgtcgacgtga

SEQ ID NO: 138274 - DNA, 819 bp, Enterobacter cloacae
atggcaaaactggcggcatttgatatggacggcaccctgctgatgccggaccatcgtcttggagaaaagacgctttccgcgctgaaacggctgcgtgagcgcgatatcaccttgaccttcgccaccggccgccatgtgctggagatgcaccatgtgattggcgaattttcccttgatgcatttctgatcaccggcaacgggacgcgcatccattcgctggaaggggaggagctttatcgccaggatctcgctcccgaggcggcagaagcggtgctgcacggcaaatgggatacccaggccagcatgcacgtctttaacgatggcggctggttcaccggccaggcaaggcctgaattgttgcaagcgcatgtattcagcggctttcactatcaactgtgcgatctgaagcgcatgtcggcgcagcatgtcaccaagatctgtttctgcggcgatcatgacgatttgcgccgtctgcggatccagctgaatgagacgctgggcgatcgcgcatttctctgcttctcggcaatggactgtctggaggtgctgccggttggctgcaataaaggcgcggcgctggcggtgctcagccagcatttaggcttcaccctgcaggagtgcatggccttcggcgatgcgatgaacgaccgcgagatgctgggcagcgttgggcgggggttcatcatgggcaacgcgatgccgcagctgaaagccgagctgccgcatctgccggtaattggcgactgtcggaatcaggcagtctcccattttttaactcattggctggataatcctgatcttccttattcccccgaatag

SEQ ID NO: 138275 - DNA, 618 bp, Enterobacter cloacae
atggatcagtttaccttcgccgagcgggccaccgactggcgcggcaacaacaatatcgccgacagtattttccgccagatgagccatgagccgcacccgcagccgtcatggatcgtcatgagcgccggcaccggcggcacctcagcgaccattggccgctatattcgcagccagggctacgagacgcagctgatggtcgttgatccgcagaattcggtgttcctcgattactggcagacccgcgacgccagcctgcgcagcccggtcggcagcaaaattgaaggcatcggacggccgcgcgtcgagccgtcgtttattcccgacgttgtcgatgagatgctgcgcgtgccggatgcggcgagcgtagccaccgccctgtggctggaaacgcagcttgggcgcaaggtcggcgcctcgaccggcaccaatatgtggggcgtattgcagctggccgcgcggatgcgcgaagaaggtcgcaccggctcgatagtgacactcctgtgcgacagcggcgagcgttacctggaaagctattacaacccgcagtgggtggcggacaatatcggcgatattgcgccctggcaggcggagatcgccggtctggtcgaaaggcgataa

SEQ ID NO: 138276 - DNA, 213 bp, Enterobacter cloacae
atgcatattgtaaataccgtgatggtgatcgccgtcacctttttctgctgcgccatggccatgaccatggtgatcgtcatcgtcgtccgccccggtgatgagcagcggtttgaccccatccagctcggcaatcgtcacctttttattcgccgcaatgctttgcgtcgacttatccataaaggcttccatttccggaccaatccacaccactaa

SEQ ID NO: 138277 - DNA, 177 bp, Enterobacter cloacae
atgctcggaggcgccatcgggcagcagcacctgggtctcggtcaccccatcggcgatggccgccgcaataaagcccagcggtttcatagaagtcaccacggcggcgctggccagcggtacctgcgcgaacaaaaaaacagcgccaagtccagcgcaaagaagcgtatttttatgtaa

SEQ ID NO: 138278 - DNA, 753 bp, Enterobacter cloacae
atgacaaaccttgtaacgctggaaaatgtctcggtggcctttggccaacgccgcgtgttgtctgacatctcgctggctctcacgccaggcaaaatcttaaccctgctgggccccaacggcgccggcaaatcgacccttgtgcgggtggttctcgggctggtagcaccgacagagggtgttatcaagcgtgacgcacgcctgcgcatcggctatgtgccgcagaaactgcatctggacgccacgctgccgctgaccgttagccgcttcctgcgtttgcgcccgggcccccgtaaagacgacatcctgccggcgctgaagcgcgtgcaggcggggcatctgatcgatgcgccgatgcaaaagctctccggcggcgaaacgcagcgcgtactgctggcccgcgccctgctcaaccgtccgcagctgctggtgctggatgaaccgacccagggtgttgacgtcaacggccaggtggcgctctacgatcttatcaaccagctgcgccatgaactggactgcgcggtgctaatggtatcccacgatctgcatctggtgatggccaaaaccgacgaagttctgtgcctgaaccagcatatctgctgctctggcgcaccggaggtggtctccatgcacccggagtttatctccatgttcggcccgcgcggcgcggaacagctggggatataccgccaccaccataatcaccgccacgaccttcaggggcgaattgtactgcgtcggggaaacagccgctaa

SEQ ID NO: 138279 - DNA, 786 bp, Enterobacter cloacae
atgattgaacttctgttacctggctggcttgccgggatgatgctggcctgcgccgctggtccgctgggctcctttgtggtctggcgccgcatgtcttatttcggcgacacgctggcgcatgcgtctctgctcggcgtcgctttcggtttattgcttaacgtcaatccgttctatgcggtgatcgtcgtgaccctgctgctggccggcgggctggtgtggctggaaaaacgaccgcatctggcgatcgataccctgctgggcatcatggcgcacagcgcgctgtccctggggctggtggtggtcagtctgatgtctaacgtccgcgtcgatctgatggcgtacctgttcggcgatctgctggcggttacgccgcaggacctgatcgccattgccattggcgtggtgattgtgattggcattctgctctggcagtggcggaatctgctggcgatgaccatcagtccggacctggcgtttgtcgacggcgtgaagctgcagcgggtcaagctgctgttgatgctggtcaccgccctgactatcggcgtggcgatgaagttcgtcggggcgctgatcattacttccctgctgattatcccggccgccaccgcccgccgttttgcccgtacgccggagcagatggccgccgtggcggtgggcgtgggcatgctggccgttaccggcgggttaaccttctcggctttctatgataccccggccgggccgtcggtggtgctctgcgccgcggtgctgtttattctcagcatgacgaaaaaagccgccagctga

SEQ ID NO: 138280 - DNA, 1011 bp, Enterobacter cloacae
atgattgaagcagaccggctggtatcggcagacagcagcggctttgaagaggccgctgaccgcgccatccgcccaaaattgctggcagagtatgtcggccagccgcaggtgcgttcgcagatggagatctttatccaggcggcgaagctgcgcggcgacgccctcgatcacctgctgatttttggcccgccagggttggggaaaaccaccctggccaatatcgtcgccaatgaaatgggggtgaatctgcgtaccacctccggcccggtgctggagaaggcgggcgatctcgccgcgatgctcaccaacctcgaaccgcacgatgttctgtttatcgatgagatccatcgcctctcgccggtggtggaagaggtgctctatccggcaatggaagactaccagctggatattatgattggcgaaggtcccgcggcgcgttccatcaagatcgatctgccgccgtttaccctgatcggcgcgcagatcggggatctgatagaactccagacgctgcgcgaccgctttggcatcgtgcagcgtctggagttctatcagatccccgatctgcagcatattgtcagccgcagcgcccgccatatggggctggagatgagcgacgagggcgcgctggaagtagcccgccgttcacgcggcacgccgcgtattgccaaccgtctgctgcgccgggtgcgtgactttgcagaagtgcgccacgacggcaccatctccgccgatattgccgcccaggcgctggatatgcttaacgtcgatgcggaagggttcgactatatggaccgtaagctgctgctggcggtgatagataagttctttggcggcccggtggggctggataacctcgccgccgcgattggcgaagagcgggaaaccattgaagatgtactggagccctacttaattcagcagggctttctgcagcgtacgccgcggggaagaatggcgacggtgcgcgcctggaatcatttcgggattacgccgccggaaatgccgtag

SEQ ID NO: 138281 - DNA, 312 bp, Enterobacter cloacae
  misc_feature (257)..(266): n is a, c, g, or t
gtgataggcagactcagaggcatcattctcgaaaaacaacccccgctggtgttgctggaaacggcgggcgtcggctatgaagtgcatatgccaatgacctgcttctatgagctgccggaggccgggcaggaggcgatcgtcttcacccactttgtggtgcgtgaagatgcccagctgctgtatgggtttaacaacaaacaggaacgtaccctgtttaaagagcagggtacgttcctgtttgttgttaaacccatacnnnnnnnnnnatgccgagcaggaagcggttgccgcgctggtcgcgctgggctataa

SEQ ID NO: 138282 - DNA, 522 bp, Enterobacter cloacae
atggctattattctcggcattgacccggggtcgcgcgttaccggttatggcgtgatccgccaggttgggcggcagctgagctacctgggcagcggatgcatccgcaccaaagtggacgatctgccgtcgcggctgaagctgatctacgccggggtgacggagatcatcacccagttccagcccgactatttcgccattgagcaggtctttatggccaagaatgccgactcggcgttaaagctcgggcaggcgcgcggggtggcgatcgtcgcagcgaccaatcaggcgctgccggtgtttgaatacgccgcccgtcaggtcaagcagaccgttgtcgggattggcagcgccgaaaagagccaggtccagcatatggtgcgcaccttgctcaagctgcccgccaatccgcaggcggatgcggcggatgcgctggcgattgccatcacccattgccatgtcagccagaatgccgctcagatcagcgagacccggctcaatctggcgcgggggcgcttacgataa

SEQ ID NO: 138283 - DNA, 741 bp, Enterobacter cloacae
atggcaggtcatagtaaatgggccaacaccaaacaccgcaaagcggcacaggatgccaaacgcggtaaaatctttacgaaaatcattcgcgagctggtcaccgccgcgcgtctgggcggcggcgatccggcttccaacccgcgtctgcgtgcggccgttgataaagcgctgtctaacaacatgactcgcgacaccctgaaccgcgccatcgcgcgcggcgtcggcggcgatgaagacgcgaacatggaaaccatcatttatgaaggctacggccctggcggtaccgcggtgatggtggaatgtctgtccgacaaccgtaaccgtaccgttgcggaagtgcgtcacgccttcaccaaaaccgggggtaacctcggcaccgacggttccgtctcctacctgttcagcaagaaaggcgttatctccttcgagaaaggcgatgaagacactatcatggaagcggcgctggaagcaggcgcagaagatgtggtgacctatgacgacggcgccatcgacgtctacaccgcctgggaagagatgggcgctgtgcgcgacgcgctggaagccgccggcctgaaagccgacgctgccgaagtctcaatgattccgtccaccaaagcggatatggatgccgagacggcgccgaagctgctgcgtctgatcgatatgctggaagactgcgacgacgtgcaggaagtgtaccataacggcgagatctccgacgaggtcgcagccaccctgtga

SEQ ID NO: 138284 - DNA, 444 bp, Enterobacter cloacae
atgtcatttaagctgcccgtttcggtgctggtggtgatttacgccgaagatacgaaacgggtgctgatgttgcagcggcgcgacgatcccgcgttctggcagtcggtcaccggcagcctggaagctggagagaccgcgctgcaggccgccgcgcgtgaagtaaaggaagaggtcgccattgacgttgcctgcgagcaactgaccttaatcgactgtcagcgcacggtggagttcgagatattttctcatttgcgtcatcgctatgcgccgggtgtagagcgcaatacggaattctggttctgtcttgcgctgcctcatgagcgggagattactttcaccgaacatctggcctatcgctgggtcagcgcgacggaagccgctgcgctgaccaagtcgtggagcaaccggcaggcgattgaagaatttgtaattaacgccgcctga

SEQ ID NO: 138285 - DNA, 1788 bp, Enterobacter cloacae
atgcgtacagaatattgcggacagcttcgacagtcccacgttgggcagcaggtgactctgtgtggttgggtcaaccgccgtcgcgatctcggtagcctcatttttatcgatatgcgcgaccgcgaaggcatcgttcaggtgtttttcgatccggatcgtgcggatgcgttgaagttagcctctgaactgcgtaatgagttctgcattcaggtcactggcaccgttcgcgcgcgtgaagagaaaaacatcaacgcggacatggccaccggcgctatcgaagtgctggcttccgatctgacgatcattaaccgctcagaatcgctgccgctggactccaatcacgtcaacaccgaagaagcgcgtctgaaataccgctacctcgacctgcgtcgtccggagatggcgcagcgcctgaaaacccgcgcgaaaattaccagctttgtgcgccgctttatggacgaccatggcttcctcgacatcgaaaccccgatgctgactaaagccaccccggaaggcgcccgcgattacctcgtgccttcccgcgtgcacaaaggcaaattctacgcgctgccgcagtcgccgcagctgttcaaacagctgctgatgatgtccggcttcgatcgctactatcagatcgtcaaatgcttccgcgatgaagatctgcgtgccgaccgtcagcctgaattcacccagatcgacgtggaaacctcctttatgaccgcgccgcaggtacgtgagatcatggaggcgatggtgcgtcagctgtggctggaagtgaaaggcgtcgacctgggcgagttcccgatcatgaccttcgccgaagccgaacgtcgctatggctccgataaaccggatctgcgtaacccgatggagctggtggacgtcgccgacctgctgaagtctgtggaattcgcggtctttgccggcccggccaacgatccgaaagggcgcgtggcggccctgcgcgtcccgggcggggcctctctgacccgcaagctgattgacgaatacggcaactttgtgaagatctacggcgcgaaagggctggcctatattaaagtgaccgagcgtgccaaaggcatggacgggatcaacagcccggtggccaaattcctgaccgctgaaatcgtggaagcgatccttgaccgcaccggcgcgcaggatggagacatgatcttcttcggcgccgacaacaagaaagtagtggccgacgcgctgggcgcgctgcgtctgaagctgggtaaagacctgagtctgactgacgagagcaaatgggcgccgctgtgggtgatcgacttcccgatgttcgaagacgacggcgaaggcggcctgacggcgatgcaccatcctttcacctcgccgaaagatatgaccgcggatgagctgaaagccgccccggaagaggctgtagccaacgcctacgatatggttattaacggttatgaagtcggcggcggttcggtgcgaatccaccgcggcgagatgcagcagaccgtatttggtattctgggcattaacgaacaggaacagcgtgagaaattcggcttcctgctggatgcgctgaagtacggtacgccgccgcatgcgggtctggccttcggtcttgaccgtctgaccatgctgctgaccggtaccgataacatccgcgacgttatcgctttcccgaaaaccaccgcggccgcctgcctgatgaccgaagcgccaagcttcgccaatccggcggcgctcggtgaactgggtattcaggttgtggagaaagaggcaaaagcgtctctggagaacaagtaa

SEQ ID NO: 138286 - DNA, 567 bp, Enterobacter cloacae
atgttagaactcaatgcaaaaaacacggcgctggtggtaatcgatctgcaggaaggcattctgcctttcgccggcggcccgcatcgggctgacgaggtggtggcgcgcgccgctcgcctggcagacaagtgccggcaacagggttcgccggtcatcatggtccgcgtgggctggtcggccgatttcgccgaagcgctgaaacagcctgtcgacgctcaggccggggcgcatacgctgcccgaaaactggtggacctacccggccacgctgggtaagcaggagagcgatatcgaagtgaccaaacgccagtggggcgcgttctatggcaccgaccttgagcttcagctgcgccgccgcgggatcgacaccattattctctgcggcatctccaccaacatcggcgtcgaatccaccgcccgcaatgcctgggagctgggttttaacctggtcatcgctgaagatgcctgcagcgccgcctccgccgagcagcatcagggcagtatgacgcatattttcccgcgcatcggccgggtgcgcagtaccgaggagatcctcacggcgctatga

SEQ ID NO: 138287 - DNA, 819 bp, Enterobacter cloacae
atgatttatattgggcttccccagtggtcgcacccgaaatgggtgcgccttggcatcaccagccttgaagagtacgcccgccactttaactgcgtggagggcaacaccaccctgtatgcgctaccaaagccggagattgtcgcccgctggtatgaacagactcacgatgacttccgcttctgcttcaaatttccggccaccatctcgcaccaggccgccctgcgccattgcgacgagttaagcagtgaattttttgcccgcctggcgccgctggcctcgcgcatcggccagtactggctgcagctgccggcgacgttcggtcctcgcgatctccccgcgctatggcattttctcgacggactgccgaaggatttcacctacggcgtcgaagttcgtcatcccgagtttttcgccaaaggggaagcggaacagcagctcaaccgcgggctgcacgagcgtaacgtcaaccgcgtgatcctcgacagccgcccggtccatagcgctgcggccaccagtccggcgatgatcgatgcccaacaaaagaaaccgaaggtgccggtacatgcggtgatgaccgcccgacagccaatggtgcggtttatcggcggtgacgatatggcccataaccgggaactgtttcgcgtctggcttcagaccctggcgaagtggcatcagtcggggaccccgtggttgttcctgcataccccggacattgctttcgccccggcgctggtggataccctgtggggtgacctgcgcgctgccctgccggcggcaggaaatgcgccgtcgattccgcagcaatcttctcttttctga

SEQ ID NO: 138288 - DNA, 396 bp, Enterobacter cloacae
atggtcagcgcgctgtatgccgttttaggtgcgttattgttagtgaagttctcatttgacgtggtgcgtctgcgcacccaataccatgtaggctacggtgacgggggctttagcgagctgcaggttgccatccgcgttcacggcaatgccgtcgaatatgtgccgattggcctcattttgctgttatttatggagatgaacggcgctcagacctggatggtgcacgtttgcgggattttattaattgtcgggcgactgatgcactcctggggttttcatcaccgcgtctactactggcgccgctccggcatgagcgccacctggtgcgcgttgttgctaatggtgctggccaatctctggtatatgccctgggagttggttttctccctccgttag

SEQ ID NO: 138289 - DNA, 951 bp, Enterobacter cloacae
atgagccagttagacgaactgaaaaaatacaccacggttgttgctgataccggcgatattgaatcgattaaaaagtttgcaccccaggatgcgaccactaacccctcgctggtgctgaaggccgcgcagctgccgcagtatcagccgctgattgccgatgcgattggcaaggcacgccgccagggaggcagcgcagaaacgcaattgattaacgcctgcgatcaggtggcagtggatatcggcagcgaggtgctgcgccatgtgcccgggcgtatctccaccgaagtggatgctcgctttgcctgggatcgcgggatgtgcgtcgcgaaggcgcgcaagctcatccagttatatgaaaaaaatggcattggtcccgagcggattctaattaaactcgccgccacctgggagggcattcgcgctgccgaagagttggagcagagcggtataaactgcaacctgacgctgctgttctctttcgctcaggcccgggcgtgcgccgaagcgggcgtctttctcatctcgccctttgtgggccgcatctacgactggtatcagaagcaccagccgcagtcagcctatcaggtggacagcgatccgggcgtggtctctgtgcgccagatttatcagtattacaaatcccatggctatgacacggtggtaatgggtgccagcttccgtcgaattgagcagatccaggcgctggcgggctgcgatcgcctgactatctctccggcactgctggacgagctggcggccagcgaaggagtgttgacccgccagttgacccccggctgcgtgacggaaacccgtcccagcccgatgacgcaggcggagttcctctggcagcatcatcaggatcccatggcagtggaaaaactagcggaagggatccgactgtttgctgtcgatcaggtgaaactggaacaacagattcagcagatgctgtaa

SEQ ID NO: 138290 - DNA, 459 bp, Enterobacter cloacae
atgaaaacaatcgctattggtgcggatgatgccgcctatgcttttcgcgattccatcgtcgcttatttgaatgggttgggaattaacgtcgcggattacagcagcgataaacgccaggggagtaccgtttatccggatgttgcccatgcggtggcgatgtcgattaaacagggcgaacacgagcgtgggatcctgatctgcggtaccggcattgggatgagtattgtggccaataaagtccccggggtccgcgccgcacagtgtcacgataccttctccgccgagcgagcgcgtaaaagtaacaacgcgcagattattaccctcggcgcgcgggtgattggcgctgagctgggcaaaaaaattattcaggcgtggcttgagtccgaatatgaaggcggcggatccgcgcccaaagtggaacgtattgattattacgaacaccagcatgccagagattaa

SEQ ID NO: 138291 - DNA, 375 bp, Enterobacter cloacae
atgagcgtgccgttgtattcattacggattaccgccgtcggggaatatgttgagtactctctgcaggagctgcggcttattttattctccgatgccgttcccgactatattgcgagttattgcgctgtacaccaggccagcgaactgaccgccgagttatcgcctggtcagcaaatgaaattaaatgataaaaattatcgggtgaccgcggtaggccgtgtggcaacggcaaatttacgacagcttggccatatcacgctaaattttgatggcgcagatatcgctgaattacccgggacggtacacctttacggcgaaccaccacaaattattcagcctggcgaccaaatttcgttttacccgaattgtcattaa

SEQ ID NO: 138292 - DNA, 1020 bp, Enterobacter cloacae
atgaatattaatatacttgaaaaaatgaataaggtgcccggtgggttaattattattccactgctggtggctatattaattaatactttcgcgccccaggtgctcagcattggcggcccgaccaccgccttatttaaagtcggttccagcgccatgatgggcatatttttgctcatttgcggaacctcgatcaatatccgtcaggccgggttgccgctctataaaggcgccgtgctgctgtttctcaaatgtctggccggggcactggcggtatgggttgcgggaacgttgtttggcccgagcggttttctcggaatatcgaccctggcgctgattgcctgcctgaccagctcgaacagctccctctatatcgcattgtgcagcaactatggcgatgccagtgatgccggggcgatctccgtattctgcatcaaggatggtccgtttgttaccatgatggtgctgggcgtcagcggcctggccaatattcccttcgccgcgctgctgtcgatgctgatcccactgctgattggcatgctgtggggcaatctggacgaacgctttaaacagttatgcgctgcggcgcagccgctggtgatcattattatgtcgttcgccatcggcgccaactccagtatcaatacggtgttcaccgccgggctgtccgggatcctgttggggattatctccgcgctaaccgggattgtgttctactttatctacaacctgtttttgaagaagaaaagcgcgctgggcgccgcgctgggaaccaccgccgccagctcggcgctgacgccggcgatggttgcccaggcggatcattcgctggcgatgtacgtggatgccgccaccgcgcagctggcgacggcgagcattatcaccatgatcaccgcgccgatactggtcgcctggtttgataaacggctgaaaaagcgtgcgccagccgctgaaccgctgaaagaggtgaaaagtgaagagagcgtgacattatcttcccctgccgccaaaggacacaaatag

SEQ ID NO: 138293 - DNA, 1719 bp, Enterobacter cloacae
atggaaaaacatctgttgattagcaagggctgtaagggctggggcgggccgctgactatcacgccaggtcaggggaaaaagattgcgtacatcaccggggggatccgtcccccggtcgtcgaccgcctgagcgaactgaccggctggccttccattgatgtattcaagaatggcgaaccgccggcggaagagattggtttaatggtcatcgactgcggcggcacgttgcgctgcggactctatccgaagcggggaattcccaccattaacctgcatcccaccggtaaaagcggcccgctggcggaatttatacacgaagggatctacgtctccggcgtgacgccagcctgcattgagatggtctggccgcaaggggaaggcggaaagcttgggatcgtggctgacgatctgaccggggcaactaccgtcggggtgctgctggcgcgcagtggtttaaaaaccgccgcgtttttcgataccgaatccttcgcccgcaatgaggtagagtatccggcgatggtggtcagcagcgacagccgcccattgccgaaagcggaggcccagcacaaagtgagcgctgcggtgaaacagctgcaggctcgcggcgcgcattacttcaccaagcggattgataccacgctgcgcggtggcatcggatttgaaatcgacgccatgctggaacaactgccgcaggagacggtggcggttgtggtgccggcgatgccgcagtcacggcgtattctcgtcggcggttactcggtgattgattcggtagccctgtcgcggaccgatgtggctcgcgatgtacgtaccccggtcaccgagtcgtgggtgccgggactgttggcggcgcagacccatcatcaggtcgggcatatcgcgctgacatcggtgatgaaaggcgaagggcaaatccagcaggatttacaggaacaacaacagcgcggcgtgcgggtgatagtggtcgatgcgataaccgtcgacgatgtcgatgccatcgccggggcggtagtggccctgaactggaacgtgctggccgtcgatccggggccctttaccgaacggctggcggttcgtcgcggcctgatgcgcgaagcgcggagcagcgcgcccgcgagcctgacagcggacggccagcgcggctcgattttgatcgttgccggcagcgcaacgccagtaaccaaaaaacagctccagtatttgatcgctaatgatgcccgggtctgccatatcccggtggatgccgagctgttggttgaccggaaaaacgccgctgagattgaagtcaatcgcgtggtgcagcatgcccgacagtgtgttccggcgcagcacaacgcgctctttgtttttgagtccgccttgaccgggcggttgctaaaccttcaggaagaggagcagcgatttggtctggcccacggtgaggctgcgcaaaatattaaccacggattgggcagtattgtgcgcgaggtgcttaactgtgcgtcgggtgaaattaaaggattgtatatgaccggtggtgacaccatggtcaatgtactaaaagagctgggcgccaccggaatagaaatgattgactatgtcatcccgcaaaccgatatggtgcggatcattggcggcgattatgccggcttaatttgcgtcgggaaaggagggctaaccggaccggaagatattattagcatcattgttgaccgaatttatcaggaagcacagcaataa

SEQ ID NO: 138294 - DNA, 1008 bp, Enterobacter cloacae
atgtcagcagagaaaaaacccgttgtggcgattaccattggcgatccggcagggatcggcccggagatcaccgtggccaccatgatggacaaaagcgtgtatgacgagtgcaaaccgttcctgatcggctcggtaccgattatcagccgggcgatgaaaatcatgggctgcgattttgctatccataaaattgcccatccgcaggaggcccgtttcagctgggggacgttggatgttctggaaactggcgactacgattgcgacagtatcgaatggggcaaggtgcagaaactggcggggcaaatgtcgctggactatgtgatgaagtcgatcgagctgggtaaagcggggctgatcgacgtggtctctactgcaccaattcataaggaagccatcaagctggcaggatgtaagctcccgggccataccgaaatctatcaggtggaaacccaatctgattacggtctgaccatgttccacgtccacaacctgcgcgtcttcttcgtgagccgtcatatggcgctaaaagcagcctgtgactatgccaacaaagcgcgagtgctggcctgcgttcagcagatccaccatgaatttaccgccctgaacatcaaaaatccgcgcattgccgtggccgccctgaacccgcatggttccgacaatggtctgtttggtcacgaagaggctgacaatctgatcccggcggtgaaagcggcccaggagatggggatcaacgctatcgggccggttccggccgattccgtgttccatctcggcaaacaggggcgctacgacgccattctctcgctgtatcacgatcaggggcatattgcctgcaaaaccctcgactttgaacgttcgatcaccattaccttcggcctgccgtttatgcgcagctccgtcgaccatgggacggcgtttgatatcgccggtaccggtaaggcgggtaccgtcagtatgctggagtcgacgctggtggcggcccgttactggaaaatgaagcatcaataa

SEQ ID NO: 138295 - DNA, 795 bp, Enterobacter cloacae
atgaccccgatatggttaggaaccagctggaaaatgaacaagccgctgtcgcaggccatggcctggtgcgaaacgctggcagcgcggatgccggagggctgtcaccctgctattcagcccttcgtcattccccccttcaccgcgatccaacccgtcagccattttctgcaaacgcatcagttaccgcttctgaccggcgcgcagaatatgcatgaagcggatcagggcgcctggaccggggaaatctcggcggccatgttggcagaaaccggcgccacacttgttgagctgggacattcagaacgacgcgccgcctttaatgaaagcgatgccgcgattaatcgaaaagtgcatagcgccttaggtcatggcctgcgcccgctgatctgtattggcgatagcgccgaggagaaacgctggcaggtgtcgcgtgaaagcgtggtgcggcagatgaagatcgccctgtatggcctgagccaccagcaggcgctgcggaccctgattgcgtatgaaccggtgtgggccattggcgaacatggtacgcccgcctcaccgcaggaggcgggcgtcattcatcaggcgctacgtcaggcgctttgcgagcggtttggtcacgagacgggaacccgtatcccgctgctctatggcggcagcgtaacgctgcaaaacgcggtggaattgctgcgccagcaggagatcaatgggttgtttatcggccgcgcggcctgggacgcgcaaggctattgcgacattgttcaacgcgttacacaggaatttattttgcaggcgcagtaa

SEQ ID NO: 138296 - DNA, 963 bp, Enterobacter cloacae
atgattgaacaagactcagattacgccctgctcactgaaattgcggtggcttattacgatcaggaacaaacgcaggaagagatcgccaaacgattcggcatttcgcgtatcaaagtcgggcgcctgctgaaaaaagcgcgccaggaagggattgttgagatcagcgtcaaataccatccggtcttcagctcccagattgagcagcagtttatttcgcactttggcattaagcgcgcgctaattgccctggatcaccatgatgaagatgaacagcgccagcaggtggcggccctggtcagtaactaccttgccggggtgttaaaaaacgatatgaccgtcaccgttggtcaggggcgcaatgtggccgcggtggcgaatcacgttggcgtgtttcctgagcgccactgccgctttatctgcggcatcggcggaaccaagcgtgacaatcagctgattgacgccgaccacatcagccggaatctggcgcgcaaatttaacggcttcagcgaaacgctttacgccccggcctatgtggaaaccccggagctgcgcgcggcctttatgcaaaaccgcctgattaaggccacgctcgaacaggccagcaaagctgacgtggcgatcatcggcctcggcgatatgaatgaaaacagctttatggtgcagctcggctggtttacgccgcaggaaattgccaccgcgcgtcaggaacagggggtggtgggcgatctggcggggtacagctttttcaatattcagggcaaacccgtcgatacggtgatgaatgaccgggtcattggcttaagtctcgaacagctgcgggccattccctgcgtcatcgctatcgcctccgaaagtacgaaagcgacggcgatcctgggggcattacgcaccggggttatcgatgtgctggctaccagcgcctcgaacgcccgttcggtcattaatatgcaaaaggcgctataa

SEQ ID NO: 138297 - DNA, 345 bp, Enterobacter cloacae
atgcataatccgctggttatcgaagcgatcatgttgatcgcggccattatcgttggcgtctggagccagcgcgctttaccgctacacgccgatagccgaccgatcctcttcctgctatgtctgttcctcggcactggcagcgcattgtgcctgctgctggatatcttagccctgctgttgaccggtcaggtcgcgacgggcggtgtgcgaatatacggcccgttgctgctgctggtggtgctgtggaaacctctcaactgggttgtcggcatcattgaagattttgtgcagcggcgagccgaaaaagggaagggcaaaggccagcgcgacggcggtcaatgctga

SEQ ID NO: 138298 - DNA, 831 bp, Enterobacter cloacae
atgcagtcgcgccgtttacatcgattgagccgttttcgtcgcaataaacgtcggttgcgtgaccgtctgcgtcagcggattttctttagggaggacaggatgaagcctgaagcgatggcaaaaccgagagtggtggtgttaaccggcgcgggcatctcggcagagtcggggatcaaaaccttccgcgcggccgatggcctgtgggaagagcatcgggtggaagatgtggcgacgccggaaggcttcgcccgcgatccggcgctggtgcaggcgttctacaacgcccgtcgtcgtcagctgcagagtccggaaatcgcgccgaacgcggcgcatctggcgctggcgcgtctggaggatctgctgggcgaccattttctgctggtcacccagaatattgataatctgcacgagcgcgccggcaaccgccgggtgatccatatgcacggcgagctgctaaaggtgcgctgttcgtggagcggccaggtgctggagtggaccggcgacgtcaccgccgaggacaagtgccactgctgccagttcccggcggcgctgcgtccgcacgtggtctggtttggcgaaatgccgctggggatggatgagatctacagcgcgctggccgacgcagatatttttatcgccatcggcacctccggccatgtctatccggcggctggctttgtgcacgaggcgcgactgcacggcgcccataccgttgaactgaacctggagcccagccaggtgggcagcgagtttgccgagaagcactacgggctggcaagcgaagtggtacccgcctttatcgataagctgctgcaggaaaacgcgctgtaa

SEQ ID NO: 138299 - DNA, 654 bp, Enterobacter cloacae
gtgccagccgccagcggccggccgctgcgcgctgacctcagcgcgcggttggggcgcgatgtgcgtctcgataatgacgccaactgtttcgcgctgtcggaagcgtgggacgatgagtttacgcaatacccgctggtgatgggattgatcctcggcaccggcgtgggcggcggcctggtgttgaacggtaaatcgattaccggacatagctatatcaccggcgagttcggtcatattcgcctgccggtggatgccctggaggtggttgggcgcgattttccgctgctgcgctgcggttgcggccagctgggctgtattgaaaattatctctccggtcgcggtttcgcctggctgtacgaacatttttatcagcaaccgctctcctcgccggagattgtggcgcacgcgcaggcgcacgttgagcgctatctcgatctgctggcggtgtgtctggggaatatactgaccattgtcgacccggatttgctggtgctcggcggtggattatctaactttacggccattagcgaagggctggcgcaacgattgccgcgccatcttctgccggtcgccagggttccgcgcattgagcgcgcgcgccacggcgatgccgggggaatgcgcggtgcggccttccttcacctgacccattaa

SEQ ID NO: 138300 - DNA, 903 bp, Enterobacter cloacae
atgaatcaatcttatggccggttggtcagtcgcgccgctatcgccgcgacggctatggcctccgcgttacttttgatcaaaatttttgcgtggtggtataccggttctgtcagtattctggctgcgctggtggattcgctggtggacattgccgcctcgctgaccaacctgctggtggttcgctattcgctacagcctgctgatgaagaacatacctttggtcatggcaaagcggagtcgctggcggcgctggcgcaaagcatgtttatctccggctcggcgctgttcctgtttctcaccggcattcagcacctggtgcgtccggagccgctgcaggccgccggcgtcggggtcgtcgtcacattgatcgccctcgttagtacgctggcgctggtgactttccagcgctgggtcgtgcgaaaaacccagagccaggcggtgcgggcggatatgcttcattatcagtctgatgttatgatgaacggcgccattctggtggcgctgggcctctcctggtacggctggcatcgcgccgacgcgttgtttgccctggggattggcatctatattttatatagcgcgctgcggatgggctatgaggcggttcagtcactactcgaccgcgccttgcctgacgaggagcgtcaggacattatcaccatcgtgaccgcatggcccggcatccgcggggcgcacgatctacgaacgcggcagtcagggccgacccgctttattcagattcatttggaaatggaagataacctcccgctggtgcaagcccacgtgattgcagaccaggtggagcaggcgattctgcgccgtttcccggggtccgatgtcattatccatcaggatcccagctctgtggtgccagcggcgcagcagggcttttttgagcgttag

SEQ ID NO: 138301 - DNA, 963 bp, Enterobacter cloacae
atgattaagaaaatcggtgtgttgacaagtggcggtgatgcgccgggcatgaacgcagcaattcgtggcgttgtgcgcgcggcattaacggaaggtctggaagtttttggaatctatgacggttacctcggattgtatgaagaccgtatggttcagctcgaccgttacagcgtttccgacatgatcaaccgcggcggcaccttcctgggctccgctcgcttcccggaattccgcgaagaacacatccgcgctgtggctatcgaaaacatgaagaagcgcggcctggacgcgctggtggttatcggcggtgacggttcctatatgggggcgatgcgcctgaccgagatgggcttcccatgcatcggcctgccgggcactatcgacaacgatatcaaaggcactgactacaccatcggcttctttactgccctgagcaccgtggtggaagcgattgaccgcctgcgcgacacctcctcttcgcaccagcgtatctccgtggtggaagtgatgggccgttactgtggcgacctgaccctggcggcggcgattgccggcggctgtgagttcatcatggtgcctgaagtggaatatacccgtgacgatctggtggcagaaatcaaagccggtatcgcgaaagggaaaaaacacgctatcgtggccatcaccgagcacatgtgcgacgttgacgagctggcaagctacatcgagaaagagactggccgtgaaactcgcgccaccgtcctcggccacattcagcgcggtggttccccggttccttacgaccgcatcctggcttcccgcatgggcgcctatgcgattgagctgctgctgcagggccatggcggccgttgcgtcggcatccagaacgagaagctggtgcaccacgacatcatcgatgccatcgagaacatgaagcgtccgttcaagaacgactggctggattgcgcgaagaaactgtactaa

SEQ ID NO: 138302 - DNA, 486 bp, Enterobacter cloacae
atgaaatacgatacttccgagctttgtgacatctaccaggaagatgtcaacgtcgtggaaccgctattctctaactttggaggacggtcgtcgtttggtggacagatcattacggttaaatgtttcgaggataacgggttgctctacgatctgctcgagcagaatggccgtggtcatattctcctgatcgacggcggcggctcagtacgacgcgcgttaattgacgctgacctggcgcgtctggccgtccagaatgaatgggaagggttggtggtctatggcgcggtgcgccaggttgacgaccttgaggaactggacattggtattcaggcgctggcggcgattccggtcggcgcggctggcgaaggcatcggcgaaagcgacgtgcgcgtcaatttcggcggggtgactttcttctccggcgaccatctgtatgccgataataccgggatgatcctgtcggaagacccgctggatatcgaataa

SEQ ID NO: 138303 - DNA, 921 bp, Enterobacter cloacae
atgactgatatcagccgttcacaggcgtggctggaaagcctgcgtcctaaaacgttaccgctggcatttgccgcgattattgttggcaccgtccttgcctgggagcagggccattttgatccctgggttgccctgctggcgctgatcaccgcaggcttgctgcaaattctttccaacctcgccaatgactacggcgacgcggttaaggggagcgataaaccggatcgcatcgggccgctgcgcgggatgcagaaaggggtgattaccccccagcagatgaagcgcgccctgatcgtcaccgtcgtactcatctgcctgtttggtctggcgctgctgtgcgccgcctggcagagcgtcggcgatttcatcggcttcctcgccctgggaggcctgtctatcgtggccgccatcacctacacggtgggcacccgtccgtatggatatattggtctgggtgatatctcagtactcgttttcttcggctggctgagcgtcctcggcagctggtatctgcaagcccataatgtggaagcggccatttttctgccggcgacagcctgcggtctgctggcgaccgccgtgctgaacatcaataatctgcgcgatatcgacagcgaccggcagaacgggaagaacaccctcgccgtgcgcctgggcccggtcaatgcccgccgctatcatgcctgcctgctgctcggcgccctgctgtgtctggcgctgtttaacctgctggcgctgcattcagcctggggctggctgtttattctcgccacgccgctgctggtgaaacaggcgcgctacgtcctgcgcgaatccgatccgctggcgatgcggccaatgctcgaaaagacggtcaaaggggctttactaaccaacctgctgtttgttatcggaattattgccagtaagctgatggcttaa

SEQ ID NO: 138304 - DNA, 1335 bp, Enterobacter cloacae
atgtctgaaatgaccccacgcgaaattgtcagcgaactggacaaacacattatcggtcaggacgccgccaagcgttctgttgctatcgccctgcgtaaccgctggcgtcggatgcagcttaacgaagagctgcgtcatgaagtcacaccgaaaaacattctgatgatcggcccaaccggcgtcggtaaaaccgaaatcgcccgtcgtctggcaaaactggccaacgcgccgtttatcaaagttgaagcgacgaagttcaccgaagtgggctatgtcggtaaagaagtggactccatcatccgcgatttgaccgatgcggcgatcaaaatggttcgcatgcagtccatcgataagaaccgttaccgcgcggaagagctggcggaagagcgcgtgcttgacgtgctgatcccaccggcgaagaacaactggggccagactgagccgtcgcaggaaccgtctgcagcgcgccaggcgttccgtaaaaaactgcgtgaaggccagctggacgataaagagattgaaatcgatctcgctgcggcgccgatgggcgttgaaatcatgtcccctccgggcatggaagagatgaccagccagctgcagtctatgttccagaacctcggcggccagaagcagaaaccgcgtaagctgaaaatcaaagacgcgatgaagctgctgattgaagaagaagcggccaaactggtcaatccggaagagctgaagcaggaagccatcgacgctgtagagcagcacggtatcgtctttatcgacgaaatcgacaaaatctgtaagcgcggcggcaacacctccggcccggacgtctcccgcgaaggcgtacagcgcgacctgctgccgctggtggaaggctgcaccgtctccaccaaacatgggatggtcaagaccgaccacatcctgtttatcgcctccggcgcattccaggtggccagcccatccgatctgatcccggaactgcaggggcgtctgccgatccgcgttgagctgaaggcgctgaccacccacgacttcgagcgcatcctgaccgagccgaatgcctccatcaccgtgcagtacaaggcgctgatggcgaccgaaggggtgaacatcgaattcaccgaagacggcatcaagcgcatcgcccaggccgcatggcaggtaaacgaaaccaccgagaacatcggtgcgcgtcgcctgcacaccgtgctggagcgcctggtggaagatatctcctatgatgccagcgagatgaacggccagaccgtcactatcgatgccgaatatgtgagtaaacacctggatgttctggtggcagatgaagatctgagccgttttatcctataa

SEQ ID NO: 138305 - DNA, 531 bp, Enterobacter cloacae
gtgactacaattgtaagtgttcgccgtaacggccatgttgttattgccggtgatggccaggccacgctgggcaacaccgtgatgaagggcaatgtgaagaaagtgcgtcgtctgtacaacgacaaagtgattgccggtttcgctggcggcaccgccgacgccttcacgctgttcgaactgtttgaacgtaaactggaaatgcaccagggccatctggtgaaggccgccgttgagctggccaaagactggcgaactgaccggatgttgcgcaaactggaagcgctgctggccgtcgcggacgaaaacgcgtcgcttatcatcaccggtaacggtgacgtggtacagccggaaaacgatttgattgctatcggctccggcggtccttacgcccaggccgcggcccgcgcgctgttggaaaataccgatatgggcgcgcgcgacatcgccgagaaagcgttggatattgcaggtgatatctgcatctataccaaccatttccacaccatcgaagaattaccttctaaagcgtaa

SEQ ID NO: 138306 - DNA, 855 bp, Enterobacter cloacae
atggtggcgatcgcggcggctgtgctggtggcctttatcggtggcctctatttcattacgcatcataagaaagaagaagcggaagcgatgcaaaatcgccaggccgccggcaacggcttgccgcccaaaccggaagagcgctggcgctatattaaagagctggaaagccgccagcctggcgtccgcgcgccgaccgaaccgaccgccggtggcgaagtcatgaaaccggaacagctgaccgacgagcagcgccagctgctcgcccagatgcaggccgatatgcgccagcagccgacccagctgaccgaagtgccgtggaacgaacaaacgccggcgcagcgccagcagacgcttcagcgtcagcgtttagcgcagcaacagcagcaggcgcagcagcaacagtgggcgcagactcaggcgcagaccgtccaacagcagccgccgcgcgttcagcagccgaagccggttcagcagcaacagccgaagcagaccacgtcaaaccagcagccgtaccaggatctgctgcagacgccagcgcataccaataccacgcagccgcgtacccaggccgcggcgccggtaactcgggtggaagaagcgccgaaaaccaccgccgagaagaaagacgatcgtagctggatgatccagtgcggctcttttaaaggcgccgagcaggccgaaaccgtccgcgctcagctggctttcgaagggtttgcttcgcacattaccactaacaacggctggaaccgcgtggttattggcccgttgaaaggcaaagaaagcgccaacgagatgatcacccgcctgaagatggctggacacgcgaactgcattcgtctcgccgccaggggttga

SEQ ID NO: 138307 - DNA, 1032 bp, Enterobacter cloacae
  misc_feature (973)..(1010): n is a, c, g, or t
gtgaagcccaaaaaacaagtggttgccgccaccatgaaagacgtcgccctcaaggcaaacgtttccacggcaaccgtgtcccgagcgttgatgaaccctgataaggtgtcgcaagccacccgtaaccgggtcgagcaggcggcgctggaagtcggctatttaccgcagtcgctcggacgcaatatgaagcgcaacgaatcgcgaacgatcctcgtgatcgtcccggatatctgcgatcccttctttagtgaagtgatccgcggtattgaagtcactgccgccgagcacggctatctggtgttaatcggcgattgcgcccaccagaatcagaaagaaaaaacctttatcgaccttatcatcaccaagcagatcgacggcatggtgctgctcagctcgcgcctgccgtttgacgccagcgtggaagagcagcgcaatttgccgccaatggtcatgtcgaatgagtttgcgccggagctggagctgcccaccgtccatatcgataacctgacggcggcctttaacgcggtaaattatctccacgagctgggacatcagcgtatcggctgtatcgccggcccggaagatatgccgttgtgccattatcgcctgcagggttatgtgcaggcgctgcgccgcagcggtatcaccgtcgatccgcactatattgctcgcggcaactttaccttcgaagccggcgccaatgcgctggagcagctcctggcgcagccggtgccgcccacggcggtcttttgccatagcgatgtgatggcgctgggcgccttatcgctggcaaaacgtcgcggtctgaaagtgccggacgacctgtcaattgtcggcttcgataacatcgcgttgtctgaattttgcgatccgccgttgaccacggtttcacagccacggtttgatatcggccgtgaaggaatgctgctattactggagcaaatgcaggggcataacgtgaacagcggctccnnnnnnnnnnnnnnnnnnnnnnnnnnnnnnnnnnnnnncgtctgctcgattgcgaactga

SEQ ID NO: 138308 - DNA, 1497 bp, Enterobacter cloacae
ttgagcgtgctggagaatgtgctggcgcaggggcgccaggcgctggtgatggtgccggagataggcctgacgccgcaaaccatcgcccgatttcgccagcgctttaacgcgccggtggaagtgctgcactccgggctcaatgacagcgaacgtctctcggcctggctgaaggcgaaaaatggcgaagcggccattgtgatcggcacccgctcctcgctgtttaccccatttaaagatctcggcgtcatcgtcatcgacgaagagcatgacagctcctacaagcagcaggaaggctggcgctaccatgcccgcgacctggcggtatggcgcgcccacagcgagcagatcccgataattctcggctctgcgacgccggcgctggagactctgcataacgtccgccagggtaaataccgccagttaaccttaagcaaacgcgcgggcaatgcgcgcccggcccagcagcacgtgctcgatctcaaagggcaaccgctgcaggcgggcctgtctcccgcgctgattagccgtatgcgccagcacctgcaagcggataaccaggtgatcctgtttcttaaccgccgcggctttgcgccagcgctgctgtgccacgattgcggctggatagcggaatgcccgcgctgcgacagttactatacgttgcaccaggcgcagcaccatctgcgctgccaccattgcgacagccagcgcccaatcccgcgccagtgtccttcctgcggctccacgcatctggtgccggtagggatcggcaccgagcagctggagcaggccctggcgccgctgttccctgaggtgcctatctcgcgtatcgaccgcgataccaccagccgcaaaggagcgctggaggagcatctcgccgccgtccatcgcggcggggcgcgtattctgattggcacccaaatgctggccaaagggcaccacttcccggacgtcaccctcgtctccctgctggatgtcgacggggcgctgttttccgctgatttccgctccgcagagcgtttcgctcagctttatacccaggtctccggacgagcgggccgggcaggaaaacagggcgaggtcattcttcaaacccaccatccggaacaccctctactgcagaccctgctgtataaaggctacgacgcctttgccgaacaggcgctggcagagcggcagacgatgcagctgccgccgtggaccagccatgtgctgattcgtgcggaagaccataacaaccagcaggcgccgctgtttttacaacagctgcgcaatctgctgcaggccagcccgctggccgacgaaaagctatgggtgctcggtccggttccggcgctggcgccaaagcgcggcggccgctggcgctggcaaatattgctgcagcatccttcgcgggtgcgtctacaacatatcgttagcggtacgctggcgctgatcaatacgcttccggaggcgagaaaagtgaagtgggtgctggatgtcgatccgattgaaggataa

SEQ ID NO: 138309 - DNA, 1734 bp, Enterobacter cloacae
atgtcagcagtcctatttccggcgccgctgctctcggtcgagcgcctgtcgatccagtttggtacacagcgggtggtggatgacgtcagctttgcgctctggccgggaaaaactctgtgcattgccggcgagtcgggcagcggtaaatcgctgacttcgctggcgatcatgggtttgcttccggaggaggcacagattccaggcggcgcgattatttttgataaccaggatttgctcagcctgccggagcggcaaatgcagttgctgcgcggcaagtcggttgccatgatttttcaggaaccgatgacctcgctcaatccgctgatgacggtgggccagcagctggaagagacgctgcaacgccacgaagtgctgggccgccgtgaacggcgcagccgggtcagcacgatgctggacgcggtcaaaatcagtcatgtggagaagcgcctgcaacagtatccgcacgagctttccggcggtatgcgccagcgggtgatgatcgccatggcaatgctgtgccagccacaggtgctgattgccgatgagccgaccacggccctcgacgtcactattcaggcgcagatcctcgagttgatgcgcgaactgcagcaggcgttttccaccagcctgctgttgatcacccacgatatgggagtggtggcagaaatggccgatgatgtgctggtcatgagtcacggcaaaatcatggagcaggctccggcaaaaacgctgtttacctcgccgcaggcggcttatacccgccagctgttgcaggcggtaccggtgctgggccaggcgcccgcgctggcgccggtcgaggcgacgcgaccgttgctcagcgtccgcgacctcagcgtgcgctttccggtgcgcggcgacggcctgcgcgtgcgtcgcgaagtccatgccgtcgatggcgtcagcttcgatcttttccccggcgagacgttgggcatcgtcggtgaaagcggctgcggtaaatcgacgacggcaaaagcgctgatgaatatggtgccatttagcggcagcgcgcagcttaacggacaggagctgcacggcctgaaggacgaggcgttaagagcggtacgccgcgatttgcagatggtgtttcaggatccctgggcggcgctcaatccgcgcaaaactattttcgacctggttggggagccgctgctgattcatgagcagatgcccgcagtacagcgcacggagcgggtggcgcagctattgcagcaggtcggcctgccagcggaagcgatgcggcgttatccgcaccagttttccggcggccagcgccagcgcatttgcattgcccgcgcgctggcgctgaacccgaaagtgatcatcgccgatgaatcggtttccgcgctggatgtttcagtacaggcgcaggtgctgacgctgctggaagatttgcgtcagcgctatcggctcagctatctgtttatttcccatgatatggcggtggtggagcgcatctgccaccgggtagcggtgatgtttggcggccagctcgtggagatcggcccacgagatcgagtgttgcaccatccgcagcatccttatactcagcacttgctcagcgccgttcctatacctgacgttcagcaaagacggcaaccccgagccaccagcgcaatgccgataagaccagaaccgatcaaacccatcggctatcagagagtaccgcagcgctttaccgattttggcgacgggcacctcgtcgcatgctga

SEQ ID NO: 138310 - DNA, 948 bp, Enterobacter cloacae; identical to SEQ ID NO: 94166

SEQ ID NO: 138311 - DNA, 1608 bp, Enterobacter cloacae
atgatgaaaaatgcgttattgacaatggcggtggccgcggcctgtttctcttatggcgcgcaggctgacgagaagactggcggcgatatcgtggtgacctaccagaacgacgtggcgaccctcgatccggccattggctatgactggcaaaactggtcgatgatcaaaagcctgttcgacggcctgatggactatcgtcccggcaccaccgagttggtgaacgacctggcggagagctacgccatttccgaggacggcaaggtctacacctttgtgctacgcaaaggggtgaaattccacaacggccgcgaggtcacggcggcggacgtgaaatattctctggaacgcacagtcaacccgaaaacccaaagtccgggcgccgggttcttcagtcccatcgcgggctatgacgaggaggccagcggtaaaagcacgaccctgagcggtatcgaggtcgtcgacgatcatacggtaaaaatcactctgaaagagcccaacgccaccttcctgcatgtgctggcgctgaactttgcctcggtggttccccgtgaggaggtggagaaatggggtgccgacttcggcaagcatccggtcggcagcggcgcgtttgagctccaggagtggaagctgggccaggagctgatcttccgcaaaaacccgaactactttaaagccggcgtgccgcggctggatcacataaagttcgaaatgggacaggatccctcggtcgctctgctgcggctggaaaaaggcgaagtggatattgccggcgacggcgtaccgcccgcacagtttctgtcgtttaaaaacaacccggcctataagggcctgatggtcaccggcgaccagttgcagaccggctacgtgacgatgaaaaccacgctgccgcctttcgataatctcaaagtccgccaggcggtgaacatggcggtcaacaaagatcgcatcgtgcgcatcattaatggacgcgcggcgccggccaaccagccactgccacccgccatgcccggttatgacaaggcatatcagggtttcagctacgacccggcaaaagcgaagcaactgctcagcgaagcgggtttccccaacggttttgctaccgaactgtacgtgatgaataccgatccgcagccgcgtatcgctcagtctatccagcaggatctggccaaagtgggcatccacgccagcatcaaatccctggcgcaggcgaatgtgattgcggcgggcggctccgccagccaagcgccgatggtctggtccggcggcatggcgtggatcgccgatttcccggatccctccaacttctatggcccgatcctcggctgcgccggggcggtagagggcggctggaactgggcgcgctactgcaacaaagcgctggacgcgcaggcggccgcggcggacagcatggtgaaacccgaccagcaggacgcgcgcattgaagcctggcgcaaaatcttcatcactgcaatggatgacgcgccctgggtgccggtattcaacgagaagcgctacaccgtacattccgcacgcatggggggcgaggacgcgctgtatgtcgatccagtgcatgtaccagtcaactacgactatatcggactgaaataa

SEQ ID NO: 138312 - DNA, 921 bp, Enterobacter cloacae
atgctatttctgggaaaacgtctgttgcatgccgggctgatcctgcttggcgttacgttgatctgctatttgctgctgtttatgttgcccgccgatccagcgcgccaaatcgccgggcgcagtgccacgccggaagtagtcgaaaacatccgccatcagttggggttggatctgccgttttatcagcaatattggcgttatctgcaggggctgctgcacggcgatctgggacgctcgtttattcagcgcagcgaagtgagtgaactggtttccgcccgtattgggccgtcactgcagctgatggcggcgggtattctctgcgagttggtactggggatcgcactcggcaccctggcggcgttaaaacgcggcgggctggcggaccggcttctgatggcgctctcctttatcggtgtttcggcgccgcagttcatcgccgcgatgctttttctctatcttttcgccgtggtactcaactggttcccgatgggaggctatggcggcttcagccatctggcgctaccggcgctaaccctcggcctgctcggcagcggctggtattcacgcatgttgcgctcgtcgatgattgaggtgctgcatcaggattttatccgtaccgcgcgggccaaagggctgggccgaacccgcgtactgctgcgtcacgtgctgccgaatgccgtgctgccgctaattccgatgataggcattgatatcggcatttttatgggcggactggtggtagtcgaatcggtctttggctggccgggtatcggtcagctggcctggcaggcgattcaacaggtggatatcccggtgattgtcggggtaaccaccgtgtcagcggttgccattgttggcggcaaccttattgcggatctggtgctgccgtgggtcgatccgcgcattgatgtcaaaaagtag

SEQ ID NO: 138313 - DNA, 849 bp, Enterobacter cloacae
atgaatagagtcggatattttctgcgccggccagccctgctgctctcgctgctgtttattctcctggtggtgatgagcgcgctgtttgccccctggctcacccccttcgatcccgatgaacagtttgtcgagggactgagcctggaaggcgcaccgctttctcccaacagcacttactggctgggaaccgatctgctgggacgcgatctcttctcgcgtttaatttacggagctcgtacttcgttactcatcggtgttgtcgccaacggcactgcagtactgatcggcgtcctggtagggcttagcgcaggttatctgcaggggcgtatcggagggctgctgatgcgctttaccgatctgatgatggcgtttcccgcactgctgctggcgattgccctggcggcgattttccagccaagtgtctggatcgtgtccctggtgatcgccatggtgaactgggtgcagatcgccagggttacctacgccgaaactagcgcgcttagcgcccgcgactttatcgccgtggaacgcaccctgggggccggaacgttgcgtattctcggcgtgcatttaattccacatctggcgccaacggtgctggtctgggccacactaggcatctccaccacagtcctgctggaagctactctatcgttcctcggggtgggggtacagccgccaacgccgagttggggcaacatcatctttgaaagccagagctattttacttcggctccctggctggtgttctttcccggcgcggcgattgtgctgctgtcgctctctttcaatatcgctggtgacgccctgcgcgacgccctcgatcccggcttaaaaggacgaaactaa

SEQ ID NO: 138314 - DNA, 594 bp, Enterobacter cloacae; identical to SEQ ID NO: 94162

SEQ ID NO: 138315 - DNA, 1128 bp, Enterobacter cloacae
gtgcaaactattgatattggaattttgctttccacagaaggtacctacagccacctggcgaacagcacactgcttggtgcgcgccatgccttagaggaaatcaatgccgatcctgcttatccttttcagctgcgggcccgacatatcaaccctgcgggtgaactcgcagcctacagtgaagcggtgagcacctttatcgctcacggcatccgccatatcttcggaaccattacctctgccagtcggaaggagattatcccggacctggagcagcataacctgctgctgtggtatggctgtccttacgaggggttcgagagctgcgagcaggtcgtatatctgggcggttgtccgaaccagactctgctgccactcctgcggctggcgctggatatgttcggaaatcgctcctggctgatcggctctaactacgtctggggctgggaaagcaatcgtatcgcccgtgaggtagtggaaggttccggcggtacggtggtgggcgaaaaatatctgcacctgagaaacagcaacgtgaccgagttgattgaggcgattctcagcacagaggtagattttgtactcaataacctggtaggcgaaacctcttatgcgtttctgcgcgcactggacgaggcctgtcttcgcgatcggcggacgttagcggtgctcagctgtaattttaccgaagccgaagtcgccgaagtcgcgccactaagggcggtacgtttgctttcctgcggaccgttttttgagagcgtcgatctcgatttttgcgcgcggcagcacctgcaacatggcgcacagcgcatctcccactactacatcggcggctggcgggcagtaaggctgtttgccaatagcctgcgcgaggccggaaacagcgagccgggtgcggtgctggcggcactgcatcgtcagcacgacgttgattctccgggcgctcgctcagtaatggctcgaaacaaccacgcctgtttgccctgctacatcgctgagttgcaacaaacttgctttcagatactgcatcgcgaaccgctgccggttatgcccgatccctatctctccgcgaccgagctacgtgaaagccgaacggttgcagccagacctgctctgaggattgttaaatga

SEQ ID NO: 138316 - DNA, 168 bp, Enterobacter cloacae; identical to SEQ ID NO: 103979

SEQ ID NO: 138317 - DNA, 957 bp, Enterobacter cloacae
atgcgcatttttatcgatgatggttcaaccaatatcaaaatgctgtgggagcaagatggcgaaactttcacccatatcagccccaacagttttaaacgcggctggtctgccaccttcggttcggggaagccttttaactacacggtggatgatgaaaagtactcattcgacctgatcactcccgatgcgctcccaaccaataacattgactggcaatacagcccgttgaactccatcgctgtccatcacgcgctgctgaccagcggtcttgagccacaggatgttgaaattgtggtcaccctgccgctgaccgaattttatgatgaagatgcgcaatatcgcctcgacaatattgagcgcaagaaaaagagcctgctgcgcgacgttaaactgaataaaggcgtggtgttcaatatcactaaagttaccgtgcgcccggaatcgattccggcgggtatcagcctgtgtgatgagctgaaaccgtcgcattcggtgctgattatcgaccttggcggcaccacgctggatatttcaatggtcgccgggcagatgacctcggtttcgcgcatttacggcgacccgaagctgggcgtatcgctggtgaccgacgccgttaagctggcgctggcccgggcgaataccgacacctccagctataacgtcgaccagataatcatcaaccgccacgacgaagaatacctgaccgacaacatcaacgatccggatgcggtttctgaggtgaagaaggtgatcaataacagtatcgaacgtctgaccacgcgtgtcctgacggccatcgatagctttaaaggctattcgcacgcgatcgtcattggcggcggcgcgccgctggttgccgacgccattcgtgaacggatgggtctgcgcgaggatcgtttcgtggtggctgaagagccgcagtttgccctggtgcgtggtctgaaaattattggttaa

SEQ ID NO: 138318 - DNA, 1404 bp, Enterobacter cloacae
atgacaacaaagctcagctacggatttggtgcctttggtaaagatttcgctatcggtatcgtctacatgtacctgatgtattactacaccgatattgttggcttatcggtcggggtggttggcaccttgttcctggtggcaaggatcctcgatgcgatagccgatccgattatgggatggatcgttaactgtacgcggtcgcgatggggaaagttcaaaccgtggatcctgatcggcacaataaccaactcggtggtgctgtatatgctgttcagcgcccaccatttcagcggcggggcgctgctggcgtgggtgtggctaacctacctgctgtggggcttcacttacaccatcatggatgtgccgttctggtcgttggtgccgaccattaccctcgataaacgcgaacgcgagcagctggtgccttacccgcgctttttcgccagtctggcgggatttgtcacggccggcgtcacgctgccgttcgtcaacgccgtcggcggcgccgatcgcggtttcggttttcagatgttcactctggtgctgatcgccttcttcgtcgtttccaccctcgtcaccctgcgcaacgtgcatgaggtttactcctccgacagtggtgtgagcgaagactccagccacctctcactgcgccagatggtggcgctgatctataaaaacgatcagctggcctgcctgttaggcatggcgctggcctataacacggcggcgaacattatcgctggctttgcgatttactactttacctacgtgattggcagcgcggagatgttcccgtattacatgtcctacgccggggcggcgaatttgctgacgctgatcctgttcccacgactggtgaaagggctgtcgcggcgcattctgtgggcgggtgcttcgatcatgcccgtgttgggctgcggcgtgctgttgctaatggcgctgggcggcgtttacaacatcgcgctgatttcgctggccgggatgctgttgaatatcggcaccgcgctgttctgggtgctgcaggttattatggtggccgataccgtcgactatggcgaatatacgatgaatatccgctgcgaaagcatcgcctattccgttcaaacgctggtagtcaaagccggttcggcgtttgcggcctggtttatcgccatcgtgctcggtatcatcggttacgtgccgaatgttgtgcagtcgtcccacacgctgctggggatgcaggtgattatgattgcgctgccgacgctcttttttgctctgacgctgtttctctatttccgttattacaaactgaatggcgatatgctgcgacggattcagattcacctgctggataaatatcgccgggtaccggaaaatgacgtcgagccggaacggccgattgtggtacccaatcaggtgtaa

SEQ ID NO: 138319 - DNA, 1353 bp, Enterobacter cloacae
atgtctgccccaaaaattacttttatcggcgccggttcgacggtgttcgtcaaaaatattctcggtgatgttttccagcgcccggcgctgaaatcggcgcatatcgcgctgatggatatcgatgaaacccggctggaagagtcgcatatcgtggtgcgcaagctgatggattccgtgggcgcgaacggcgaaatcagctgccaccgcgaccggaaaacccccctgcagggcgccgattttgtcgtcgttgccttccagattggcggctatgagccctgtaccgtcaccgattttgcagtctgcaagcgccacggcctggagcagaccattgccgatacgctggggccgggaggcattatgcgcgcgctgcgcaccatcccgcacctgtgggctatctgcgacgatatgagcgaggtctgcccggacgccaccatgcttaactacgtcaacccgatggcgatgaacacctgggcgatgtacgcccgctacccgcatatcaagcaggtgggtctgtgccactcggtgcaaggcacagcggaagagctggcgcgcgacctcgatctcaatccggcggatttacgctaccgctgcgcggggattaaccatatggcgttctatctgtcgctggagaaaaagctcgcggacggcagctacgtcagtatctaccccgacctgctacaggcctacgccgacgggcgggcgccgaagccgaacctgcacggcaacccgcgctgcgaaaacatcgtccgctatgaaatgctcaaaaagctgggctactttgtcaccgagtcctcggagcatttcgccgaatacacgccatggtttatcaagccgggccgcgatgaccttctcgctcgctataaagtgccgctggatgaataccctaaacgctgcgtcgagcaactggccaactggcatcaggagctggagagctataagcgcggggagcgcattgaggtgaaaccctcccgcgaatatgccagcaccatcatgaacgccatctggaccggcgagccaagcgtggtgtacggcaacgtgcgaaacgataatctcatcgacaacctgcctcagggctgctgtgtggaagtggcctgcctggtggacgccaacggcatccagccgaccaaagtgggcgcgctgccggcgcatctggcggcgctcatgcagaccaatatcaacgtgcagacgctgctcacgcaggcgatcctcaccgaaaatcgcgattacgtctattacgccacgatgatggatccgcacaccgccgcggtgttggggatcgaagagatctacgcgctggtggacgatctgatcgccagccacggcgactggctgccggcctggctgcaccgttaa

SEQ ID NO: 138320 - DNA, 939 bp, Enterobacter cloacae
atggaacaccgcttcacctctctgccccccgatccctttatgtgcagcagcgacgaaaagcagagccgcagcccgctggcgctctactccgagtatcagcgtatggatatcgaactgcgcccgccgcacgccatgcccaccagccactggcacggccaggtggaggttaacgtgccgttcgatggcgacgtggagtatttgattaataacgaagtggtgcgcattgagaaaggctatatcactctgttctgggcctgtacgccgcatcagctgacccgccccggcgattgccagcagatggcgatattcaacctaccgatgcatctgtttctctcatggccgctggaccgggagcttatcaaccacgtcacccatgggatggtgattaaatccctcgccgcgcagcagttgagcgccttcgaagtacgccgctggcagcaggaactgagccacgagaatgaacagatacgccagctggcgatcgatgaaatcgccctgatgctgaagcggctgagcctcgccggctggcagccgattctggtcaataaaacctcacgcacccacaagaacagcgtctcgcgccacgcgcagttttatgtcagccagatgctggagtttatcgctgcccactacgaccaggcgctgaccgtcaatgccgttgccgagcacgtgaagctcaacccgaactatgcgatgggggtctttcagcgggtgatgcagcagaccatgaagcagtacattaccgccatgcgtatcaatcatgtgcgggcgctgctgagcgataccgacaagaccatcctggatattgcccttaccgccggttttcgctccagcagccgcttctacagcacctttacccgctacgtgggcatgccgccgcagcagtaccgtaaactaagccagcagcggcgtcacggcctggccttgccggaggcataa

SEQ ID NO: 138321 - DNA, 1503 bp, Enterobacter cloacae
atgcttaaaaggaaaaaaataaagcccatcacccttaaggatgtgaccatcatcgatgatggtaaactgaaaaaggcgatcaccgcggcctccctgggcaacgcgatggagtggttcgatttcggcgtctacggctttgtggcctacgccttaggtaaagtcttcttccccgatgccaacccaagcgtgcagatgattgccgcgctgggtaccttctccgtaccatttttaattcgtccgttaggcggcctgttcttcgggatgctgggcgataaatatggtcggcaaaaaattctcgcgataactatcgtgatcatgtcgataagtactttctgtatcggccttattccgtcgtatgccacgataggtatctgggcaccgatcctgctgctgctgtgtaaaatggcgcaaggcttctcggttggcggtgaatataccggggcgtcgatcttcgtcgcggaatactctcctgaccgcaagcgcggctttatgggcagctggctggactttggctccatcgccgggtttgtgatgggggccggcgtggtggttctcatctccagcgtggtgggtgaacagaactttctcgactggggttggcgtatcccgttcttcctggcgctaccgttaggtatcattggtctctacctgcgccatgcgctggaagagacgccggcgttccagcagcatgttgacaccatggagcagggcgaccgtgaaggactgcaggacgggccgaaggtctcttttaaagagattgccaccaagcactggcgtagcctgctgacctgtatcggtctggtgatttccaccaacgtgacttactacatgctgctgacctacatgccgagctatctgtcgcataacctgcactactcggaagatcatggagtgctgatcatcatcgctatcatggtcgggatgctgtttgtacagccggttatcggtatgctcagtgaccgtttcggccgtcgcccgtttatcctgattggtagcgtggcgttgtttgccctgtcgatcccggccttcattatgatcaacagcaacgtgactagcctgatcttcgccggcctgctgctgctggcggtggtgctgaactgctttatcggggtgatggcctcctcgctgccggcgatgttcccgacgcacatccgcttcagcgccctggccagcgcctttaacatctcggtgctgattgccggtctgacgccaaccctggcggcgtggctggtggagaccacccaaaacctgatgatgccggcgtactacctgatggttatcgcggtggtgggtatggcgacgggcctgtcgatgaaagagacggctaaccgtccgctgaaaggggcgaccccggcggcgtcggatatccaggaagcgaaagaaatccttggcgagcactacgataacatcgagcaaaaaatcgaagatatcgatcaggagatcgccgatctgcaggcaaaacggtcgcgtctggtgcagcagcatccgcgtatcaacgactaa

SEQ ID NO: 138322 - DNA, 336 bp, Enterobacter cloacae
atgcaactgccacactgcccaaaatgcgattcgacttacacttatgaagatagcggcatgtacatctgcccggaatgtgcccatgagtggaaccctgccgaggcgacggaagagagcgacattctgatcgttaaagatgccaatggcaatttactggccgatggcgacagcgttaccgtcgtgaaagatctgaaggttaaaggcagctcttcgatgctgaaaatcggcaccaaagtgaaaaatatccgtctggtcgaaggcgatcacaatattgactgcaaaattgacggttttggtccgatgaagctcaaatcggaatttgtgaaaaagaactga

SEQ ID NO: 138323 - DNA, 435 bp, Enterobacter cloacae
atgtccttaagtccctaccttgcctttgcgggtaactgcgccgaggcgatcgccttctaccagcagacgctgggcgcagagctgatgtttaaaatgacctttggcgaaatgccgcccccggcgcaggaagcgtcagacggctgcccgtctggccagaagatggcggatgatgctatcgcccacgccagcctgcgcatcaataatggcgagctgatgctgagcgacagcgccttcgggcccgatgtgcattacgccggcttcaccctcgtcctcgatcccagcgatgtcgctgaaggccagcgctggttcgacgcgctggctgtcggcgggcgcattgagatggcctggcaggaaaccttctgggcccacggcttcggcaaagtcgtcgaccgctttggcgtcccctggatgatcaacgttgtcaaacaaggttga

SEQ ID NO: 138324 - DNA, 726 bp, Enterobacter cloacae
atgcacctgtccagacatccgaccagttaccccacgcgctatcaggaaatcgccgcccgacttgagcaggagctgcgccaccactatcgctgcggcgactatctgcccgccgagcagcagctggcgacgcgcttcgacgttaaccgccacaccctgcgccgggctatcgaccagctggttgagcgcggctgggttcagcgccgtcagggcgtgggtgtgctggtgctgatgcgccccatcgactacccgcttaacgcccaggcgcgcttcagccaaaacctgctggaacaaggcagcgatcccaccagcgaaaagctgctgtcggtgctgcgccctgccagcgcccatgtcgccgaggcctttggcatcaatgagggcgagaacgtgatccacctgcgtaccctgcgccgggtcaatggcgtcgccctgtgcctgatcgaccactacttcgccgacctgcgcttctggccggtgctacagaccttcagccacggctcgctgcatgacctgctgcgcgatcggctcgacgtcgaactgacccgcgtacgcaccaaaattagcgcccgccgcgcgcaggcaaaagagagcaagctgctggaaatccccaatatggcgccgctgctctgcgtccgcacgctcaatagccgcgagggcgagtcggtcacggcggagtactccgtcagcctgacccgcgccgacatgattgaatttaccatggagcactga

SEQ ID NO: 138325 - DNA, 1938 bp, Enterobacter cloacae
gtggaaaaagccaaaaaaatggcgtggcatcttttggctgccagcgttggtttgttgacgttgagtcagctggcgcatgcggattcactggatgaacagcgcagccgctacgcacaaattaagcaggcgtgggataaccggcagatggatgtagtcgaccagctgatgcccacgttaagcacctatcccctgtatccctatttgcagtaccgacagatcaccgacgatctgatgaaccagccggcgctggtggtgaaaaactttattgacgccaatccgacgctgccccctgcgcgttcattacgttcgcgcttcgtgaatgaactggcccggcgcagcgactggcgcggcttgctggcgtttagcccggataagccgaccagcaccgaggcgcagtgcaactattactacgccaagctgagcgtggggcagtcgcaggaggcctggagcggggcgaaagagctgtggctgacgggcaagaatcagcccggcgcctgtgaaccgctgttcagcgcctggcgcgactccggtcagcaggatccgctggcctatctcgaacggatccgcctggcgatgaaggccggcaatatcgggctggtgaaatcgctggcccagcaaatgcccgccaactaccagagcatcgccagcgccgtggtcgccctggctaacgatccaaacagcgtcctcaccttcgcccgcaccaccggggcgacggactttacccgtcagatggccgccgtcgccttcgccagcgtcgcccgccaggacgtggaaaatgcccgcctgatgatcccttcgctggtacaggctcagcagctcaatgaggatcagacccaggaactgcgcgatattgtcgcctggcgcctgatgggtagcgatgtaaccgaagagcaagccatctggcgcgatgacgcaatcatgcgttcgcagtccacgccgctggtggagcggcgggtacggatggcgttggggacgggcgatcgccatggcctcaacacctggctggcgcgcctgccgatggaggcgaaagagaaagacgaatggcgctactggcaggcggatctgctgctggagcgcggcagggatgaggaggcgcaggcgatccttcgctcgttgatgcaacagcgaggcttctacccgatggtcgccgcgcagcgtcttggcgaggagtataccttccgcatcgataaagcctcgggcaccatcgatccggcgctggcctccgggccggagatggcgcgggtacgtgagctgatgtactggaatatggataacaccgcgcgcaccgaatgggccaacctggtcactagtcgcaccaaatcccagcaggcgcagctggcgcgctatgccttcgatcagcactggtgggatctgagcgtgcaggcgacgatcgccggtaagctgtgggatcagctggaagaacgtttcccgctggcctataacgacctgtttgcccgctatgttagcggcaaagatattccgcagagctacgcgatggcaattgcccgtcaggagagcgcctggaacccgaaagtgcgctcgccggtcggcgccagcggactgatgcagattatgccgggcaccgcgacgcataccgtcagtatgttcagcattcccggctacagcggcccgtcgcagctgttggatccggaaaccaacatcaatatcggcaccagctatctgcagtacgtttatcagcagttcggcaataaccgtatctacgcctcagcggcctataacgccgggccgggccgggtacgcagctggcaggggaatagcgccggacggatcgacgccgtggcgtttgtcgagagtattccgttttcggaaacccgcggctacgtgaagaatgtcctctcctatgacgcctactaccgctactttatggggcagcaggataagatcctcagcgatgcggagtggcgccagcgttactga

SEQ ID NO: 138326 - DNA, 330 bp, Enterobacter cloacae
atgacccaacaatctccctattccgcggccgttgccgaacaacgtcatcaggagtggctgcgctttgttgccctgcttcagcaggcctatgctgaggatctgcatctgccgttgctgcagctgatgctgacgcccgacgagcgcgaagccctgggtacccgggtgcgcattatcgaagagttgctgcgcggcgagatgagccagcgtgagctgaaaaatgagctcggcgccggaattgcgaccattacccgcgggtcgaacagcctgaaatcggcgccggtagagctgcgccagtggctggagcagacgctgctggctagcgataaatag

SEQ ID NO: 138327 - DNA, 516 bp, Enterobacter cloacae
atgcaccatgttgtctcagcgaccactaatcccgccaaaattcaggcaattctgcaggcttttgacgagattttcggcgaaggatcctgccacattgagtccgtcgccgtcgagagcggcgtgccggaacagcccttcggcagcgaggaaacgcgcgctggcgcacgaaatcgcgtcgccaatgcgcgccttgcccggccaaatgccgatttctgggtagctatcgaagccggtatcgacgatgacagcacctttagctgggtggtcatcgaaagcgccagccagcgcggagaagcgcgctcagccacgctgccgttgcctgacgttattcttgagcaggttcgcgctggcgaagccctcggcccggtcatgtcgcagtataccggcatcgatcagatcggtcgtaaagagggggcgattggggttttcaccggcggcagattaacccgcagcagcgtttaccaccaggcggtcgtgctggcgctaagcccgttccataacgctatttatcgctag

SEQ ID NO: 138328 - DNA, 648 bp, Enterobacter cloacae
atgttacaagtataccttgttcgccacggtgaaacgcagtggaacgccgagcgacgtattcagggtcagtccgacagcccgctgaccgcccatggtgagcgccaggcctggcaggtgggcgagcgcgccagaacgctggggatcacccatattattaccagcgatctgggacgaacccgccgcacagcagagattatcgccgaagcctgcggctgcagcgtgatcgccgatgcgcgcctgcgcgaactggatatgggggtgctggagaagcgccatatcgactcgctcagcgaagaagaagaaggctggcgtcgccagctggtcaacggcacaccggacggtcgtattccgcagggcgaatcgatgcaggagctcagcgagcgtatgcatgcggcgctggcatcctgtctggaattacccgccggtagccggccgctgctggtgagtcatgggatcgcgctgggctgcctggtgagcacgatattagggctgccggcgtacgctgagcgtcgtctgcggctgcgcaactgctctatttcgcgcgtcgactatcagcaaagcccgtggctggcttccggctgggtggtggaaacggcgggcgacgtctcgcatcttgacgcccccgcaatggacgagctgcagcgttaa

SEQ ID NO: 138329 - DNA, 870 bp, Enterobacter cloacae
atggatcaagcagggattattcgcgatctccttagctggctggaaggtcacctggatcagccgctttctctggataatgtggcggcgaaggcaggttattccaagtggcatttgcagcgaatgtttaaggatgtcaccggccatgccatcggtgcctatattcgcgcgcgccgcttgtcgaaatctgctgtcgcattacgcctgaccgcccgtccaatccttgatattgcgctgcagtaccgtttcgactcccagcagaccttcacccgagcgtttaagaaacaattctcgctgacgccggcgctctaccgccgctcgccggactggagctcgttcggtatgcgcccgccgctgcgtcttggcgaatttaccctgccgaaacatgagtttatcactctgccccctactcagctgcttggcgtgacccagagctatacctgtaagctcgaggaaatctccgattttcgtaaccagatgcgggtccagttctggcgagacttcctcggcaactcaccgtcaatccccccggtgctctacgggctgcatgagccgcgtccgagcctggaaaaagacgatgagcaggaagtattctataccaccgcgctgacgccggagatggctaacggccacctgcagcatgcccatccagtgaccctggagggcggcgagtatgtcatgtttacgtatgaagggctgggtaccggtctgcaggaattcatcctgaccgtctacggcacctgcatgccgatgctgaacctgacgcgtcgcaaggggctggatattgaacgcttctaccctgaagatgaaagccgggatcaggccacgccgattcagttgcgctgcgagtatctgatcccgatccgccgttaa

SEQ ID NO: 138330 - DNA, 309 bp, Enterobacter cloacae
atgaaatacaagaagtttgcgatggggctgctcctgctggccggtagccagctggctcaggcggagcagattggttccgtggatacggtcttcaaatggttagggccggatcacaaaatcgtcgtcgaagcctttgacgatccggatgtgcagaacgtgacctgctatatctttaaaaaactgcaggtcgtgcgattctatgatgcgaagcgcaatgcgctggtctatctgacctactcggataaagtggttgatggctcgccgaagaacgccatcagcgccgtgccgatcatgccatggaataaataa

SEQ ID NO: 138331 - DNA, 537 bp, Enterobacter cloacae
atgcagcagccacggatttggttagttgaggatgaacagagtatcgctgataccctggtttacatgctgcagcaggagggcttccaggtcagcgtctttggccgcggtttgcccgcgctggaggcggcggcgcatcaggcgccagatgtcgccatcctcgacgtcggcttgccggatatcagcggcttcgagctctgtcggcgtctgctgacgcgttatccggcgctgccggtgctgtttttgacggcgcgtagcgacgaggtcgataagctgctggggctggaaatcggcgctgacgattacatcgccaagccgttttcaccacgcgaagtctgcgcgcgggtgcgaaccgtgctgcggcggctgcagaagtttgccgcgccatcgccggtggtacgcatttctgctgttgaaaaccctgcttcacgcgcccggtcgcgtcttctcccgtcagcagctgatggagctggtgtggagcgatgcctgggaaagcctcgaccgtaccgtcgatacccatatcaaaaccctgcgcgctaa

SEQ ID NO: 138332 - DNA, 1425 bp, Enterobacter cloacae
atgcgcatcggcatgcgcctgctgctgggctattttcttatcgtcgcgatcgccgcgtggtttgtgctgtcgatctttgtccaggaagtgaagccgggcgtgcgccgggcgacagaggggaccctcaatgataccgctaccctgttggcggcgctggcgcgtgaggatctgctggcggcaaacccgcagcagggcaggctggtgcaggcctttcaccagctcaaccagcagccgctcaacgccaatattggcggaattaaaaaggtacgtaatgagtaccgcgtctatctgaccgatgcccggggcaaggtggtgtttgactccagcgggcaggcgacagggcaggactattcgcgctggaacgatgtctggctcaccctgcgcggccagtacggcgcgcgcagtacgcgcagcgatccgcatgatgaagccagctcggtgatgtatatcgccgcgccggtgatggataaggggcggattatcggcgtgctgagcgtcggtaaacccaacctggcgatgacgccggtcattaagcgcagcgagcggcggatcctctgggccggcggcgccctgctgggcattgcgctgttgattggcggcggcgtcgtctggtggatcaatttctctatcggcaagctggtgcgctatgcggactcggtgaccgctgagcgcccgctgccgctgccggaggttggcagcagcgaattgcgcaagctggcccaggctctggagagcatgcgggtaaagctcgaaggtaagaatgccatcgaaaactatgtctatgacctgacccatgaactgaaaagcccgctggcggccatccgcggcgcggcggagatcctgcgtgaagggccgccgcctgaggtggcggcgcggtttactgataatatcctcgcgcaaaacacccggatgcaactgctggtggagcggctgctccagcaggcgagactggaaagccggctggagataaagcagcatccggtgtcgatagatgcgctataccaacggctgacggaggagcgcaacatcgctctggcggcgaaagctatcaccctgcgctggcgggagagtgggatgctggtcaatggcgatggcgagctgctggcccaggcgctgggtaatctgctcgacaacgcgattgactttaccccccagggcggtgagatcgccctggctgcggagaagcgaaatgaagaggtgcaattgagcgttatcgacaacgggtgcggtattccggactatgccctggaacgaatctttgagcgattctattcgctgccgcgcgaagacggccataagagcagcggccttgggctggcgttcgttcgtgaagtcgcgcgcctgcatcacggcgatatcaatctgcacaatcggcccgaaggcggcgtggtcgccacgctgcgacttcaccgtcccttcacatag

SEQ ID NO: 138333 - DNA, 1359 bp, Enterobacter cloacae
atgttgaaatcaccgttattctggaaaatcaccacgttaataggctgtattgtgctgctatctttgccgttaatgatggtcagggagcttattaatgagcgagcggattatcgtagcgaagtggtggacgccattgagcaaagcaccagcggctcgcaaaaactcgccggaccgctgatcgctattccgataaccgagaccctgacccgcatggagaaccaaaaagaggtcaactatcagcggagctgggtgtattactggctgccggagtcgctggcggtcaccggcaaacagaccgtggagtcgaggagggtgggcatctacagcggccaggtctggcataacgccttgcagattaaggcctcgtttgatccgctgcgtctggcggcgctgagaaaaacgaatatcgtcttaggccagccgcggctggtggtgagcgtcggcgatgcccgcggcattggtgccatccatgccccggaggtcaacggtaacgtattaagcgtggagccggggctggggataagcggcgatggcgcaggtattcatatgccaatgcctgcgctggcggaggacaacaagccgcttgagattgccttttcactcgatctgaacgggacgggagagttttcactggtgccgctcgggcgtaacagcgagctgcagctgaccagtaactggccgcatcccggttttctcggcagcttcctgccaacgcaacgggaagtgagtgctgccggctatcgcgcccactggcaaagcagctggttcgccaacgatatggggagctatttcaaggatgatatggagatcccgtggtcgcgactgccggcgttcagtgccgatgtgatgtcccttgccgaccagtaccagctaaccgatcgggcgacaaaatatgccatcctgttaatcgggctgacctttatggcttttttcgtgttcgagagcctgacccgtcgtcccctgcatccgatgcaatatctgctggtgggcttatcgctggtgctgttttacctggtgctgctggcgctctcagagcacattggttttaccgccgcctggctggcggccagcctgtctggcgcggtgatgaatgggatctaccttcaggcggtgctcagaggatggcgtaacagcctgctgtttgtcgccgcgctactgctgctggatggcgtgatgtggtttctgttgcattctgaggatagcgcgctgctgctgggtaccggggtgctggcgctggcgctgagcgtcctgatgtttttgacccgtcgcgtggactggtatgcgttatcgctgccgaaaggcacagtgcctccgacaccggctgccgatgacgataagctgcgtctctggaaagagtga

SEQ ID NO: 138334 - DNA, 681 bp, Enterobacter cloacae
ttggtaacacgcaacacgttaaaaagtattttcgaagcagaaggttacgatgtattcgaagcgaccgatggcgcggaaatgcatcagatcctgtctgaaaatgatatcaacctggtgatcatggatatcaacctgccgggtaaaaatggtcttctgctggcgcgcgagctgcgcgagcaggcagacgtcgcgctgatgttcttaaccggccgcgacaacgaagtggataagatccttggcctcgaaatcggcgctgacgactatatcactaaaccgtttaacccgcgtgaactgactatccgcgcgcgcaacctgctctcccgtaccatgaacctcggtaccgtgagcgaagagcgtcgcagcgtggaaagctacaagttcaacggctgggaactcgatatcaacagccgttccctggttagcccgaacggcgaacagtacaagctgccgcgcagtgaattccgcgcgatgctgcacttctgcgaaaacccgggcaaaattcagtctcgtgccgagctgctgaagaaaatgaccggtcgcgagctgaagccgcatgaccgtaccgttgacgtgaccattcgtcggattcgtaaacacttcgaatccactccggatactccggaaatcatcgctaccattcatggtgaaggctaccgtttctgtggcgatctgcaggaataa

SEQ ID NO: 138335 - DNA, 492 bp, Enterobacter cloacae
gtgaaaaaaatcactacgctagccgtttctctgctgaccgccgcctgcatgtccgctggcgcattggccgcagaccagccgctggaaaaagtcgcgccgttcccgaaagcggaaaaaggcatgaagcgtcaggttattcagctgccgcagcagcaggatgagtcggcgctcaaggttgagctgatgatcggccagacgctggaagtcgactgcaaccatcatcgtctcggcggggaactggaaagtaaaaccctggaaggctggggctatgattactatgtctttgagaagctgagcggcccggtatccaccatgatggcctgcccggacggcaaaaaagagaagaaatttgtcactgccggcctcggggatgacgccatgctgcgctacaacagcaaactgccgatcgtggtatacacgccgagcaatgtcgatgtgaaatatcgcatctggcgcgccgacgagactatcggcaacgctgtcgtccgctaa

SEQ ID NO: 138336 - DNA, 1635 bp, Enterobacter cloacae
atgaataaaaagatggccgtaccacgctcacaggcggttggtcccaacagcactcggaccaacacccgccatgagcaagagacggatgtattgttgattggcggcggcattatgagcgccacactgggaacctggctgcaggagcttgagccagactggtctattaccatggttgagcagatgtccagcgtggcggaagagagctcaaacgggtggaataatgcgggtaccggccacgcggcgctgatggagctgaactacacgccgcagaccgccaacggcatcaatatcgacaaagcggtcgacatcaacgaagccttccatatctcgcgtcagttctgggcgcatcaggtgacgcgcggcgtcctgaacaaaccaaaatctttcattaacagcgtgccgcacatgagctttgtgtggggcgaagataacgtcaacttcctccgtgcgcgctacgcggcgctgcagcaaagtgaactgttccgcggtattcgctattctgaagaccatcagcagatcaaagcctgggcgccgctggtgatggaaggccgcgacccgctgcaaaaggtcgccgccactcgctcagaagtgggaaccgacgtcaactatggtgaaattacccgccagctgatcgccggtctgcaaaagcatgataatttctccctacagctgggcgccgtggtgcgtcgcttcaagcgcaacgccgacaagagctggacggtcaccctggcggatgccgacaatcgtcgtcagaagcgggtcattaaagctaaatttatctttatcggcgccggcggcgcagcgctgaccctgctgcaggagaccggcattccgcaggccaaagagtatgcgggcttcccggtcggcggccagttcctggtctgcgaaaatccggaggtggtgaaccaccatctggcgaaggtctacggtcaggccgaagtgggcgcgccgccgatgtcggtgccgcacatcgatacccgtattatcgacggtaaacgcgtggtgctgttcggaccattcgccaccttctcgacccgtttcctgaagaacggttcgctgtgggatctgctggcctcgacgaatacctcaaatattttgccaatgctcaacgtcggcctggacaacttcgatctggtaaaatatctgattagccaggtgatgcagaaagataaagatcgtctggccgcgctgtgcgaatattatccggaagcgcggaaagaggactggcggttgtggcaggccggtcagcgcgtgcagatcattaagcgcgacgcgaagaagggcggggtactgcgcctgggcaccgaagtggtcagcgatgatgaaggcaccgtcgcggcgcttctcggcgcgtcgccaggggcctccaccgcggcgcctatcatgctgcagctaatggaaaaagtgtttaaagataaagtcaattcgccggaatggcaggccaagctgaaggcgatcatcccaacctacggtattcgtcttgacggcaacccggcggagatcgagaaagcgctggcgtggaccagtgaagtgctggaactgaaatatgagccagccggggcggtggatgaggtaccgcaggcggagctgaagccgctgagcggcggcaagccgatggcggatatcgcgctctga

SEQ ID NO: 138337 - DNA, 1083 bp, Enterobacter cloacae
atgcccccagtttctgaccccgccgcttccggcaacctgcgtcccatcctccgctccccgtctttactgacgcgcgaagtgctggccggcgtgctcaccgccctggcgctcatccctgaagtgatttcgttttcagtcattgccggcgttgacccgcaggtaagcctgattgcttcggtggtgctctgcctggcgatgtcagtcttcggcggacgcccggcgatggtcaccgccgccgcgggctcggtggcgctggtgattggcccgatggtgcatcagcacggcgtggggtacattttaccggctgtcattctggcgggtattattcaaattttgtttggtctgtgcggcatggcgcgcctgatgcgctttattcccccggcggtgatgaccggcttcgtcaacgccctcgggatcctgattttctttgctcaggtgccgcatttctggagtcgacaaccgctaatcgttggcctgccggggttcaccgccctgaccgttcccctgaacctgaccaccctgcagataatctggccgtgcgccctcagcatcgcctttgtcggcctgatggagtccttgctgacggctaagctggtggatgatctcactcataccccgtcgaacaaatcgcgggaaagcgccgggctgggtatcgccaatatccttgccggctgctatggcggcatcgccggctgcgcgatgatcggccagactatcgtgaacgtggaaatgggccgggcccgcagccgcctctcaacggttatcgccggcctggtgctgctcctgctggtgacagcgctcagccaggtgatggcgaagatcccgatggcggttctggccggggtgatggtgatcgtggcggtgaaaacctttagctggcacagcattcgcccgggcgagctggcgcgtaatccgtggccggaaacgctggtgatgctggtgaccgtcgccgcgacggtgggaaccagcaatctggcgatcggtgtgctggcggggattgtcgcgatggcgatcatcccccgccgcctgcgggcaaaagcgcaggctacattagaaacagcgtcgccagacccagaaaaataa

SEQ ID NO: 138338 - DNA, 327 bp, Enterobacter cloacae
atggcgctgcagcagatccagcccggcagctttacctttctgatcctgcgtgaaatgggtgttgcgctgattaatggcctggtatggggcgggattatgggggccatcacctggtggctgtatgacgatccgcagctcggcggggtgatgacgctggccatgatgctcaacctgctgatggcggcgatgatgggcgtgataatcccgatggtcatggtgaagctggggcgcgacccggcggtcggctccagcgtaatgatcaccgccatcaccgacaccggcggcttctttatttttctgggtctggcgacgctgtttctaatgtag

SEQ ID NO: 138339 - DNA, 1179 bp, Enterobacter cloacae
  misc_feature (964)..(973): n is a, c, g, or t
atgtccgttttgcataaaaaaagcgcccgcttgcgtgacgaagagcgcgcccgtctgatttggctcttgagcaccgataaagcggtgacttccgcgctgctgggcaaactgacgctggctgagcgctatgatgaagggacgctggccgatgacctggccgaagtggaaatgctggtctcgcatctgccgccgccggatctcgccgatgcgctggaagcgcttccctatgacgcccgcaccgcgctatggtgcctggtgcccgacgataaacgcggcgaagtgctgctggaggcctcagagaacgtctggggcgacctgatcgacaagatgagcgaccccgagctgctgcaggccatgcagccgctggatatcgatgaacaggtttacctgctgcagcatctgccgcgcaacctgaccggacggctgctggcgaccctgccggccgagaagcgcgcccgtattcgccagattatgcgctacgccgacaacagcgtcgggtcgatcatggagtttgaggtcattacggtgcgaccggaggccaccctggcggcggtgcagcgctatctgcggcgtctcggtaaaatgccggaaaacaccgataagctgttcgttaccacccgtaacaagctgctgctcggcgagctggagctgcagaccattctgctcaatgatgcgcagaagcgggtgggggaggtgatggagggcgacccggtcacctttcagccgcacgaagaggcggagaaggtggcgcgcaccttcgaacgtgatgacttgctcagcgccgccgtcattgatgccgacggcaagctgatcgggcgcctgaccatcgatgagatcgtcgatgtggtttatgaagaaaccgataacgatctgcggcggatgggcggcctgagcgatgaagaggatgtcttcgccccggtcagcaaagcggtgaaaacccgctgggcatggctggcggtcaatnnnnnnnnnngtcaatctgtgtacggcgtttattgcttcccgggtcatcgacggcttcgaacacaccatttcacagctggtggcgctggcctcgctgatgccgatcgtcgccgggatcggcggcaacaccggcaatcagacgatcaccatgatcgtccgggcgatggcgctgcagcagatccagcccggcagctttacctttctgatcctgcgtga

SEQ ID NO: 138340 - DNA, 1644 bp, Enterobacter cloacae
atggaacttctctctctcgtctggcgccagtaccgctggccgtttctgggcgttattgctctcagcctgctcagcgccgcgctgggtatcggcttaatcgctttcattaacctgcgtctgattaccgctgtcgatacctcgctgcgggtcctgccggagtttcttggtctgctggggctgctgatggcggtgaccctgggttcgcagctggcgctaaccaccctcggccaccattttgtctatcgtctgcgcggtgagtttgttaaacgcatcctcgatacccagattgaacaagtagagaagatcggcagcgcgtcgctgcttgccgggctgaccagcgatatccgcaatatcaccatcgcctttgtgcgcctgccggagctggtgcaggggatcattctcaccttcggctccgcggcctacctcgcctggctgtcaggaaaaatgatgctggtgacggcgctgtggatggcgctcaccatctggggcggctttgtgctggtctcgcgggtgtacaaacatatggccagcctgcgcgaaacggaagataaactgtatcacgactatcagacggtgctggaggggcgtaaagagctgaccctcaaccgcgagcgcgcggagtatgtgtttaaccagcgctacctcccggacgcccgggagtaccggcaccatatcgttcgcgccgataccttccacctcagcgcggtcaactggtcgaatattatgatgcttggcgccatcgggctggtattctggatggccaacagcctcggctgggccgataccgccgtggcggcgacctattccctgacgctgctgtttctgcgcacgccgctgctctccgccgtcggcgcgctgcccacgctgctcagcgcccaggtggcgtttaacaagctgcgtcagttctccctcgccccgtaccgggccgactttccccggccgcaggcgcatcctgactggcagacgctggagctgcgcgatgtcacctttcattatccggaccagcgctttgcggtagggccgcttaatctgacgctgaagcgcggcgagctggtgtttctgataggcggcaacggcagcggcaagtcaacgctggcgatgctcctgaccggcctgtaccagccaatatccggtcagatcctcgtcgacggccagccgctggcggcggagaggccagaggagtaccgcaaactgttttccgcagtgtttaccgacgtctggctgtttgaccgcctgcttgggccgcagggcgaggaggccgatccggcgctggtggcgacatggctggagcgtctgcaaatggcccacaagctgcagctggagaacggaaagatcgccgacctgcggctgtcgaaagggcagaagaagcgcgtggcgctcctgctggcgctggccgagtcccgggacatcattctgctggatgaatgggcggcggatcaggatccgcatttccgccgcgagttctaccaggtcctgctgccgctgatgcagcagatgggcaaaaccgtgttcgccatcagccatgacgatcactacttccagcacgccgatcgtctgctggagatgcgcgctggccagctcgccgaacttaccggcgaagagcgggaacaggcttcccgcgatgcggtggcccgtacggcctga

SEQ ID NO: 138341 - DNA, 654 bp, Enterobacter cloacae
atgctcgatctgtttagcgataccccaccgtggcaggagccgctggcccccggcgcggtggtgctgcggcgatttgcccgcgaacgcgccccggcgctgctgcaggcgatagccgacgtcgccagtcagtcgccgtttcgccagatggtcacgccgggcgggtacaccatgtcggtcgccatgaccaactgcggcgcgctgggctggactaccgatcgccacggctatttgtacgccccggtcgacccggtaaccgatcaaacctggccgccgatgcctgccgtatttcatgaactggcgctggcggcggccgccgccggcggctatccggaattttcccccgacgcctgtttggttaaccgctattgtcctggcgcaaaactgtcgttgcatcaggataaagatgaacaggatctgcgggcgccgattgtctcggtctcgctgggcttgccggccatctttcagtttggcggcttgcaacgcagcgacccgctgcagcggctgctgctggagcatggcgatgtggtggtctggggcggcgagtcgcgcctgttttatcatggcattcagccgctgaaagcggggcatcatccggaaacgggcgactgtcgttacaatctcaccttccgacaggcgggcggtcgccagtattaa

SEQ ID NO: 138342 - DNA, 504 bp, Enterobacter cloacae
gtggtaacctggaccacgggcgactgcgcgctgggtcgttgcctggtggcgcaaagtgaacgcggcgtctgcgcggtgctgccgggtgataacgatgcggcattgctcgacgacctgcgccggcgctttcccaatgccgagctgcgtgaaggcgaccctgatttttgtcagcagatggccgagattttcgcccacctcgacgacagccggcggccggtatcgctgccgctggatctgcagggcaccgcgtttcagctgcaggtctggcaggcgctgcggcagatcccggtgggcgagacccgcagctaccgccaggtggcagagcatattgaccagccgcgggcggttagagccgtggccggcgcctgcgcggcgaattcgctggcggtgattgttccctgccaccgggtggtgcgtgaagatggcgccctgtccggttatcgctggggaacggcgcgaaaagcgcagctgctggcgcgcgaggcccaacatgaggaggagtaa

SEQ ID NO: 138343 - DNA, 651 bp, Enterobacter cloacae
  misc_feature (538)..(547): n is a, c, g, or t
gtgcgcaccgatgtactggcgctgccgctgccgggtcagcgtctggttggccgtcagggaccgattcgcgtgctggtggtcggtggctctcagggcgcgcgcgtcctgaaccagacgatgccgcaggtggcggcgaagctcggcgctacggtgaccatctggcatcaaagcggcaaaggcggccagcaaaccgtgcagcaggcctatgccgccgccggacagccgcagcataaagtgacggaatttattgatgacatggccgcggcgtatgcctgggcagatgttgtggtttgccgttccggcgcgctgacggttagcgaaatcgcggccgcaggtttaccagcgctgtttgtcccgttccagcacaaagatcgtcagcagtactggaatgcgctgccgctggagaaagccggcgcggcgaaaattcttgaacagcctgagttcacggtagaggcggttgcctctaccctggcgagctgggatcgggaaaccttgctggatatggcggaacgagcgcgtggcgcttcgattccggacnnnnnnnnnnattccggacgctaccgagcgggtagcagaagaggtcagcgccgtagctttggcgcgctaattgcggtgattttcaccgcccgaatacagaagttgatggcgtaa

SEQ ID NO: 138344 - DNA, 1476 bp, Enterobacter cloacae
atgaatacacaagatttggcaaaactgcgttccatagtgcccgagatgcgtcgcgttcggcacattcactttgtcggcatcggcggtgccggtatgggcggtattgccgaagtgttggctaacgaaggttaccagatcagcggctccgacctggcgccgaatccggtgacccagcagctgtcgcagcttggcgccaccatttatttcaaccatcgcccggaaaacgtgcgtgatgccagcgtggttgtcgtttccagcgcgatttcggcagataacccggaaatcgttgccgcgcatgaggcgcgtatcccggtgatccgtcgtgccgaaatgctggcggaacttatgcgctttcgccacgggatcgccattgccgggacccacggcaaaaccaccaccaccgcgatggtatccagcatttacgccgaggccgggctggacccgaccttcgtcaacggcggactggtaaaagcggcgggcgtacatgcccgtcttggccatagccgttacctgatcgcggaagcggatgagagcgacgcgtcgtttctgcatctgcagccgatggtggccattgtcaccaacatcgaagccgatcacatggatacctaccatggcgactttgagaatctgaagcagacatttatcaacttcctgcacaacctgccgttctacggacgcgcggtgatgtgcgtggacgatccggtgatccgggaactgctgccgcgcgttggccggcagatcaccacctacggttttagcgacgacgccgacgtgcgcgtcgaggactatcgtcaggttggggcgcaggggcatttccgcctggtacgccaggataaagcgatcctgcaggtgacgctcaatgccccgggacgccataacgcgctgaacgcggcggcggccgtcgccgtggcgacggaagaggggattgacgatcgggctattctgcgcgcactggagagcttccagggaactggacgccgctttgattttcttggcgagtttccgctggccgaagtcaacggcaaaccgggcagcgcgatgctgatcgatgattacggtcaccacccgacggaagtggacgccaccattaaagcagcgcgcgccggctggccggataaaaacctggtgatggtattccagccgcaccgttatacccgtacccgcgatctgtatgatgattttgccaacgtgctgacccaggtggatgccctgctgatgctggacgtctatccggcgggcgaagcgccgatcccgggcgccgacagccgctcgctgtgccgcaccattcgcggtcgcgggaaagtggatccgatcctggtgcccgattcggcccaggccgcggagatgctggcgtcagtcctgaccggcaacgatttagtactggtgcagggcgccggtaacatcggtaaaatcgcccgccacttggctgaaatcaaactgatcccgcaaaaaacggaggaggagcgccatggctga

SEQ ID NO: 138345 - DNA, 921 bp, Enterobacter cloacae
atggctgataaaatcgcggtgcttttcggtggaacctccgctgaacgtgaagtgtcgctgaattcaggcgcggcggtgctggccgggctgcgtgaaggcggggtggatgcccatccggtcgacccgcgcgatgttgatattacccagctaaaaaagcagggctttaagaaagcgtttattgccctccacggccgcggcggggaagatggcactctgcaggggctgctggagttaatccagctgccttataccggcagcggcgtgatggcttcggcgatttcaatggataaactgcgcagcaagtggctgtggcagggcgccggattaccggtcgcgccgtgggtggcgctgacccgcgcccagtttgccgccgggctgtctactgacgtcgaacagcaaattgcggcgctgggtctgccggtcatcatcaagccgagccgtgaaggctccagcgtcgggatgtcgaaagtcagcgaaagttgtgatttagcaagtgcattggcgttggcttttcagcatgatgatgaagttttggtcgaaaaatggctcagtggaccggaatttaccgtcgccatagtcggtgaagaaattttaccgtcaatacgtatccaggccgcgggaaccttctatgattatgaggcgaagtatctctctgatgagacgcaatatttctgcccaggatttgaagatcccgcgcgtgagtcagctattcagaacctggtgcttaaagcctggaatgttctgggttgcaaaggctggggccgtattgacgtgatgctggacagcgatggccagttttatctgctggaagcgaatacttccccgggcatgaccagccatagccttgtgccaatggcggcgcgtcaggcaggaatgagcttctcccagcttgttgtacgaattctggacctggcggggtga

SEQ ID NO: 138346 - DNA, 831 bp, Enterobacter cloacae
atgtcgcaggctgcgctgaatacgcggaaccatgaagaagaggcttcttcttcgcgtcggagtaatggaacgcggctggcagggatcgttttcctgctggcggtgctgtttaccgtgctggtcagcgggtggatggttcttggctggatggaagatgcgcagcgcttaccgctgtcgaagatggtggtgaccggcgagcgtcactatacgcgcaatgatgacatccgtcaggcgatcctggcgctgggttcgccgggtacctttatgactcaggatgtgaacatcatccagagccagattgaacgtctgccgtggattaagcaggcgagcgtccgaaagcagtggcccgatgaattgaagattcatctggttgaatatgtgccgattgcgcgctggaatgatcaacatatggtggatgcagaaggaaatgccttcagcgtgccggcggatcgcaccagcaaacagaatttaccgatgttatacggtcccgaaggcagcgagaacgaagtgctgcaggggtatcgtgacatggggcaggtgctggcaaaggataaattcacgttgaaagtggcggcgatgaccgcccgtcgctcctggcagttgacgcttaataatgacatcaagctcaaccttggccgtggcgataccatgaaacggcttcagcgctttatggaactctacccggttcttcagcagcaggcgcagaccgacggcaaacggattagctacgttgatttgcgttatgactcgggtgcggcagtgggctgggtacctgctcccgcagaggaaactaatcaacaacagaatcaggcacaggcagaacaacaatga

SEQ ID NO: 138347 - DNA, 1263 bp, Enterobacter cloacae
atgatcaaggcgacggacagaaaactggtagttggactggagattggcaccgccaaggtggccgctttagtaggggaagttctgcccgacggcatgatcaatatcatcggcgtgggcagttgcccatcgcgtggtatggataaaggcggtgtgaacgacctcgagtcggtggtgaaatgcgtacagcgcgccatcgaccaggctgaactgatggccgattgccagatttcatcagtttatttggcactttcgggtaaacatataagctgtcagaatgaaatcgggatggtaccgatttcggaagaagaagtgacgcaggacgacgtcgagaacgtggtccacaccgcgaagtcggttcgcgttcgcgatgaacatcgtgtcctgcacgtgattccgcaggaatatgctatcgactaccaggaagggattaaaaacccggtagggctgtccggcgtgcgtatgcaggcgaaggtgcatctgatcacctgccataacgatatggcaaaaaacattgttaaagcagtggaacgttgtggtctgaaagttgaccaacttattttcgccgggttagcggccagttattcggtattaacagaagacgaacgtgagctgggcgtctgcgttgtggatatcggcggtggtacaatggatatcgccgtctacaccggcggcgcattgcgtcacaccaaagtgatcccgtatgccggcaacgtggtgaccagcgatatcgcctatgccttcggtacgccgccgagcgatgccgaagcgattaaggttcgtcacggatgcgcattgggttccatcgtcggtaaagacgaaaacgtcgaagtaccgagcgtcggtggacgtcctccgcgtagcctgcagcgtcagacgttggcagaggtgattgaaccgcgctataccgagctgcttaacctggtcaatgaagagatcctgcagctgcaggaacagctccgccagcagggtgttaaacatcatctggcggcggggattgtgttaaccggcggcgcggcgcaaattgaaggtctggcggcctgtgcgcagcgcgtgttccatactcaggtgcgcattggcgcgccgctgaacatcaccggtttaaccgactatgcccaggagccgtattattcaacggcggtggggctgctgcactacggaaaagagtcacatctcagtggtgaagcggaagtagaaaaacgcgtgacggcctcagtgggctcgtggattaagcgactcaacagctggctgcgaaaagagttttaa

SEQ ID NO: 138348 - DNA, 1152 bp, Enterobacter cloacae
atgtttgaacctatggaactgaccaacgacgcggtgattaaagtcatcggcgtcggtggcggcggcggtaacgccgttgaacacatggtgcgcgagcgcattgagggtgttgaattcttcgcggtaaacaccgatgcgcaggcgctgcgtaagacggcggttggccagactatccagatcggtagcggtattaccaaaggtctgggcgcgggcgcgaacccggaagtcggccgtaacgcggctgatgaagaccgtgaagcgctgcgcgcagcccttgatggcgcagacatggtgttcatcgcggcaggcatgggcggcggtaccggtaccggcgcggcgcccgtagtcgcggaagtggcgaaggatctggggatcctcaccgttgcggtggtcactaagccgtttaattttgaaggtaagaagcgcatggcgttcgctgagcaggggatcaccgagctgtccaagcacgttgactcactgatcaccatcccgaacgacaagctgctgaaggtcctgggtcgtggaatttccctgctcgacgcattcggcgcggcaaacgacgtcctgaaaggcgcggtgcagggtatcgccgaactgatcacccgtccgggtctgatgaacgtcgacttcgcggacgtccgtaccgtgatgtctgaaatgggctacgcgatgatgggctccggggtggcgagcggtgaagaccgtgcggaagaagcggctgaaatggctatctcttctccgctgctggaagatatcgacctgtcaggcgcgcgcggcgtgctggtcaacattactgcgggcttcgacctgcgtctggacgagttcgaaactgtgggtaacaccatccgtgcttttgcctcggataatgcgaccgtggttatcggtacctctctggacccggatatgaacgacgagctgcgcgtgaccgtagtggcgaccggtattggcatggataagcgtccggaaatcaccctggtaaccaacaagcaggttcagcagccggtgatggatcgttaccagcagcatggtatgtcgccgctgacgcaagagcagaagccggcagccaaagtggtgaacgacaatacgccgcaaaccgcgaaagagccggattatctggatatcccagccttcctgcgtaagcaagccgattaa

SEQ ID NO: 138349 - DNA, 918 bp, Enterobacter cloacae
atgatcaaacaaaggactcttaaacgtatcgttcaggcgactggtgtcggtttgcataccggcaagaaagtcactctgacgttacgccctgcgccggcaaataccggggtcatctatcgtcgcaccgacttgaatccaccggtagattttccggctgatgccaaatctgtgcgtgataccatgctctgtacttgcctggttaatgagcatgacgtgcggatttctacggttgaacacctgaacgccgcattggctggcctgggtatcgacaacattattgttgaagtcgatgcgccggaaatcccgattatggacggcagtgcggctccgttcgtttatctgttgctggatgccggcattgatgaactgaactgcgccaagaaatttgtacgtatcaaagagacggttcgcgtcgaagatggcgacaaatgggctgaattcaaaccgtacaatggtttttcgctggacttcaccatcgattttaaccatccagcgattgatgccagcacccagcgctatacgctgaacttctcggccgatgcgttcatgcgtcagattagccgtgcgcgtaccttcggttttatgcgcgatatcgaatatctgcagtcccgcggcctgtgcctgggcggcagcttcgattgtgccatcgttgttgacgattatcgcgtactgaacgaagacggtctgcgctttgaagacgaatttgttcgccacaaaatgctggatgcgatcggtgacctgtttatgtgtggtcacaacattatcggcgcattcacggcgtacaaatcgggtcacgcgttgaacaacaaactgctgcaggcggttctggcaaaacaggaagcctgggagtatgtgaccttcgaagacgacgcaaaactgccaatggcgttccgcgcaccgtcgatggttctggcgtaa

SEQ ID NO: 138350 - DNA, 504 bp, Enterobacter cloacae
atgaacgtgagtggattgctgacgcgctggcgacagtttggcagacggtatttttggccgcatctcctgttggggatggtcgcggccagcctcggcctgcctgcgctaagcaacggtcacgagaccgcggcgccagcgaaggcgaccgccagcaatcacaatccgagcaaggttaatttctctcagctggcgcttctggagacgaatcgccggcccagctttaccgtcgactactggcatcagcacgccattcgcaccgttattcgtcatctctccttcgccatggcgccgcaggcgctgccggtggcggaagaaacttccccgctgcaggctcagcatctggcgctgctcgacaccctcagcgcgctgctgacgcaggacagcacgccgccggtggtgatccgccaggcgggttacatcccttcttcatattctgccttccgcgtcagcgcctggataagccaggtggcggggatccgcgcagggcctcaacgtctcagctga

SEQ ID NO: 138351 - DNA, 234 bp, Enterobacter cloacae
gtggcgcatgccgaatacgcgcttactggcttcgcgaacgacggcgaaagcttcagggatcaggctttccagcgtttcgcctttttccaggcgcgcgcggaattcagcggttttcgctttcagctcgtcatcagagagtttttccatcgccggttccatgccgttgatgatattgacgactttgcgcatacgacgcagcgtacggtcgttacggctgccgaaaaccttggttaa

SEQ ID NO: 138352 - DNA, 738 bp, Enterobacter cloacae
ttggatctccacgccctctttggcctcaacggcctggtgcagaccatcggaccagcggcggccctgcatcgtacggccagtgtgctcatcgacgatgataacttcgccatctttgacaatgtagtcaacgtcgcgggtgaacagcgcatgggcgcgcagcgcggcggtaacgtggtgcatcagcataatgttggttggagagtacagggactcaccttcatccataatgccttcctgtaccagcagctcttcaatcagcaccagaccacgttcggtcaggttaacctgacgcgctttttcatccaccgagaagtggccttcgccagtgaaagtatccgaatcctctttttcctggcggatcagatgcgggatgattttgtttaccttgcggtacatttcagagctgtcttccgccgggccggaaatgatcagcggcgtacgcgcctcatcgatcaggatggagtccacctcatccaccagcgcatagtgcagtttacgctgaacgcgctcttccgggctgaaggccatgttgtcgcgcaggtagtcgaagccgtattcgttgttggtgccataggtgatatcggcagcgtaagcttcacgcttcgccggcgccggcaggccggacatgttgatgccaactgtcatgcccaggaattcaaacagcgggcggttattttcggcgtcacgctgggccagatagtcgttgacggtcactacgtgaacgcctttgccggttag

SEQ ID NO: 138353 - DNA, 822 bp, Enterobacter cloacae
atgccgtgtgaagaactggatatcgtctggaataatattaaagccgaagcccgggctttggctgactgtgagccgatgctcgccagtttttaccacgcaacgctactcaagcatgaaaatctcggcagcgcgctgagctatatgctggccaacaagctggcttccccgattatgccggcgatcgccattcgcgaagtggtggaagaggcctacgccgccgatccggaaatgatcgcctccgccgcctgcgatattcaggcggtgcgcacgcgcgacccggcggtggataaatactccacgccgttgctctatctgaagggtttccatgccctgcaggcctatcgtatcggccactggctgtggactcaggggcgacgcgcgctggcgattttcctgcaaaatcaggtctccgtctctttccaggtggatatccacccggcggcgaaaatcggccgcgggatcatgctcgaccatgccaccggcattgtggtcggcgagacggcggtgattgaagatgacgtctctattctgcagtcggtcaccctcggcgggaccggtaaaaccagcggcgaccgtcatccgaaaattcgcgaaggcgtgatgattggcgccggggcgaagatcctcggcaatattgaagtcgggcgtggcgcgaagattggcgccggttcggtggtattgcagccggttccgccgcacaccaccgcggcgggcgtaccggcgcgtatcgtcggcaagccggagagcgacaagccggcgatggatatggatcagcatttcaacggcatccaccacaccttcgagtacggcgacgggatttga

SEQ ID NO: 138354 - DNA, 474 bp, Enterobacter cloacae
atgctgaacatcgtgttattcgaaccagagatcccgccgaacaccgggaatattatccgcctgtgcgccaacacgggcttcagtctgcatatcattgagccgatgggcttcacctgggacgataaacgcctgagacgcgccggactggactatcacgagttcactgccgtgcagcgctatgcggattacgcggcgtttgtcgccagcgcgcagccgcagcgtctgttcgccctgaccaccaaaggcacgcctgcgcacagcgcagtgagctatcaggacggcgatttcttgatgtttggcccggaaacccgcggtctgccggccagcatcctcgatgccctgccgccggagcagaaaatccgtattccgatgatgccggacagccgcagtatgaacctgtcaaacgcggtgtcggtggtggtgtatgaagcctggcgccagctggggtatcctggcgcggtcttgcgcagctaa

SEQ ID NO: 138355 - DNA, 1185 bp, Enterobacter cloacae
atgattatttccgccgccagcgactatcgcgccgccgcacagcgtatcctgccgccgtttctgttccactatattgacggcggcgcctacgccgaacataccctgcgccgcaacgtcgaggacctttccgatgtagccttgcgccagcgtattttgcgcaatatgtcggacctgagtctggaaacgacattattcaacgagaagctggcgatgccgacggcgttggcgccggtcgggctgtgcgggatgtacgcccgccgcggcgaagtgcaggccgccggcgcggcggacgacaaaggcattccgttcaccctctctaccgtttccgtctgcccgatcgaagaggtcgccccgaccatcaagcgcccgatgtggttccagctgtatgtcctgcgcgaccgtggctttatgcgcaatgcgctggagcgcgccaaagccgcgggctgctcgacgctggtctttaccgtcgatatgccgactcccggcgcccgctaccgcgacgcccattctggcatgagcggcccgaacgccgccctgcgccgctactggcaggccgtcacccatccgcagtgggcgtgggacgtcggccttaacggtcgcccgcacgatctgggcaatatctccgcctatctcggcaaaccgaccgggcttgaggattacatcggctggctggcgaataacttcgatccgtcgatttcatggaaagacctggagtggatccgcgatttctgggacggtccgatggtgatcaaagggatcctcgatccggaggacgcccgcgacgcggtgcgcttcggcgctgacggcattgtcgtctccaaccacggcggccgccagctcgatggcgtgctctcctcggcccgcgccctgccggcaattgccgacgcggtgaaaggcgacatcactattctcgccgacagcggcatccgcaacgggctcgacgtggtgcggatgatcgccctgggcgccgacagcgtgctactgggccgcgcttacctgtacgccctggcgacccacggtaagcagggcgtggcgaatctgctgaacctcatcgagaaagagatgaaagtggcgatgaccctcaccggggcgaaaagcatccgtgaaatcagccgtgattcgctggtgcagaacgccgaagcgctgcagaccttcgatgcgctgaagcagaataacgccgcgtaa

SEQ ID NO: 138356 - DNA, 774 bp, Enterobacter cloacae
gtgatagtgatgcctaaacgcctggccgacgacgtggcgcgtcgcgtccgggcgctgattgaagaacaacagctggaggcgggcatgcgactgcccgccgagcgccagctcgccgcccagctcggcgtctcacgcaattccctgcgcgaagcgctggcgatgctggtcaatgaaggggtgctgttgagccgtcgcggcggcggcaccttcgtccgttttcagcatgagccgtggtcagagcaaaacatcgtccagccgctgaagacgctgctggccgatgacccggactacagcttcgatatcctcgaagcccgccacgccatcgaagccagcaccgcgtggcacgcggcgatgcgcgccaccgacgccgataaagaaaaaattcgtctgtgctttgaagcgacccagagtgaagatccggatatcgcctcgcaggcggatgtccgctttcacctggcgatcgccgaagcctcgcataacgtggtgctcctgcaaaccatgcgcggctttttcgacctgctgcactcctccgttaagcagagccgccagcgcatgtatcaggtgccgccggtgtttgcccgcctgaccgaacagcaccaggccgtcatggaggcgattgtcgccggcgacgccgaggcggcgcgccaggcgatgatgggccacttaggctttgtccacgccaccatcaaacgttttgatgaagaccaggcccgccaggcgcgaattacccgcctgcccggtgaccacaatgaaaattccagggagaactcgtga

SEQ ID NO: 138357 - DNA, 1656 bp, Enterobacter cloacae
atgaatctctggcaacaaaactacgatcccgccggtaatatctggctatccagtcttatcgcatcgctaccgattctgtttttcttttttgcgctgattaagctcaaactgaaaggctacatcgctgccacctggaccgtcgcaatcgcgctggtcgttgccttgctgttctataaaatgccggtggaccgcgccttagcctcggtggtctacggcttcttctacggcctgtggcctatagcgtggattattatcgccgcggtcttcgtctataaaatctcggtgaagaccggacagttcgacatcatccgctcatcgattctgtcgattacgccggaccagcgcctgcagatgctgatcgtcggcttctcgttcggcgcctttctcgaaggggcggcgggtttcggcgcaccggtcgcgattaccgccgcgctgctggttggtctcgggtttaacccgctgtatgcggctggcctgtgcctgatcgtcaacaccgcgccggtggccttcggcgcgatgggcatcccgattctggtcgccggccaggtgaccggtatcgatagcttcgccatcggccagatggtgggccgccagctgccgttcctgaccattatcgtgctgttctggatcatggcgattatggacggctggcgcggcattaaagagacctggccggcggtgatagtcgcaggcggttcgttcgctattgcccagtacctcagctcgaacttccttggcccggagctgccggatatcatctcgtcgctggtctccctggtctgtctgaccctgttcctcaaacgctggcagccggtacgcatcttccgcttcggcgatctcggcgcctcgcaggtggatatgacgctggcccgcacacgctacacggcgggacaagtgatccgcgcctggtcgccgttcctgttcctgaccgccaccgtgaccctgtggagcgtgccgccattcaaagcgctgttcgcttctggcggcgcgatgtatgacttcgttatcaatatttcggtaccattcctcgacaaaatggttgcccgtatgccgccggtggttagcgccgcaacgccctacgccgcggtatataaattcgactggctgtcggcaaccggcaccgccattctgttcgccgccctgctgtccatcgtctggctgcgcatgaagccgaaagatgcgctgaccaccttcgccgggacgctgaaggatctggcgctgccgatctactctatcggcatggtgctggcgttcgcctttatctctaactattccgggctgtcgtcgaccctggccctggcgctggcccataccggccacgcgtttaccttcttctcgccgttccttggctggctgggggtattcctgaccggttcggacacctcgtctaacgccctgttcgccgcgctgcaggcaacggcggcgcagcagattggcgtctccgatatcctgctggtcgcggctaataccaccggcggcgttaccggcaagatgatttccccgcagtcgatcgccatcgcctgcgccgcggtaggcctggtgggcaaagagtcggatctgttccgctttaccgtcaaacacagcctgatcttcacctgcatggtggggctgatcaccacgctgcaggcctacgttttaacctggatgatcccgtga

SEQ ID NO: 138358 - DNA, 363 bp, Enterobacter cloacae
atgaaagaagtcgaaaagaatgaaatcaagcgtctgagcgatcgtctcgacgccatccgccaccagcaggccgagctgtcgctggtggaagccgccgataaatatgctgaactggaaaaagaaaaagccactctggaaacggagattgaacgtctgcgttccgtccagagccagaagctgagcaaagaggcgcagaaactgatgagcctgccgttccgccgcgcgattaccaaaaaagagcaggccgatatgggcaagctgaagaaaagcgttcgcggcctggtggttgtccatccgatgaccgccctgggccgggaaatgggtctgaaagagatgaccggtttcgcccgcagcgaattttga

SEQ ID NO: 138359 - DNA, 225 bp, Enterobacter cloacae
atggcaaagatcggcgacggcgtaccacgtttaatcgacaaagcggttgattttatggcttccagtcaggcgtttatggagtatttgaaaaagtctccgcgtctgcagcatgtaccgcgagacattcctcaggataaggaagcgttgttcctgcagcgtctggaatattatcgtcagctttaccggccgacctgcgaccagacggaaccggaatcagagcgttga

SEQ ID NO: 138360 - DNA, 597 bp, Enterobacter cloacae
atgcacaacctggcgcggccgacgtcgcgcccattacgactcctgtcagatatgcaggcaatgatggaagaaacacaagcatttgaaaaccgtgtgcttgagcgtctgaatgctggcaaaaccgtacgaagcttcctgatcgccaccgtcgagctgttaacggaagcggtcaatattctggtgcttcaggtgttccgtaaagacgactacgcggtgaaatacgccgtcgagcccttgctggagggcagcgggccgctcggcgatctctctgtacgcctgaagctgatttatggccttggggtgataagtcgtgccgaatatgaagacgctgagctgctgatggccctgcgcgaagagcttaaccacgacggcaatgagtacagctttaccgacgacgaaattatcggtccgttcggcgagctgcactgcgtcaccgccctgccgccaacgccgcaatttgatgacagcgatgccgaactgctggcaatgcagaaactgcgttaccagcagatggtgcgctcaacgatggtgctgtccctgactgagctgatttcacgaatcagcttaaaaaaagcctttcagaaatcaacgctctga

SEQ ID NO: 138361 - DNA, 1149 bp, Enterobacter cloacae
atgaaagcattacattttggcgcaggtaatatcggacgtggctttatcggtaaattgctggccgacgcgggcatcgaactgacgtttgccgatgtcaatcagaccgtacttgatgccctgaatgcccgtcatagctatcaggttcacgtcgtcggtgagaatgagcaggtggacaccgtctccggcgtcaatgccgtcagcagcatcggcgatgaggttgtggacctgatcgctgaggtggatctggtcaccaccgccgtcggtcccgtcgtgctcgagcgcatcgcgccagcgatcgccaaagggctggcgcagcgcaaagcgcagggcaccgaacgccccctgaacatcatcgcctgcgaaaatatggtgcgcggcaccacgcagttaaaaggccacgtgtttaacgcgctggcggaagaagataaagcgtgggtggaagcgcatatcggctttgtcgactctgccgtagaccgtattgtgccgccatcggcttccgccactcatgacccgctggaagtcaccgtggaaacctttagcgaatggattgtcgataagactcagttcaagggcgcgctgccgactatcccggggatggaattaactgataacctgatggcatttgtcgaacgcaagctcttcaccttgaacaccgggcatgctataaccgcctacctcggaaaactggcgggccatcagacgattcgcgacgcgatcctcgacaagaaaattcgtgccgtcgtgcagggcgcgatggaagagagcggcgcggtgctgatcaaacgttacgcctttgacccgcagaagcacgcggcttatatccagaaaatacttggccgtttcgagaacccgtacctgaaagacgatgttgagcgcgttggccgtcagccgctgcgcaaactgagcgctggcgaccgtttaattaagccgctgctgggtacactggaatacggtctgccgcaccgcaacctggtgaaagggattgcggcggcaatgcatttccgtagcgaagacgatccgcaggcgcaggagctggcggcactgatcgccgacaaggggccgcaggccgcgctggcgcagatttccggcctggatgccgcaagtgatgtcgtcgcggaggccgttaacgactacaacgcggaaaaatga

SEQ ID NO: 138362 - DNA, 1236 bp, Enterobacter cloacae
atgggcgttctgctggcgtacatgttctttggccgcggcagcgcaaaacagtctgcaggcggggctgctatcatccacttcctgggtggtatccatgaaatctacttcccgtacgtactgatgaacccgcgcctgatcctggccgttatcctcggcgggatgaccggtgtcttcaccctgactatcctcaatggcggtctggtttccccggcttccccaggctctatcctggcggtactggcgatgacgccgaaaggcgcctacttcgctaacatcgccgcgattatcgcagcgatggcggtctccttcgtggtctctgcggttctgctcaagaccagcaaagttaaagaagaagacgatatcgaagccgcaacgcgtcgtatgcatgacatgaaagcggaatccaaaggcgccagcccgctggcggccggtaatgtcaccaacgacctgagccatgtgcgtaaaatcatcgtcgcctgcgacgccgggatgggttccagcgctatgggcgccggggtactgcgcaagaaagtgcaggatgccgggctgagcaacatctcggtcaccaacagcgcaatcaataacctgccgccggatgttgacctggtcatcacccaccgcgaccttaccgagcgcgccatgcgccaggtgccgcaggcgcagcatatttcgctgaccaacttcctcgacagcggtctgtacaccagcctgaccgagcgcctggtcgcggcccagcgccacatcgacaacgaagtcaaagtcaccgatagcctgaaagacagctttgacgatactaacaacaacctgttccagctgggcgcggataacatcttcctcggtcgcaaagcagccaccaaagaagaagcgattcgcttcgccggtgagcagctggtgaaaggcggttacgttgagccggaatatgtgcaggcgatgctggaccgcgaaaaactgacctcgacctatctcggcgagtccattgcggtaccgcacggcaccatcgaagcgaaggaccgcgtgctgaaaaccggcgtcgtcttctgccagtacccggaaggcgtgcgcttcggtgaagaagaagatgaagtcgcgcgtctggtcatcggcatcgccgctcgtaataacgagcacattcaggttatcaccagtctgactaacgcgctggatgacgaaaccgtgattgagcgcctggcgaaaaccaccagcgtcgacgaagttctggcactgttaaataaataa

SEQ ID NO: 138363 - DNA, 726 bp, Enterobacter cloacae
atgctgtggggcaacgaccagcagcagctccagctcgccgagggggagatagtcataaccgctcagcggcggcggttcgccgagcgcccccagcagcagatcggcctgcccgtcagtcagcggccgccagtccagcagggaggggttcagcgtgaagtgcagccgggtcagcggctgttgttgataaaatgcagcgattggcggcgagatcagcgccacgggaaaggtgctgtccaccgccagacgaaggctattctcccacccctgctgcagcttaaccgcccggttctccagttcgcgggcgatatgcagcacctcccgccctttctccagcagcatctgtccgctgggggtaaagcgcgcgcgatggccgctgcggtcgagcagctgaatattgagatcgctttccaggcggtgaatggtgtagctcagcgccgagggcgttttaaagagctttgccgacgcggcggcaaagctcccctctttttccagggcatccaggatcacgaggacatccagcagtggtttcatcgctacccccttacggtatgcgaatcaccgctggcggatcactccatcggcatcaccagcggatcggggtactggtactcaaaccccagctcattgcagatacgattgccatccacaatcttgccctggccgccgtccgggctgtcgctgaacaccggcggcggcagaccgagctcgcgggccatctgcggataa

SEQ ID NO: 138364 - DNA, 825 bp, Enterobacter cloacae
atgaaaaaggtcgcgatagtcggtttgggatggctggggatgccgctggcgctgtcgttgacggcgcgaggctggcaggttaccggcagtaaaactacgcaggatggcgtggaggcggcgcggatgtgcgggatcgacagctatccgctgcgcctggagccgcagctggtctgtgataccgaggacctcgacgcgctgatgaacgtcgatgcgctggtgatcaccctgccggcccggcgtaccggggcaggggaagggttttatctacaggcggtgcaggagatcgtcgataccgcgctggcgtaccatattccgcggatcgtcttcaccagctccacctcggtgtatggcaacgtcaacggtacagtgaaggagaattccccgcgtctgccgcaaaccgccagcggacaggtgctcaaggagctggaggactggctgcacaacctgccggggacatcggtggatattctgcgcctggccgggctggtggggccttcccgccatccgggacgttttttcgccggcaagtcggcgccggatggccagcacgtggtcaatctggtgcatttgcaggatgtggtggccgctatcgaactgctgctgcaggccccgaagggcgggcacatctataatctatgtgcgccccgccaccctgcgcgcggcctcttttatccgcagatggcccgcgagctcggtctgccgccgccggtgttcagcgacagcccggacggcggccagggcaagattgtggatggcaatcgtatctgcaatgagctggggtttgagtaccagtaccccgatccgctggtgatgccgatggagtga

SEQ ID NO: 138365 - DNA, 900 bp, Enterobacter cloacae
atgttagacaacacccgtttacgcatagctattcagaaatcaggccgtttaagcgaagattcacgcgaattactcagccgctgcggcattaaagtcaatttgcacacccagcgtctgattgcgctggcggaaaatatgccaatcgatattctgcgcgtgcgtgatgacgatataccgggcctggtgatggacggtgttgtcgacctcggcattatcggcgaaaacgtgctggaagaagagctgctcagccgccgcgcccagggcgaagacccgcgctacttcactctgcgccgtctcgacttcggcggctgccgcctgtcgctggcgactccggtggatgaagcctggaacggcccggcggcgctggacggcaaacgtatcgccacctcttaccctcacctgctgaagcgctacctcgatcaaaaaggtatctcctttaaatcctgtctgctgaacggctccgtggaagtggcgccgcgcgccggcctcgccgacgctatctgcgacctcgtctccaccggcgccaccctggaagctaacggcctgcgcgaagtggaagtgatctaccgctccaaagcctgtctgatccagcgcgacggcgaaatggccgacgccaaacagcaactgattgaccgcctgctgacccgtattcagggcgtgattcaggcccgcgagtcgaaatacatcatgatgcacgccccgaccgaacgcctggaagaagtggttgccctgctgccgggcgccgagcggccgactattctgccgctggcaggcgacaagcagcgcgtggcgatgcacatggtcagcagcgaaaccctgttctgggagaccatggaaaaactgaaggcgctgggcgccagctccattctggtgctgccgattgagaaaatgatggagtaa

SEQ ID NO: 138366 - DNA, 1305 bp, Enterobacter cloacae
atgagcttcaacacaatcatcgactggaacggctgtagcgcagaccaacaacagcaactcttaacgcgcccggcgatttccgcctccgacagcatcagtaaaacggtgacggagatcctgaataacgtcaaagccaacggcgacgcggcgctgcgcgaatacagcgcgaagtttgataaaaccaccgtcgccgcgctgcaggtgagcgaggccgagatcgccgccgccggcgagcgcctcagcgacgagctgaagcaggcgatggcggtggcggtgaaaaacattgagaccttccacaacgcgcaacagctgcaggcggtggatgtcgaaacgctgccgggggtgcgctgccagcaggtcacccgccctatcgcctccgtcggactgtacattcccggcggctcagcgccgctgttctcaacggtgctgatgctggcgacgccggcgcgcatcgccggctgtcagcaggtggtgctctgctcgccgccgccgattgccgatgagatcctctatgccgcgcagctgtgcggcgtaaaaaccatctttaacgtcggcggcgcccaggccatcgccgccctcgccctcggtaccgagtcggtgccgaaggtggataaaatctttggcccgggcaacgcttacgtcacggaagccaaacgccaggtcagccagcgtctggacggcgcagccatcgacatgccggccggcccgtcggaagtgctggtcatcgccgacagcggcgccaacccggactttgtcgcctctgacctgctgtcgcaggcggaacacggcccggactcgcaggtgatcctcctgaccccggacgccgggatgggcagccgcgtcgccgaagccgtggagcgccagctggccgccctgccgcgcgcagaaaccgcccgcgtggcgctctccgccagccggatcatcgtggcccgcgacctggcgcagtgcgtggctatctccaaccagtacggcccggagcacctgatcattcagacccgtcaggctcgcgagctggtggacagcatcaccagcgccggctcggttttcctcggtgactggtcaccggaatccgcgggcgactacgcctcgggcaccaaccacgtcctgccgacctatggttataccgccacctgctcaagcctcggtctggccgacttccagaagcggatgaccgtgcaggagctgtcgcgcgacggctttgccgccctcgcctcaacgattgagatcctggccgccgccgagcgccttgacgcccacaaaaacgccgtaacgctgcgcgttgccgccctgaaggagcaagcatga

SEQ ID NO: 138367 - DNA, 1062 bp, Enterobacter cloacae
atgagcattgaagatttagcccgcgccaacgtccgcgcgctgaccccgtatcaatccgctcgccggctgggcggcaaaggcgacgtctggctcaacgccaacgaattccctaccgccgtagccttccagcttaccgaacagacgctgaaccgctatccggagccgcagccgaaggccgtgattgagagctacgcccgctacgccgaggtcaaaccggagcaggtgctggtcagccgcggcgccgacgaaggcatcgagctgctgatccgcgccttctgtgagcccggcgaagacgcggtgctctactgcccgccgacctacggcatgtacagcgtcagcgccgagaccatcggcgtcgaatgccgcactgtgccgacgttggccgactggcagctcgacctgccgggcatcgaagcgcggctggacggcgtgaagatggtcttcgtctgcagcccgaacaacccgaccgggcagattatcgacccgcagtcgatgcgcgacctgctggagatgacccgcggcaaagccatcgtggtggccgacgaagcctatattgaattctgcccgcaggcgacgctggccggctggctcagcgactatccgcacctggtggtgctgcgcacgctgtccaaagccttcgccctcgccggcctgcgctgcggcttcaccctcgccaacgccgaggtgatcaacgtgctgctgaaagtgatcgccccgtacccgctctccacgccggtggccgatatcgccgcccaggccctgagcccggaggggatcgccgcgatgcgccagcgcgtggcgcagatccttgacgagcgccgctacctggtggaacagctgcgcggcatcgcctgcgtggagcaggtcttcgattccgagaccaactatgtgctggcgcggataaccgcctccagcgcagtgtttaaatctttgtgggatcagggcattatcttacgagaccagaataaacaaccttcattaagcggctgtttgcgtatcactatcggtacccgtgccgagagccagcgcgtgattgacgccttgactgcggagaatgtatga

SEQ ID NO: 138368 - DNA, 1068 bp, Enterobacter cloacae
atgacccagaagtatctctttattgaccgtgacggcacactgatttccgaaccgccggaggatttccaggtggaccggttcgacaagctggcgtttgagccgcaggtgatcccggcgctgcttaagctgcagcaggaaggctataagctggtgatgatcaccaatcaggatggcctgggaaccaacagtctgccgcacgaagcgtttgatggcccgcacaacctgatgatgcagatcttcgcctcgcagggcgttaactttgaagaggtgctgatttgtccgcacttcccgggcgacaactgcgcctgccgcaagccaaaaacgcagctggtgctgccgtggctggaagagggcgtgctggataaagcccacagctatgtgattggcgaccgtgccaccgaccttgagctggcggataacatgggaattaccggtctgcgctatgaccgcgagacgctcgactggccgaccatctgcgagcagctgacccgccgcgaccgctatgcccatgtcgagcgcatcaccaaagagacccaggtggatgtgaaagtgtggctggaccgcgaaggcggcagcaagatccacactggcgtcggcttttttgaccatatgctcgaccaaatcgccacccacggcggcttccgcatggaggttaacgtcggcggcgatctgtacatcgacgaccaccacacggtggaggataccggcctggccctcggcgaagccctgaagctggcccttggcgacaagcgcggcatcaaccgcttcggcttcgtgctgccgatggacgagtgtcttgcccgctgcgcgctggatatctccggccgtccgcacctggagtataaggcggacttcacctatcagcgcgtcggcgatctgagcaccgagatggtggaacacttcttccgctcgctctcctacaccatggcggtgaccctgcacctgaaaaccaagggcaagaacgatcaccaccgcgtggagagcctgttcaaagcctttggccgtacgctgcgccaggcgatccgcgtccagggcgatgccctgccgtcttccaaaggggtgctgtaa

SEQ ID NO: 138369 - DNA, 591 bp, Enterobacter cloacae
atgaatgtggtgatccttgataccggctgcgccaacctcaattcggtgaaatcggcgattggccgccacggctatgagccggtggtcagccgcgatccggaagtggtattgcgtgccgataaactgtttcttcccggcgtcggcaccgcccaggcggcgatggatcagctgcgcgaccgggatctgatcgacctgatcaaagcctgtacccagccggtgctggggatttgcctgggcatgcagctgctcggcaagcgcagcgaggagaacaacggcgtcgatctgctgggcattatcgaagaagaggtgccaaagatgaccgaccacggtctgccgctgccgcacatgggctggaaccgggtgtatgccaaagctggcgatcggctgttccgcggcattgaagaaggcgcgtatttctacttcgtgcacagctacgccatgccggtcaacccgtacaccatcgcccagtgcaattacggcgaggcgttcaccgccgcggtgcagaaagataacttctttggcgtgcagtttcacccggagcgctccgggagcgccggggcgcagctgctgaaaaacttcctggagatgtga

SEQ ID NO: 138370 - DNA, 738 bp, Enterobacter cloacae
atgattattcctgctttagatttaatcgacggcaccgtcgttcgtctccatcagggcgattacggccagcagcgcgactatggcagcgatccgctgccgcgcctgcaggcctatgccgctcagggggcggaagtcctgcacctggtcgacctgaccggggcgaaggatccggcgaagcgccagatcccgctgctgaaatcgctggtcgccggggttgacgtcccggtgcaggtcggcggcggcgtgcggaccgaagcggatgtcgcggccctgcttgaggccggcgtcgcccgcgtggtggtcggctccaccgcggtgaagtccccggaggaagtgaaaggctggtttaaacgctttggcccagaacggctggtgctcgccctcgacgtgcgtatcgacgccgacggcaataagcaggtggcggtcagcggctggcaggaaaactccggcgtgacgctggaggagctggtggaaagttatctgccggtcggcctgcagcacgtgctgtgcaccgatatctcccgcgacggcacgctggcaggctctaacgtctcgctgtacgaggaagtctgcgcccgctatccgcaggtggcgtttcagtcatccggcggcatcggcgatcttaatgatattgccgcgctgcgcggcaccggggtgcgcggcgtgattgttggccgcgcgctgctggaaggtaaattcaacgtaacggaggccattcaatgctggcaaaacggataa

SEQ ID NO: 138371 - DNA, 777 bp, Enterobacter cloacae
atgctggcaaaacggataatcccctgcctcgacgtccgcgacggccaggtagtgaaaggcgtgcagttccgtaatcacgagatcattggcgacatcgtcccgctggccaagcgctatgccgacgaaggggccgacgaactggtgttctatgatatcaccgcctccagcgacggtcgggtggtcgacaagagctgggtgtcgcgggtagcggaagtgattgatattcctttctgcgtggcgggcgggatcaagtcgctggaagacgcggcgcagatcctctccttcggcgccgataagatctcgattaactcccctgctctcgccgacccgacgctgatcacccgccttgccgaccgctttggcgtgcagtgtatcgtggtggggattgatacctggtttgacgcagagaccggcaagtatcacgtcaaccagtataccggcgacgagagccgcacccgggtgacgcagtgggaaaccctcgactgggtggaggaagtgcagaagcgcggcgcaggcgagatcgttctcaatatgatgaaccaggacggggtgcgcaacggttacgacctgcagcagctggcgaaggttcgcgcggtgtgccacgtcccgctgatcgcctccggcggcgcgggcactatggaacacttcctcgaagccttccgcgacgccgacgttgacggcgcgctggcggcctcggtattccacaaacagattattaatattggcgaactgaaagcgtacctggcggcacagggcgtggagataagggtatgttga

SEQ ID NO: 138372 - DNA, 600 bp, Enterobacter cloacae
atgttgactgaacagctggactgggaaaaaacggacggcatgatgccggccatcgtgcagcacgccgtatccggcgaagtgctgatgcacggctacatgaacaaggaggcgctggagaaaaccgaagccaccggcaaggttaccttttactcgcgcaccaagcagcggctgtggaccaagggggaaacctcgggccatgtcctcaatgtagtgagcatcacgccggactgtgacaacgatacgctgctggtgctggtaaacccgatcggaccgacctgccacaaaggcaccacaagctgcttcggcgaaaccggccaccagtggctgttcctctatcagctggagcagctgctggccgagcgtaaacacgccgacccggagagctcctacacggcgaagctgtatgccagcggcaccaagcgtattgcgcagaaagtgggggaagaaggcgtggagaccgcgctggccgccacggtgaacgaccgcttcgagctgaagaatgaggcgtcggacctgatgtaccacctgctggtgctgctgcaggaccaggggctggatctcggggaagtgattgataatttaagagcacggcataggtaa

SEQ ID NO: 138373 - DNA, 3171 bp, Enterobacter cloacae
atgatcaaaaacacctttgaaaaaacgccggactacgtgctgtcggcctataaagataatgccgcggtgatggaagggtctgaagtcgggcgctatttcgccgaccatcagaccgggcgctacgacttccatcaggagccggcgcacattctgatgaaggtggaaacccataaccacccgacggccatctctccatggccgggcgcggcaaccggctccggcggcgaaatccgcgatgaaggcgccaccggccgcggcgcgaagccgaaagcgggcctggtgggcttctcggtttccaacctgcgtatcccgggcttcgaacagccgtgggaagaagatttcggtaaaccggatcgcattgtcaccgccctggacatcatgaccgaaggcccgctgggcggcgcggcgtttaacaacgaatttggtcgtccggcgctgaacggctacttccgcacctatgaagagaaagtcaccagccacaatggcgaagagctgcgtggctaccacaaaccgatcatgctggccggcggtatcggcaacatccgcggtgagcacgtgcagaagggcgagattaccgtcggcgcgaagctgatcgtgctgggcggcccggcgatgaacatcggcctcggcggcggcgcggcgtcttctatggcctccggccagtccgatgccgatctcgatttcgcctccgtacagcgtgacaacccggaaatggagcgccgctgtcaggaagtgatcgaccgctgctggcagttgggcgacgccaacccgatcctctttatccacgacgttggcgccggcggtctctccaacgctatgccggagctggtgagcgacggcggccgcggcggtaaattccagctgcgcgatattctcagcgatgagccagggatgagtccgctggagatctggtgtaacgaatcgcaggaacgttatgttctggcggtcgccccggagcagctgccgctgttcgacgaactgtgccgccgcgagcgcgcgccttatgccgttatcggcgaagccaccgctgagcagcatctgagcctgagcgacagccactttaacgatcagccgatcgacctgccgctggacgtcctgctcggcaaaacgccgaaaatgacccgcgacgtgcagactctaaaagctcagggtagtgcactggatcgccaaccgattacccttgccgatgcggttaaccgcgttctgcatctgccgacggtggccgagaaaaccttcctcgtcaccatcggcgaccgcaccgtgaccggtatggtcgcccgcgaccagatggttggcccgtggcagatcccggtggccaactgcgcggtgaccaccgccagcctcgacagctactatggcgaagcgatggcgatgggcgagcgcgccccggtcgccctgctggacttcgcggcctctggccgtctggcggtcggcgaagcgctgaccaacatcgccgccacgcagattggcgagctgaaccgcgtgaagctgtcggctaactggatggccgccgccggccacccgggtgaagacgctggcctgtatgaggcggtgaaagcggtgggcgaagagctgtgcccggcgctgggcctgaccattccggtcggtaaagactcgatgtcgatgaaaacccgctggcaggaaggcagcgagcagcgcgagatgacctctccgctgtcgctggtcatctctgccttcgcccgtgtcgaagatgtccgtcataccgtcacgccgcagctttcgacggaagataacgccctgctgctgatcgacctcggtaaagggcacaacgcgctgggcgcgacggcgctggcgcaggtctatcgccagctcggcgacaagccggctgacgtgcgcgatgtcgcgcaactgaaaggcttctggaatgcgatgcaggccctggtggcgcaacgtaaactgctggcctaccacgaccgctccgacggcggtctgctggtgaccctggcggaaatggcctttaccggccactgcggcgtggaagcggatatcgccgcgctgggcgacgaccatctggccgcgctgttcaacgaagagctgggggcggtgattcaggtccgcgccgcagaccgtgaggcggtggaagccattctggcggttaacggcctggcggactgcgtgcattacctcggtaaagcggttgagggcgatcgcttcgtgctgaccgccggcggtcagacggtgttcagcgaaagccgcaccacgctgcgcatgtggtgggcggaaaccacctggcagatgcagcgtctgcgcgacaacccggcctgcgccgatcaggagcatgaggcgaaagccaatgatgccgacccgggcctcaatgtgaagctctcgtttgatattaacgacgacgtcgccgccccgtacattgccaccggcgcgcggccgaaagtggccgtcctgcgcgagcagggggtgaactcccacgttgaaatggcggccgccttccatcgtgccggctttgacgccatcgacgtgcatatgagcgacctgctggccggccggaccggtctgggcgatttccatgccctggtagcctgcggcggcttctcctacggcgacgtgctgggcgcgggcgagggctgggcgaagtcgattcttttcaacgagcgcgtgcgcgatgagttcgcgaccttcttccatcgtccgcagacgctggcgctcggcgtgtgcaacggctgtcagatgatgtccaacctgcgcgagctgatcccgggcagcgacctgtggccgcgctttgtgcgcaaccagtctgaccgctttgaagcgcgctttagcctggtggaagtgacgcaaagcccatccctgctgctggaaggcatggttggctcacggatgccgattgcggtctcccacggcgaaggtcaggtggaagtgcgcgacagcgcgcatctggctcagcttgagagcaaaggtctggtggcgctgcgcttcgtggataacttcggcaaagtgaccgaaacctatccggcgaacccgaacggttccccgaacggtatcaccgcggtgaccagcgaaagcgggcgcgcgaccatcatgatgccgcacccggaacgcgtcttccgcaccgtaagcaactcctggcacccggagaactggggcgaggatagcccgtggatgcgtatcttccgtaacgcgcgtaaacagctgggttaa

SEQ ID NO: 138374 - DNA, 1422 bp, Enterobacter cloacae
ttgaagcgactctctcttttcccccgttcgctgcgtcagctggtgacgctctcttttgtgctgatcctgctgccattgctggtgctggcctggcaggcctggcagagcctgaacgcccttagcgcccaggcggcgcatattaaccgtaccaccctggtcgacgcccgacgcagcgaggcgatgatcaatgccgcactggagatggagcgcagctatcgccagtactgcgtgctggacgatccgacgctggcgcgcgtctatcaaaaccagcggcagcgctacagccagatgctggacgcccacgccggcgtgctgccggacgagaagctctggcaggcgctgcgtcaggatgtcagcgatctggcgcagctgcagtgtaaaaatagcggccccgatgcccaggcagccgccagactggaagttttcgccagtaataacagcgatatggtgcaggcgacccgggcggtcgtctattctcgtggccaacaactgcagcaggagatagccgaacgcggccagttttttggctggcaggcgctggtgctgtttctgctgagcctggcgctggtgctactcttcacccgcatgattatcggcccggtgaaaggcatcgaaagaatgatcaatcagctgggggcagggaagtcgctggacgacgccgcattgtttaccggcccgcgcgagctgcgatcggtgggcaagcgcatcatctggctcagcgagcgcctggcgtggctggagtcgcagcggcatcaatttcttcgccatctgtcgcatgagctgaaaaccccgttggccagtatgcgtgaaggtaccgagctgttggccgaccgggtcgcggggcccctgacccctgagcagcaggagattgtcgagatcctcgacagcagtagccgtaacctgcaaaagctgattgaacagctgctggactataaccgaaaacaggccgacggcccggtggctcgcgaagcggtggacctggtggacctggtggaaaacgtcgtggcggcgcacagcctgcccgcgcgggctaaactgatgcataccgaactgacgctgcaggcgcggcgttgcctggcagagcctgcgctattgataagcgtaatggataatctctactccaatgcggtgcactatggcgctgaatccggtaacatccgtatccatagctaccggcacggagagcaggtgcgtattgatgtcgccaacagcggcgaaccgatcccggccgcggaaaaaaatatgatattcgagcctttttaccaggggagtcaccagcgtaaaggggccgttaagggcagtggactggggttgagtatcgcccgcgactgcgtccggcagatgcaaggggagctcagcttagttgatgcgcccgccgggcaggtctgttttcgcattacgcttccctcagcgccggaataa

SEQ ID NO: 138375 - DNA, 687 bp, Enterobacter cloacae
atgtcccaattcctggcctggcgccgttccctcagcggatggctgctttcaggcattgcttgtctgacgctggcggggtgttccgccggcttttcaccgcataccgcggaaggtaccgccgcccccgggcaggcgcagcatcaggtggccgattttgtcgcggtagactgcgcggatatctgggcgcacagcagcgatgccagcgacaaaaatcccctctactggctgcggggcattgactgtgccgatcgcctcgcgccggcgcaggcgcgggcggaggcgaaacgccataccgacgacagctggcaggacgcgttccgtcgcggcatcctgcttgctgatgctaaaattacccctgaggagcgccgcgacctggtggcgcgtctcgataccttcagcccgcaaatcgccgttcaggtccgcccgctgtatcagctctggcgcgacggccagacccgtcagctgcagctggtggaagagcgtgcccgttacgcgaagcttcagcagtccagcgatagcgaactggagacactgcgtcagcaggagctggcgctgcgcgagcagctggagctgaccacccgcaagctggagaacctgacggatatcgaacgccagctctccagccgcaagccgggcggtaattttggcagcgaaaaagtgccggaggtgatccatgacgatccgtaa

SEQ ID NO: 138376 - DNA, 1209 bp, Enterobacter cloacae
  misc_feature (1190)..(1199): n is a, c, g, or t
atgacgatccgtaaaccggcgcgtttactgctggtggatgacgatccgggactgttgaagctactgggcatgcgcctggtcagcgaaggctacagcgtggtcaccgccgagagcgggccggaagcgctgcgcgtgctggggcgtgagaaagtggatctggtgattagcgatctgcggatggatgaaatggacggcctgcagctgtttagcgagatccagaagggccaccccggcatgccggtgatcattctcaccgctcacggttcgattcccgacgccgtggcggctacccagcagggggtgttcagcttcctgaccaagccggtcgataaagatgccttatataaagccattgatgaggcgctggagcagcgctcgccggccactgacgaagcctggcgccaggcgattgtaacccgcagcccgctgatgctgcgcctgcttgagcaggccggaatggtggcgcaatcggatgtcagcgtactgattaatggccagagcgggaccgggaaggagatcgtcgcccaggcgatccacaacgccagcccgcgtcatgataagccgttcgtggcgatcaactgcggcgcgctgccggaacagctgctcgaatccgaactgtttggccatgcgcggggcgcttttaccggcgcggtcagtaaccgtgaaggattattccaggccgctgagggtggtacgctgtttctcgacgagatcggtgatatgccggttgcgttgcaggtgaagctgctgcgcgtcctgcaggagcgcaaggtgcgcccgctgggcagcaaccgcgatatcgaaatcaacgtgcggattatctccgccacccaccgcgacctgccgaaggcgatggcccgcggcgagtttcgtgaagacctgttctaccgcctcaacgtagtgaacctgaaaataccgccgctctccgaacgcacggaagatattccgctgttggccaaccatctgctgcgtcagtccgccgatcgccataagccgttcgtgcgggcgttttccagcgatgcaatgaagcggctgatggccgccaaatggccgggcaacgtgcgccagctggtgaacgtgatcgagcagtgcgtggccctgacttcgtcgccagtgatcggcgacgcgctggttgagcaagcgctggagggcgagaacacggcgctgccgaccttcgtggaggcgcgcannnnnnnnnntttgagctga

SEQ ID NO: 138377 - DNA, 339 bp, Enterobacter cloacae
atgaaaaagattgatgcgattattaaacctttcaaactggatgacgtgcgtgaagcgctggccgaagtcggcatcaccgggatgacggtaacggaagtgaaaggctttggccgccagaaagggcacaccgaactgtaccgtggtgccgagtatatggtcgattttctgccgaaagtaaaaattgaaattgtggtgaccgacgatatcgtcgatacctgtgtggataccatcatccgtaccgcacagaccggtaaaatcggcgacggtaaaatctttgtcttcgacgtggcgcgggtcattcgtattcgtaccggcgaagaagacgacgcggcgatttaa

SEQ ID NO: 138378 - DNA, 1191 bp, Enterobacter cloacae
atgcttgacgctcaaaccatcgccacggtaaaagccaccattcccctgctggtagagaccggcccgaaattaaccgcccatttctacgatcgtatgttcgcgcataatccggagctcaaagagatcttcaacatgagcaaccagcgcaacggcgatcagcgtgaagcgttattcaacgctattgccgcctacgccagcaatatcgataacctgcctgccctgctgccggcggtggaaaagatcgcccagaaacacaccagcttccagatcaaaccggagcagtacaatattgttggcagccatctgctggcgaccctcgatgaaatgttcagtccgggccaggaagtgctcgatgcctggggtaaagcctacggcgtgctggcgaacgtctttatcggccgtgaagccgagatctatcagcaaaacgccagtaaaaccggcggctgggaagggacccgcgcgtttcgcatcgtgaagaaaaccccgcgcagccagcttatcaccagctttgagctcgaaccggttgatggccagccggtcgccgattaccagcctggccagtacctggccatctggctgaaaccggaaggcttcgaatatcaggaaatccgccagtattccctgacccgcaaagcggacggcaaaggctaccgcattgcggttaaacgcgaggaaggcggtcaggtttccagctggctgcataaccatgccagcgaaggcgatgtggtctatctggccgccccggcgggagatttcttccttaacgttaagccacagacgccggtcactctgctctccggcggcgtcgggcaaacgccgatgctggcgatgctggatgcgctggcgaagagcggtcatcagggtcaggtgaactggttccatgcggcggaaaatggcgacgttcacgcctttgccgatgaagtgaaggcgctcggcgcggcgctgccggcgtttacctctcacgtctggtatcgcaccccgactgaggccgaccgtcaggctggacgttttgatagcgaaggtttgatggatttagcagcagtggcggacaatattcgcgacccgcagatgcagtattatctctgcggcccggtagcgtttatgcagtttgcagcgaagcagctggtcgaattaggggtcaacaaagacaacattcattacgaatgcttcggcccgcataaggtgctgtaa

SEQ ID NO: 138379 - DNA, 1209 bp, Enterobacter cloacae
atgttaaggacaggaagcgaggagtggtggcaaaccctgcgggggccgcagtgccgcgcagtggatgacgccatcgaggtaacgttctggtggcgggacccggcgggggatgaaacctgctctccccatcgtcgggtatggctctatatcaccggcgtgaccgaccaccatcagaatgcgcggccgcaatcgctgcaacgtctccccgggaccgacgcctggttctggcgcactacgctgtcgccgacctggcgcggcagctactgttttattccctccgaccgtgacgatgatttttcccctgaggtgttcagcgctgatgcgcccgaccgcgcgctgctacgcgaaggctggcgcaaactgctgccgcgggcgatagccgatccgctgaacccgcacagctggcggggcggacgcggccatggcgtgtccgccctggagatgccgcaggcccccgcgcagcctggctgggacccgcttaatgaggcacatcctgccgcccgttgccttgagtggcgcagcgcgcgtctgggcaaccatcgtcgggtctggatctacaccaccggcgaggctgtcgacccgcaaacgcggccgctggcgatcctgctcgacggccaattctgggccgagagcatgccggtgtggtcgccgctggccgccctgacccgcgaggggagactgccgccggcggtctacctgctgatcgacgcgatcgacaaccagcgccgcggggttgagctgccctgtcaccgcgatttctggctggcggtgcaggaggagctcctgccgctggtccacggctatgccccgttcagcgaccgcccggatcggacggtggtagccgggcaaagcttcggcggtctggcggcgatgttcgccgctctcaactggccgcagcgctttggctgcgtgctcagccagtcaggctcctactggtggccgcaccgtgatggccgcgggacgggctttatcggcgaacagcttcgccagggtgaggtgtccgcggccgggctgcgcgtctggctggaagcgggccaacgcgaaccgatcatttttcgcgcgaaccaggcgctactggcgcaactcaccacaacacagcagacgattttctggcgtcaggttgacggcgggcatgatgcgctttgctggcgcggcgggctgacggcagggcttatccagctctggcagcctctgctgtcgcacccttag

SEQ ID NO: 138380 - DNA, 204 bp, Enterobacter cloacae
atgcaattcagtaaccccttcgacaatccgcaagggcagttttacattctgcgcaatgatcagcagcagtacagcctgtggccggcgcactgcgacctgcctgccggctggacggtggtgtgccccccgcagtcggccgaggcctgcaacgcctggctggcggccaactggtcaaccctgacccccgcccatcatgcgtcataa

SEQ ID NO: 138381 - DNA, 3612 bp, Enterobacter cloacae
atgaccactcgtttaccgctggttgccgcgcagccggggatctggatggccgagcgcctctccactctgccaggcgcctggagcgtagcccactatgttgaactacgcggcgccctcgatccgacgctgctgggaaaagcgattgtcgccggtctgcagcaggcggacaccctcagcctgcgctttgaggaagaggagggggaagtctggcagtggctggcggccgaccgcacctttggcgaaccgtcgatcattgacctgcggacggcgccggatccgcatcgcgccgctacggagcggatgcaggcggatctggcgcaggatctgcgcgtcgacggcggcaacccgctggtgtgccatcaactgctgcgcgtcggcgacgaccgctggtactggtatcagcgttatcaccacttgctggtggatggcttcagcttcccggcgataactcggcagatcgccgccatttaccgcgcctggcagcgtggggaagccactcctgagtcgcctttcacccccttcgccgaggtggtggacgagtaccagcgctacgccggcagcgaggcctggcagcgggataaagccttctggcaggctcagcgccaggcgttaccggcgcctgcctcactctctgccgcgccgctgggcggacgcgccgccgggagcgatatctggcggatgaagctggagatgaacgccgacgccttccgccgtctggctggccatgcgccgcagtgtcagcccgctgacctggcgctggcgctcaccacgctgtggctgggccgcctgtgcaaccggatggactacgcggcgggctttatctttatgcgccggatgggttcagccgcgctgacctcgacggggccggtgctcaatgtcctgcctctggcggtacatattgacgcccgggagacgctggcggacctggcgatgcgcctcgccggtcagttgaaaaagatgcgccgccatcagcgctatgacgccgaacagatcgttcgcgacagcggcaaagcggcaggggacgaaccgctgttcggcccggtgctgaacgtcaaagtctttgattaccagctggatatcgacggcgtcggggcagtgacccacaccctcgccaccggcccggtcaacgatctcgagctggcgctgttcccggatgagaccggcggcctgtcgctggagatcctcgccaacaaggcccggtacgacgaagccgagctccgtcgccacatggcgcgactgaccgcgctgctggcgcagttcgccgccgatccggcgctgcgctgcggcgaagcagagatgctctccgccgacgagctggcccggctggcggcggtcaacgataccgctgtgccgctgcctgccaccaccctcagcgcgctggtggccgaccaggcgcggaagaccccggatgcgccggcgctggcggacgcccgctggcagttcagctatcgcgagatgcgtcagcaggtggtggcgctcgcgcagctgctgcgtcagcgcggcgtgaagccgggcgacagcgtggcggtggccctgccgcgctcggtgttcctgaccctggcgctgcacggcattgtcgaagcgggggccgcctggctgccgctggacaccggctacccggacgaccgcctgcggatgatgctggaagacgcccggccgtcgctgctgatcgccacggaggaccagctggcccgcttcagcgatattccggggctggaaagcctctgctaccagcagccgctggccgccggggatgaggcgccgctggcgctgtcaaaaccagaccataccgcctacatcatctttacctccggctccaccgggcggccgaaaggggtgatggtcggccagaccgccatcgtcaaccgcctgctgtggatgcaggatcgctatccgttatctgccgacgacgtggtggcgcagaaaacgccgtgcagtttcgacgtgtcggtgtgggaattctggtggccgtttatcgccggcgcgcagctggtgatggccgagccggaggcgcaccgcgacccgcaggcgatgcagcagttcttcgcccgctacggcgtgaccaccacccactttgtgccgtcgatgctggcggcgtttgtcgcctcgctggatgccgacagcgtcgctgcctgccgcacgctgcggcgggtattctgcagcggcgaagcgctgccgacggaattgtgccgcgagtgggagcgcttgaccggcgcgccgctgcataacctgtacggcccgacggaggcggcggtggacgtcagctggtatccggcctgcggccctgagctggcggccgtgaccggcagcagcgtgccgattggctggccggtgtggaacaccgggctgcgcattctcgatgccgcgatgcgcccggtgccgccgggggtggcgggggatctttatctcaccggcatccagctggcgcagggctatctggggcgcccggatctcaccgccagccgctttatcgccgacccgtttgcccccggcgagcggatgtatcgcaccggcgacgtggcgcgctggctggcgaacggcgcggtggagtaccttggccgcagcgacgatcagctgaagatccgcgggcagcgcatcgagcttggcgagattgatcgggtgatgtcggccctgccggacgtggggcaggcggtgagtcacgcctgcgtcttcaaccaggcggcggcgaccggcggcgatgcccgacagctggtgggctatctggtctctgactccggcctgccgctggataccgcggcgctgaaagcgcaactggcggaacagctgccgccgcatatggtgccggtggtgctgatgcagctcgctgagctgccgctgagcgccacgctgctggccgccgatctcagcgatgagcaggctcagcgcctggggctggatacgcttctgccgctgcgcgagagcgacggtccgacgctgttctgcttccatccggcctccggcttcgcctggcagttcagcgtgctggcgcgctatctcagcccgcgctggtcaattaccggtattcagtcgccgcgcccgcaggggccgatggccagcgccgccagcctcgacgaggtctgcgagcatcatctgcaaacgctgttggcgcagcagccgcacggcccttattacctgttcgggtattcgttgggcggcaccttagcccaggggattgccgcccgcttgcgccagcgcggcgaagcggtggccttcctcggcctgctggatacctggccgccggagacgcaaaactgggcagagaaagaggccaacgggctggatcccgaggtactggcggagatcgaccgcgagcgcgaagcgttcctcgccgcccagcaggggcaagcctccggcgagctgttcagcgctatcgaaggcaactatgccgatgcggtgcggctgttaaccaccgcgcacagcgcgaagtttgacggcaaggcgacgctgttcgtggcggagaagacgcggcaggaggggatggatccgcaggtcgtatggggcccgtgggtaggggaactggaggtgttcagccagaactgcgcccacgtcgatatcatctccccgcaggcctttgaggcaatcggtccggtggtcagggagattctggggtaa

SEQ ID NO: 138382 - DNA, 795 bp, Enterobacter cloacae
atgagtgctgtcccctcccgtttgcgcggcgagcagttaaccctggcctacgggaacaagaccatcgccgagtcgctgaacgtgaccatccctgacggccacttcaccgccattatcggccccaacggctgcggcaagtcgacgctattgcgcaccctcagtcgcctgatgacgccggccagcggccacgtctggctcgacggcgcgcagatccagcagtacgccagtaaagaggttgcccgccgcatcgggctgctggcgcagaatgccaccacccctggcgatatcacggtgcaggagctggtggcccgcgggcgctatccgcaccagccgctgtttacccgctggcgcaaagaagatgaagaggcggtgaacaaggcgatgcgggcgaccgggatcagcgatctggcgctgcagagcgtcgacacgctttccggcggccagcggcagcgggcgtggattgcgatggtgctggcccaggaaacggcgattatgctgctggatgagccgaccacctggctggacatcagccatcagatcgacctactggaactgttgagcgagctgaatcgcgagaagggctataccctggcggcggtgctgcacgatcttaaccaggcctgccgctacgccacccacctgatcgccctgcgcgacggcaggatcgtcgccgagggggcgccgaaggagatcgtcaccgccgatctgattgaacggatttacggtctgcgctgcacgatcattgaagatccggtggcgcatacgccgctggtggtcccgctgggccgccggtaa

SEQ ID NO: 138383 - DNA, 993 bp, Enterobacter cloacae
gtgattgccccgtcccgccgcctgatagccagctgtctgctgctaatggccgccagcctgctgatttccctgctcgggctggcgcaaggcccggtgcccctgacgattggccaggtgttctcggcgctgttcggcgatgcgccgcgcaacgtcgcgatggtggtgaacgaatggcggctgccgcgggtgttaatggcgctgctcatcggcgccgcgctcggcgtcagcggcgccattttccagtcgctgacccgtaacccgctcggcagcccggacgtgatgggctttaacaccggcgcctggagcggcgtgctggtggcgatggtcctcttcggccagaacctgacggcgatcgccctggcggcgatggccggcggggtgctgacctcgctggtggtctggctgctggcctggcgcaacgggatcgaaaccttccgcctgatcattatcggcatcggcgtgcgcgccatgctggtggcattcaacacctggctgctgctgcgcgcctcgctggagaccgccctttctgcgggcctgtggaacgccggatcgcttaatggcctgacgtggggtaaaacctggccgtcggcgccgctgatcctgttgatgctggtgggcagcgccctgctggttcgccggatgcggctgctggagatgggcgacgataccgcctgcgcgctgggggtgcaggtcgagcgttcgcgcctgctgctgatgctggtggcggtggtgctcaccgccgcctcgacggcgctggccgggccgatctcatttatcgcgctggtggcgccgcatatcgcccgccgcctgagcggcacggcccgctggggactgacccagtcggccctgtgcggcgcgctgctgctggcgctggccgattacggcgcccagcggctgtttatgccgtggcagctgccggttggcgtgttaaccgtcagcctcggcggtatttaccttattgcattgttgattcaggagtcccgcaaaaaatga

SEQ ID NO: 138384 - DNA, 546 bp, Enterobacter cloacae
  misc_feature (13)..(22): n is a, c, g, or t
ttgcggcggtacnnnnnnnnnntcgaggggctgtccaacggcatcgccctgctcaacccggacgtctacgatcagctacgcttctggcaggccggttcgctggatatccgcaccctgcaaacgctgaaaattgtcctgctgccggtagtggtggcggggatcgccgctctgctgctgagccgggcgcttaacagtctgagcctgggcaacgataccgccaccgccctcggcagccgcgtcgcccgcacccagctgatcggcctgatcgtcatcaccgtcctgtgcggcagcgccaccgccgtcgtcggccccatcgcctttatcggcctgatgatgccgcatatggcgcgctggctggtgggggccgatcatcgctggtcgctgccggtcaccctgctcgccaccccggccctgctgctgtttgccgacgtgattggccgcctgctggtgcccggcgaactgcgggtatcggtggtgagcgcctttctcggcgcgccggtgctgatctggctggtgcgccgccagccgcggggaggtggcctgtga

SEQ ID NO: 138385 - DNA, 858 bp, Enterobacter cloacae
atgggaaacggatggcatgaatggccgctggtgctgtttacggtgctgggtcagtgcgtggtcggcgcgaccatcgtcagcggtcttggctggctggcgctgggggaccaacgggaagcccggcggcggctgttgcgcaatatgttttttatctggctgttgatgggcattggttttcttgcttcggtgatgcatctcggttcaccgctgcgcgcgtttaactcgctgaaccgcatcggcgcctcggcgctgagcaacgaaatcgccagcggcgctctgttcttcgccgtgggcggattctggtggctgctggcggcgctggaaaaaatgccggcgacgctgggtaaagtctggctggcgatcgccatgctgttagggctgctgtttgtcctcgcaatgacccgggtttatcaaatcaataccgtgccaacatggtacaatggctacaccaccagcgcgttctttctgacggtgctcctcagcgggccgctgtttgccgccctgctgctgcggctggcgaaagtcgactttaacggctggttttttgccggactgagcgtggccgcgctggtcatcagcgccgcagttatcattatgcaaagcgccgggctcagtacccttcacagctcggttcagcaggcggccaccctgctgccagattacggcaaactccaggcgctacgcctggtactgctggcgctgggcctcggctgctggctatgtccgctgatccgccgccagccgccgcgcgctacggggctgctgatcggcctgctgctggtcttgatcgccgaatgtattggccgcggcctgttttatggtctgcatatgaccgtcggtatggcggttgccggttaa

SEQ ID NO: 138386 - DNA, 609 bp, Enterobacter cloacae
atgatgccgatcccaaatcgcgacgccgtcgcgttaagcgcccgcaccctgggcgcgctgttctcttatgcgccgaatagcgcggaaattgcgccgctggtcgccgccttccaggacgggagctggcagcagcagtggcccttcccggtcgcagccccgctggcgtcagggtttgccgcatcggctgaagaaacgttgccggaagcctggcagcgcctgtttatcgggccatgggccctgccggcgccgccctggggctctgtctggctggataaagagtctgtgctgtttggcgattccacgctggctctgcgccagtggatgcgcgagaacggtatcgcactggaggccgatggcaacgaaccggaagatcatttcggcaccgtgctactcctggcggcatggttgtgcgaaacggagcaggatgcgttgttcgctcagctgctggcctggcacctgctgccgtggtccgggcgtttcctgagcgtctttgtcgaccatgccgcccaccccttctatcaggcgctgggtcagctggcgcaggcgactctggcgcagtggcaggagaatctgccgatcgccgtggcgcaaaaaccgctctatcgttaa

SEQ ID NO: 138387 - DNA, 1275 bp, Enterobacter cloacae
  misc_feature (1078)..(1087): n is a, c, g, or t
atgcatcgtcttcatccctatcctgatgtgcaggtgatgtttcgccgcctgctgatcgccaccctgattggccttctcgccgccctggcggtggcgctgtttcgccacgctatggtggtgctggaaacgctgttgctcagtaatgacagcgggagcctggtcaacgccgcacagtcgctgccggcgtggcgtcggctggttacccccgcgctgggcggcctgacggcgggaaccttactctggctctggcaacgacgcagcgtcgcgcgtccgcatgccgccaccgattatatggaagccctggagaccggcgacggctgtttcgatacgccggcaagcctagtgaaatcgctggcgtcattgctggtcgtggtgaccggcagcgcgattggccgggaaggcgccatgatcctgctggccgcgctggcggcctcgctgtttgcccgtcgcttcacgccgcagagtgaatggaagctatgggtcgcctgcggcgcggctgccgggatggccagcgcctatcatgcccctctggccggcagcctgtttattgctgaaattctctttggcacgctgatgctggcctcgcttgggccggtggtgatctcggcggtgatcgctctgctgttgacgcagtttcttaatggcggcgccgcgccgctgtatcacgtcgtgttacagcaaaacctcagcgccctgcactatggcttaatgctggcgactggcctgctggccgggctgtgcgggccgctgtttatctggctgatggactacagccaccgcgggttcgttaaactgaagctggcgccgccgtggcagctgacgctgggcgggctgattgtcggcggcttatcgctcatcaccccggcagtatggggcaacggctacagcgtagtgcaaagctatttgctgctgccgccgtccggtgcgctgctggtgggcgtatttatctgcaaactgctggcggtgctggccagcagcggctccggcgcgcctggcggggtctttacccctacgctgtttgtcggcctggcgatgggcatgctgtttgcctgcttcagcaggctgtggctaccgggannnnnnnnnnccggcatggcggcgtttctggccgccacgacccatgcgccgatcatgtcaaccctgatgatttgcgagatgaccgggcagtatatgctgctgcccggtctgctgataacctgcgtcgtgtcgtctgtgctgtcgcggacgttacgccgggattcgatctatcgccatcacgttgccgagcatgtctaa

SEQ ID NO: 138388 - DNA, 696 bp, Enterobacter cloacae
atgtttaagcgtttctttattacaggtacagacacctctgtcgggaagacagtggtttcccgtgcgctgttgcaggcacttgctgccagaggcaaaagcgtggccgggtataagcctgtggcgaagggcagcaaagagacgccggacggtttacgtaacaaagatgcgctggtgttgcagagcgtctccacgctggcgttaccttatgaggctgtcaaccccatcgccttaagcgaagacgagagcagcgtggcgcatagctgcccgatcaactacggtctgctgtccgatggtttgcagcgtctggccgcgcaggtcgaacacgtggtggttgaaggcaccggcggctggcgcagcctgatgaacgacctgcggccgctctccgagtgggtggttcaggagcagctccctgtgctgatggtggtggggatccaggaggggtgcatcaaccatgcgctactgacagcccaggcgatcgccaatgacggtttaccgttgattggctgggtggccaatcggatcaaccccggtctggcgcactacgccgaaatcatcgatgtcctcagcaaaaagctgccggcgccgctgatcggcgagctgccttatctgccgcgcgccgaacagcgtgagctgagccgctacgtcgacttagacatgctcggcaacgtgatggcgatagatcgaatcccggcgtaa

SEQ ID NO: 138389 - DNA, 1224 bp, Enterobacter cloacae
atggtggtagcggatagtcaaccaggccatatcgatcaaataaagcagaccaatgcgggcgccgtgtatcgcctgattgatcagctcggcccggtatcgcgtatcgacctttcccgatttgcgcaactggcgccggccagcatcaccaaaatcgtccgcgaaatgctggaagcgcatctggttcaggagaccgagatccaggagcccggcagccgcggccgcccggcggtggggctgatggtggagaccgaggcatggcactatctggcggtgcgcatcagccgcggtgagatccatctttcgctgcgtgatttaagcagtcagctggtggtggaggatcagctggagctggcgctcaccgacagcacgccgtttctgacgcgcgttatcgaccatattgatcgcttctttattcgccatcaaaagaagctggaacgccttacctccatcgccatgacgatgcccggtattatcgataccgaaaatggcattattcatcgcatgccgttttatgaggatgttaaagatgtcccgctcggcgaagcgctggccaatcataccggggtgccagtctatattcagcatgacatcagcgcctggactatggcggaatctttgtttggcgcctcgcgcggcgcccgggacgtcattcaggtggtcatcgatcataacgtcggcgccggggtgatcaccgatgggcgcctgctgcacgccggcagcagcagcctggtggagattggccatacccaggtcgatccctacggcaaacgctgttactgcggcaaccatggttgcctggagacgattgccagcgtagaaagcgtgctggagctggcgcagatgcgcatggcgcagtcgatgagctcactgctgcaccagcgtccgctgagcgtggagtggctttgtcaggcggcgctgcagggcgatttgttagcccgggacatcatcagcggcgtgggtaatcacgttgggcggattctggcgatcatggtcaatctgtttaatccgcagaaaattctgattggctcgccgttcaatctggcggcagaaattctttttccggcaatttccagctgtattcggcaacaatctctcccagcctatagccggcatattaccgttgaaagtactcagttctccaaccgcggaacgatggctggcgcggcgctggttaaagatgcgctctataacggatccttactcatacgactgttacagggttaa

SEQ ID NO: 138390 - DNA, 903 bp, Enterobacter cloacae
atgaatatcgagttgcgtcatttgcgctactttgtcgccgtcgccgaggagctacattttggccgcgccgcggcgcgactaaacatctctcaaccaccgctaagccagcagattcagatccttgagcagcagaccggcgctcgcctgtttgcccgtaccaaccgcagcgtcagcctgacggcggccggaaagcagtttctcgccgatagccgacaaatcctcgcccaggtggatgaggcggctgctcgcgccgcccgtctacaccatggcgaaacgggtgagctgcgcatcggctttacctcctcagccccttttattaaggccgtctccgatacgctatcgatgtttcgccaacgccttccggatgtgcatattctcacccgcgagactaacacccgcgaacagatagtgcccctgagcgagggggctctggatttggggctgctgcgcaatactcaactgccggacaccctggcgtgggagcgggttctgcgcgagccgctgttggcgatggtcccggcgaatcacccgctggcccgccagccctcggtcagcctggcggcgctggcgcgcgagcccttcgtctttttcgacccgcacgtcggcactggcctgtatgacgacatcctcggcttgctgcgccgctacggccacacgccgaagattgcccaggaggtgggggaggcaatgacgattattggtctggtggccgccggcctgggggtatcgatcctcccggcctcctttcagcgcgtccagctcagtgaaatgcgctggctgccgatcgacgaacaggatgcagtatcggagatgtggctggtgtggtctaaacaccatgagcaaggggcactggcaaaacgctttcgtgaggcgctgctctcctggaaaagcgagcataattga

SEQ ID NO: 138391 - DNA, 1251 bp, Enterobacter cloacae
gtgagtcgtacaacaaccgttgacaccgtgccggcgggcgaggtcagcgtcgctggtgcatcccgcccggatccgtttattaagcgtggcaccccgcagtttatgcgcgtcactctcgcgctgttctccgccggtctggccacctttgccctgctctactgtgtgcagccgatcctgccggtgctgtcgaacgagtttggcgtgtcgccggccagcagcagtatttcgctttcaatttccacggcgatgttggcggtgggcctgctgtttaccggcccgctgtcggacgcaataggccgcaagccggtgatggtcaccgccctgctgctggccgcctgctgttcactgttgtcgactatgatgaccagctggcacggcatcctgattatgcgcgcgctcatcggcctgtcgctgagcggcgtagcggcggtcggcatgacctatctgagcgaggagatccaccccagtttcgtcgccttttcgatgggactctatatcagcggcaactccatcggcggcatgagcggccgcttgctgaccggggtctttaccgatttcttcggctggcgcgtggcactggcggcgatcagcggctttgcgctggccgcggcgattatgttctggcgtatcctgcccgagtcgcgccatttccgcccgacctcgctgcgaccgaaaacgctgctgattaacttccgtctgcactggcgcgaccgtggcctgccgctgctgttcgtcgaaggttttctgctgatgggcgcttttgtcaccctgtttaactatattggctaccggctgatgatgtcgccgtggtcgttaagccaggcggtggtaggcctgctgtcggtagcttatctcaccgggacctggagttcaccgaaggcaggggccatgaccgtacgctttggccgcgggccggtgatgcttggctttacagcggtgatgctctgcggcctgctgctgacgctcttttcttccctgtggcttattttcatcggcatgctgctgttttccgctggcttcttcgccgcgcattccgtcgccagcagctggattggcccacgcgcccgccgcgcccgcggtcaggcgtcatcgctgtatttgttcagctattatttgggttcaagtcttgccgggacgttaggcggggtattctggcatcactacggctggaacggcgtcggtgggtttatcgcgctgctgctccttgccgcgctgttgaccggcacctgcttacatcagcgactgaaatag

SEQ ID NO: 138392 - DNA, 420 bp, Enterobacter cloacae
  misc_feature (322)..(331): n is a, c, g, or t
atgactgaaaatacgccttatcagcagcttacccgtacctttcagcgcctgtcgcgcttttcgcatctcgccgccatcgccggctgggatatgttcgcgatgatgcccccgggcgggagcgtcgcccgcggcgaagcgctggccgagctcggcgtgctgcagcatcagatcctgaccgataaaaaagtgggacaatggttacaggaggcccgccagcaggatcttaatgatgttgaacaggccaacctgcgggaaatgcagcgtcagtacgatcaggcggcgctgctgccggagagcctggtggaagcaaaatcgctggccnnnnnnnnnncagccgctgcgagcatgcctggcgcagccagcgtcccgccaatgactggacgggctttgccgacaacctacgcgaggtggtcagactga

SEQ ID NO: 138393 - DNA, 291 bp, Enterobacter cloacae
gtggatagcggtggagcgggcgagtcctacgggctggtcgacccacgggcgaggcagattctgctcgtagcgggcgtggccggtttcgtggatcacgccgaacagagcgctgagcaggtcgttttcgttgtagcgggtggtgatgcgcacatcctggggtacgccgccgcagaacgggtgggcgctgatgtcgaggcgcccgccgtcgaagtcaaagccaaggatacgcatcgcctgcaggcccagctcccgttgttcagcaatggggaaaggcccctgcggggcgattag

SEQ ID NO: 138394 - DNA, 660 bp, Enterobacter cloacae
atggacttgattcactttttaattgatttcatcctgcatattgatgtgcaccttgccgaactggttgcccagtatggcgtctgggtttatgccattctgtttttgattctgttctgcgaaaccgggctggtggtgacgccattcctgccgggcgattccctgctgttcgtcgcgggcgcgctctcggccttgccaaccaacgatctcaatgtccacctgatggtactgctgatggtcatcgcggccatcgtcggcgatgcggtcaactacaccattggccggctgttcggcgaaaagctgttcagcaatccgaactcaaagatattccgtcgcagctatctggataaaacccacagcttttacgaacgtcacggcgggaaaaccattatcctggcgcgctttgtgccgatagtccgaaccttcgcgccgtttgtggcgggaatggggcatatgtcctatcgtcattttgcagcctataacgtggttggggcgctgctgtgggtgctgctgttcacctatgccggctatctgtttggcgatttgccggtggtgcaggagaatctgaagctgctgatcgtggcgatcatcgtcctctccgtcctgccgggtgtgattgagatcatccgccataagcgggcggcgtcaaagcaggcgaagtag

SEQ ID NO: 138395 - DNA, 813 bp, Enterobacter cloacae
atgtctgagatggagcaacagccgatctgtaaaatcgcgctgggcatcgagtacgacggcagcaaatattacggctggcagcggcaaaacgaagtgcgcagcgtgcaggagaagctggaaaaggcgctctcgcaggtggcgaacgaaccgattaccgtcttttgcgccggccgcaccgacgccggcgtccatggcaccggccaggtggtgcatttcgaaacccgggcgcagcggaaagatgccgcctggacgctgggggtaaatgcgaatttacctggtgacatcgcggtgcgttgggtcaaacatgtaccggcggattttcacgcccggttcagcgccacggcgcgccgctatcgctacgtcatctataatcatcgcctgcgtccggcggtgttaagtcatggcgtgacgcattttcaccagccgctcgacgccgagcgtatgcagcgcgccgcgcagtgtctgctgggagagaatgactttacctcgtttcgcgcggtacagtgccagtcgcgtaccccgtggcgcaacgtgatgcatattaacgttacccgctacggcgcgtatgtggtggtggatatcaaagcgaatgcctttgtacatcatatggtcaggaatattgtaggcagcctgatggaggtcggggccggaaaccagccggagagctggatggcagaactgctggcagcaaaagacaggacgctcgctgcggcaacggcaaaagcggaagggttgtatctggtgtcggtggattacccggcccactatgatttaccggtgctgccaatgggcccgctgtttctggcggactaa

SEQ ID NO: 138396 - DNA, 1014 bp, Enterobacter cloacae
atgtctgaaggctggaatattgccgtactgggcgcaacgggcgccgtaggcgaagccctgctcgaaactcttgctgaacgccagttcccggtaggagagatttttgctctggcgcgcaacgacagcgcgggcgaacatctgcgttttggtggcaagtcggtgatcgtcaaagacgccgccgaatttgactggacccaggcccagctggctttcttcgccgccggcgtcgaagccagtgcagcgtatgtcgaagaagcgaccaacgccgggtgtctggttatcgatctcagcggcctgtttgcgctggagccggacgtaccgctggtggtgccggacgtgaacccgttcgtattaggcgattaccgcaaccgcaacctgattgcggtgcctaatagcctgaccagtcagctgttgacggcgctcaaaccgctgatcgatcagggcgggttgtcgcgcattagcgtcactaacctgctctccgcctcggggcaggggaaaaaagcggtggatgcgctggcggggcagagcgctaagctgctgaacggcatccctatcgatgaagacgatttctttggtcgccagctggcgttcaacatgctgccgctgctgccggatcgtgaaggtagcgtgcgcgaagagcgccggatcgtcgatgaagcgcgcaaaattcttcaggatgacgggctgatgatctccgccagcgtcgttcagtcgccggtcttctacggccatgcgcagatggtgagcttcgaagcgatgcgcccgctggcggcggaggaggcgcgcgacgcttttacccgcggcgaggatatcgaactttctgaagagggcgaattcccgactcaggttggcgatgcctcaggcaatgcccgcctctccatcggctgcgtgcataacgattacggtatgccggagcagatacagttctggtcggtagcggataacgtgcgcttcggcggcgcgctgatggcggtgaagatcgccgagaagctgattgaggagtacctgtactga

SEQ ID NO: 138397 - DNA, 1137 bp, Enterobacter cloacae
gtgaaaatcctcgttgatgaaaatatgccctatgcccgtgagctttttagccgtttaggcgacgtgcaggcgatcccaggccgtccggtcccggccgatgccctgaccgatgcggatgccctaatggtgcgctcggtcacccgggtcaatgaagcattgctcgccggcaaggccattaagttcgtcggcaccgctaccgccggcaccgatcacgtcgatcaggcgtggctgcagcaggcggggattggtttctctgcggcgcccggctgtaacgccattgcggtggtagagtacgtcttttcatcgctgctgatgctggccgaacgcgacggctttgcgctgcgcgaccgcaccgtcgggatcgtcggcgtcggtaacgttggcgggcgactgcaaaagcgcctggaagcgttggggatcaaaactctgctctgcgacccaccgcgcgccgatcgcggcgacgaaggtgacttccgctccctcgaggcgctggtccaggaagccgatgtcatcaccttccatacgccgctgtataaagaagggcaatataaaaccctgcatctggcggatgaggcgctgataagccgcctgaagcctggaacgattttgatcaacgcctgccgcgggccggtggtcgataacgccgcactgctaaagcggctggaagctggtcagccgctgagtgtggtattggacgtctgggagccggagccggatctaaacgttgagcttctcaagcgagtggatatcggtaccgcgcatatcgccggctacaccctcgaagggaaagcgcgcgggacgacgcaggtttttgaagcctacagcgcctttatcggccatccgcagcaggtagcgctggacactctgctgccggcgccggaatttggccgcattaccctgcatggaccgctcgatcagccgacgctgaaaagactggtccacttggtgtatgatgtgcgccgcgatgatgcgccgctgcggaaggtggccggcgtcgccggtgaattcgacaagctgcgtaaaaattatcaggaacgtcgcgaatggtcttcgctgtatgtgcagtgcagcgatgagcaggcggcgacgctgttgcgccagctcggttttaacgccgtgcatcatcctgttcgttaa

SEQ ID NO: 138398 - DNA, 978 bp, Enterobacter cloacae
atgacgcacccccttgctgatatgccagaccgtcctccagggcgaggcccatcaggcactgccgccaccggcgaaccttcgctttccatgcagcaacgcaccgttctggagcgactgatcacgcgcctggtggcgctgacctcgcagcagaacgcggaagtgtgggcctgcgtcaaacatgacctcggactgaaaggcgactcgcccctgctggcctgccatttcagcgccgcggaggccagtctcaaccagcgcttagccgccgctcaggataatcatcatcatcgccagaccttagcgcagctcagcgatctgctcggtcagggcaataaccgccaggcggtgagcgattatattcgtcagcattatgggcaaacggcgctgcatgcccttagccagacgcagctggagaccattctgcatctgctgcagcatggccagctgtcgatcccgcagccgcagcagcgcccgccgaccctgcgcccgctgttgccagccgagcataatacgctcaatcagctggtgactaagctggcggccgccaccggcgaaccaagcaagctgatttggcaatccatgctggagctttgcggcgtcaagtccggggagctgatcccggcgacgcacttcctgccgctttcgtactggctgcaggcgcggcaaacgctgagtgcgcaaagcgcgccgacgctcacctcgctgcagggagcgctcaagcagccgctggaggccgcggagtggcagaaaattgtcgactttgccagtcgcagctggcaggtcacgccgcagaccacgctgagcccggcgcagatcctggcgctgctgaacaaggtgtttgtgctgcgggtggcccgcgcccaggagacgctggccatcccgcaggaggagccagtcgccaggcggacgtggagcgctaagccgtggcagctggcgctgggcgcggttgtcctgctccttgtgctgtggctcctgctgtag

SEQ ID NO: 138399 - DNA, 1101 bp, Enterobacter cloacae
  misc_feature (1080)..(1089): n is a, c, g, or t
atgtccgcagttactgaaacaacatccaattcttcggcgaatttttcgcttttccgtattacgtttgccgtctttttgacctatatgaccgttggtttgccgctgccggtgatcccgctctttgtccatcaggagctgggatttggcaacaccgtggttggcgtggcggtagggatccagttcctcgccaccgttctgacccgggggtacgccggacgtctggcagaccagtacggcgctaaacgttccgtcctgcaggggatgctggcctgcgccctggcgggcgcggcatggctggccgctgcgctgctgccgctgccggtgctcgccaggctcggcctgctgctgctgggccgcttgatcctcgggtttggcgaaagccagctgctgaccggaaacctgagctgggggatgggcctggtgggaccggcccgttccggcaaagtgatgtcatggaacggcatggcgatgtacggctcgctggcggtgggcgccccgctgggattattgatctatagccattttggcgtggcggtgctggcctgtgtcaccatgggactaccgctcgtcgcctggcttattaacggtaccgtgcgcaaagtggcggcccacggaggcgagcggccttcactctggagcgtcatcggcatgatctggcggccgggcattggcctgggcctgcagggtgtcggctttgcggtgatcggcaccttcgtctccctctatttcgccagccatagctggccaatggccggctttaccctgacggcgtttggtggcgcctttgtgctgatgcgagtgctgttcggctggatgccggatcggtttggcggcgttaaggtggcgatggtctcgctgctgatagaggcggttggtctgacgctgctgggactggcgccgaatgcctggctggcgctggccggtgcggcgctgaccgggtgcggctgttcgcttattttcccctcacttggggtggaagtagtgaagcgcgtcccggcgcaggtgcgcggcaccgcgctcggcggctatgcggcctttcaggacatctcctatggcctgaccgggcagctgaccggcctnnnnnnnnnncctatggcctga

SEQ ID NO: 138400 - DNA, 1221 bp, Enterobacter cloacae
atgaaacgtgcagtgattactggcttgggcatcgtttccagcatcggtaataaccagcaggaagtcctggcatctctgcgtgaaggacgttcagggatcactttctctcaggagcttaaagattcagggatgcgcagccacgtatggggcaacgtcaaactggataccactggcctcattgaccgcaaagtagtgcgctttatgagcgacgcctccatctatgcttacctgtccatggaacaggctgttgccgacgcaggtctggcgcctgaagcatatcagaataacccgcgtgtcggcctgatcgcaggctccggcggcggttccccgaaattccaggtcttcggcgccgatgccatgcgtagcccgcgtggtctgaaagccgtgggcccgtatgtggtcaccaaagcgatggcttccggcgtttccgcctgcctcgctacgccgttcaaaattcacggcgttaactactccatcagctcggcctgcgccacttccgcccactgtattggtaacgcggtagagcagatccagctgggcaaacaggacatcgtctttgccggcggcggcgaagagctgtgctgggaaatggcctgcgaattcgacgccatgggcgcgctgtccactaaatacaatgacaccccggaaaaagcgtcccgtacctatgatgctaaccgtgacggcttcgttatcgccggcggcggcggtatggtcgtggtggaagagctggaacacgccctggcgcgtggcgcgcacatctatgccgaaatcgtcggctatggcgcgacctccgatggcgcagacatggtcgccccgtctggtgaaggcgcagtgcgctgcatgcagatggcgatgcatggcgttgatacgccgatcgactatctgaactcccacggtacctccactccggtcggcgacgtgaaagagctgggcgccatccgcgaagtattcggcgacaacagcccggctatttcggcaactaaagcgatgaccggccactcgctgggcgcggcgggcgtacaggaagccatttactccctgctgatgctggagcacggctttatcgcgccgagcatcaacgttgaagagctcgacgagcaggctgccggcctgaacatcgtcaccaaaccgacggacgctaagctgaccaccgtaatgtccaacagcttcggcttcggcggcaccaacgccacgctggtgatgcgtaaatacaacgcctaa

SEQ ID NO: 138401 - DNA, 561 bp, Enterobacter cloacae
gtgccggtttccagcctgaagctacgcctggccgggctactcgccagcagcaacccggcgcgctccatcgctattatcgaaaagggaaatcagcaggttagccttagcacgggcgatcccctcccagggtatgatgcgcggatcgccgccattctgcctgaccggatcatcgtcaactatcaggggcgcaaagaggccattttattatttaacgacagccgcgcgccgtcgccgccgcccaccgccgcgggcaacccgcccctcgtgaagcgactccgcgaacagccgcaaaatatcctcacttatttatctatttcgccggtactcagcggcgacaaactgctgggttatcgactaaacccaggcaaagacgcctcgctgtttcgccagtccggcctgcaggcaaatgatttggcgattgccttaaatggcatcgatttacgcgaccaggagcaagcgcaacaggcgctgcagaatctggccgacatgaccgaaataacgctaaccgttgagcgggaaggccaacgacacgatattgctttcgcgctgggggatgaataa

SEQ ID NO: 138402 - DNA, 1956 bp, Enterobacter cloacae
atgctgcctgcgctgctgatattaaccccgctgctattttctccggccgccgcggaggaattttccgccagttttaaaggcaccgatatccaggaatttatcaataccgtcagcaaaaacctgaataaaacggtgattatcgatcccagcgtacgcggcactatcaccgtgcgcagttacgatatgctcaatgaagaacaatattatcaattcttcctcagcgtgctggatgtatatggcttcgccgtgatcaatatgaataacggcgtgctaaaagtggtccgcgccaaagacgccaagacctcggccgtgccggtcgccagcgcggccgcaccgggcgaaggcgatgaagtggtcacccgggtggtgcccctgaccaacgtcgccgcccgcgatctcgccccgctgctccgccagctgaacgataacgctggcgccggcagcgtggtccattatgagccctccaacgtactgctgatgaccggccgcgcggcggttatcaaacgcctgctgaccattgtcgagcgcgtcgacaacgccggggatcgcagcgtggtgaccgtgcccctctcctgggcctccgccgcggaagtggtcaaactggttaccgagcttaataaagataccagcaagtcggcgctgccgggctcgatggtggcgaacgtggtggccgatgagcgcaccaacgcggtactggtgagcggcgaaccaaactcgcgccagcgcatcatcgccatgatcaaacagctcgaccgtcagcaggcggtacagggtaacaccaaagtgatctacctgaagtacgccaaagccgccgatctggtggaggttctgaccgggatcagcagctcgctgcagagcgacaagcaaagcgccaggccagtggccgcgatcgacaaaaatattattatcaaagcccacggccagaccaacgccctgatcgtcaccgcggcgccggacgtgatgaacgatcttgagcgggtgatcgcccagctcgatatccgccgcccgcaggtgctggtggaggcgattattgccgaagtgcaggatgccgatggccttaatctcggtatccagtgggcaaacaagaacgccggcatgacgcagttcaccaatagcggtttgccgatatcgacggctatcgccggcgccaaccagtacaacaaagacggtaccatcagcagctcgctggccagcgccctcggctcgtttaatggtatcgccgccggcttctatcaggggaactgggcgatgctgctcaccgccctctccagcagtaccaagaacgatattctggccacccccagcatcgtcaccctcgataacatgcaagccacctttaacgtcggccaggaagttccggtattaaccggctcgcaaaccacctccggcgacaacatcttcaataccgtcgagcgcaaaaccgtcggcattaaactgaaggtgaagccgcagattaacgaaggcgatgcggtgctgctggagattgagcaggaggtatcgagcgttgccgactcggcctccagcaccagcagcgatctcggggcgaccttcaatacccggacggtgaataacgccgtgctggtcggcagcggcgaaacggtggtggttggcgggctgctggataaaaccgtcaccgataccgctgacaaagtgccgctgctcggggatatcccggtgatcggcgccctgttccgctccgacagcaagaaagtgtcgaaacgcaacctgatgctgtttatccgcccgaccatcattcgcgatcgcgatgagtaccgccaggcttcttccggccagtacaccgccttcaacaatgcgcaaactaaacagcggggtaaagaaagcagcgaagcgtcgctcagcaacgacctgctgcatatctatccgcagcaggagacccaggctttccgccaggtcagcgccgccattgacgccttcaatctcggaggccgcccatga

SEQ ID NO: 138403 - DNA, 1431 bp, Enterobacter cloacae
gtgctgctcagcgacggtgaacgctgcgaagcgctgtgccgccccgataccgccgcccgggcgctgctggaagcgcgccgcctggcggacgggccgatgcgcgtcagccgtctggcgccggacgcgttcgagaaagtgctggtgctcagctatcagcgtgattcggcggaggcgcaccgcatgatggccgacatcggcaacgagctcgacctctataccctcgccgaagagctgccggacaccgacgatctgctcgacagcgaggacgacgcgccgatcatccgcctgatcaacgccatgctcaccgaggccatcaaagagaaagcctcggatattcatatcgaaacctacgagcgccatctgcagatccgctttcgcgtcgacggcgtgctgcgggaaattctgcgcccgcagcggcggctggccgccctgttaatttcccgcatcaaggtgatggccagcctggacattgccgaaaagcgggtccctcaggatggccgcatggcgctgcgcatcggcgggcgagcaatcgacgtacgcgtctccaccctgccctccagccacggcgaacgcgtcgtcctgcgtctgctggacaaaaacagcgtcaacctggatctgctgacgctgggcatgccgcccgccctgctcgatcgggtcgatgcgctgatcgcccgcccgcacggcatcatcctggtcaccggtccgaccggctccgggaaaagcacgacgctctacgccgccctcagccgcctcgacgcccgggagcgcaacatcatgaccattgaagatccggtggagtatgagctggagggcataggccagacccaggtcaacgccaaagtcgagatgaccttcgcccgcggcctgcgtgccatcctgcgccaggatccggacgtagtgctggtgggcgaaatccgcgatggcgaaaccgcccagatcgccgttcaggcctcgctgaccgggcacctggtgctgtcgaccctgcacaccaacagcgcgctgggcgccatttcccgtctacaggatatgggcgtggaaccttttttactctccacctcgctgctggcggtgatgtcgcagcggctggtgcgccaactgtgcccacactgccgtcagccctggcaggcggatgccaacaccgcccggcagatggcggtcccggtcggcgcgcggctgtggcagcccaaaggctgtccggagtgtaatttcatcggctatcgcgggcgtaccgggatccatgaactgctgctaatcgacgatcgcgtgcgcgccgccatccaccgcggcgagaacgagatcaccctgatccagcagctggggccagcctggcaaaccctgcgtcatgccggacgcgacaaagcgctggcggggatcaccagctgggaggaggtgatgcgggtcaccgaacagcaaacgacggaaagcgtctaa

SEQ ID NO: 138404 - DNA, 1185 bp, Enterobacter cloacae
atggccctgtttcgctatcaggcgctggacgcgcagggcaaaacccgccgcggccttcagcaggccgactccgcccgccacgtggcgctggaagtgacaactgccgacccggcgcggcgactgtgggccggcggatcccttacccggcgtaccagcgccggtgatttagccctgctcacccgccagctggcgactctggttgccgccgggatcccgctggaaaaggcgctcgatgccgtcgcccagcagtgcgaaaagccgtcgctaagaacgttaatggccggggtgcgcagcaaagtgctcgaaggccactcgctggcggaggcgatgcgcggctatcccgcctgcttcgacgggctgttctgcgccatggtggcggccggcgaaacctccggccatctcgacggcgtactgaaccggcttgctgactataccgagcagcgccagcagctccgcgcccgcctgctgcaggcgatgatctaccccatcgtactgacgctggtcgctatcagcgtgatcgccattctgctctccaccgttgtcccgaaagtcgttgagcagtttgtccatcttaaacaggccctgcccttctctacccggctgctaatgagcctgagcgacatcgtgcgcagcgcgggcccctggctggcgctgctgtcgttactggcgctgctggcgctgcgctatctgctgcgccagcccgcccggcggctcgcctgggaccgggcgctgctgcgcctgccggtcatcggccgcgtggcccgcagcgtcaacagcgcgcgctacgcccgcaccttaagcattctcaatgccagcgcggtgccgctgctgctgtcgatgcgcatcagcgccgacgtcctcagcaacgcctgggcacgtagccagctggcggcggccagcgaatcggtacgcgaaggcgtcagtctgcatcgggcgctggaatccaccgccctgtttccgccgatgatgcgctacatgatcgcctgcggcgaacagagcggagaactgaccgccatgctggagcgcgcggcggagaaccaggaccgggagctgagcgcgcagatccagatggccctcagcctgtttgagcctctgctggtggtcaccatggccggcatggtgctgtttatcgtgctggccatcctgcagccgatcctgcaactgaacacccttatgagtatgtaa

SEQ ID NO: 138405 - DNA, 423 bp, Enterobacter cloacae
atgcaacggcaacgcggtttcacgttactggaaattatggtggtgatcgtcattctcggcattctcgccagcctggtggtgcctaacctgatgggcaacaaggagaaagcggaccgccagaaagtcgtcagcgatctggtggcgctcgagggagcgctggacatgtataaactcgacaatagccgctaccccaacaccgagcagggactgcaggcgctggtgaccgctccggccgccgagccgcatgcccgcaactacccggaaggcggctatatccgccgtctgccgcaggacccgtgggggaatgagtatcagctgttaagcccgggtcagcatggcgccatcgacgtcttcagcgtcggcccggacgggatgcccgacaccaatgacgatatcggcaactggaccctcgggaagaaatag

SEQ ID NO: 138406 - DNA, 516 bp, Enterobacter cloacae
gtgtctcagcgcggtttcaccctcctggagatgatgctggtcctgctgctgatcggcgtcagcgccagcatggtgctgctggcgtttccctccgcccgcacccaggaggccacacagatcctggcgcgctttcaggcgcaactggattttgtccgcgagcgcgggcagcaaaccggtcagctcttcggcattatcatccaccctgagcgctggcagtttatgcgcctgcagcctgccgacgatagcgccccggcggcggctgacgaccggtggggcaacgcgcagtggctgccgctgcaggccggacgcgtcactacggcggaaaccctcccgcgggccaggctgacgctgcgctttcccgacggccaggcgtggacgccgggcgagcagcccgacgtgcttatttttcccggcggtgaagtcacgccgtttcagctgcggattgacgccgcgacgggcatcaacgtcgacgcccagggcgacagccagccgctggcggcgcgggagcagccatga

SEQ ID NO: 138407 - DNA, 366 bp, Enterobacter cloacae
atgaagcgtgaagccggaatgacgcttatcgaagtgatggtcgcgctggtgattttcgccctcgctggcctggcggtgatgcagtccaccctgcagcagacgcgccagctcgggcgtatggaagagaaaatcctcgccagctggctggcggataaccagctggtgcagctgcggctggagaaacgctggcctgccctcagctggtctgaaaccaccgtggaggccgccgggacgcgctggtttgtccgctggcagggagtggaaaccgcgctgccgcagctgcgggcgctggacgtggaggtccggcggcaaaaaagcgatcccgcgccgctggccaccctgcgcacttgggtgacgccgccatga

SEQ ID NO: 138408 - DNA, 597 bp, Enterobacter cloacae
atgataactaggatgcgcggtttcaccctgattgaaacgctgctggcgctggctattctcgccgtcctcagcgccgccgccgtgatggtgctgcagaacgtcatccgtgccgatggcctgacccgcgagaaaagccagcagatcgcggccctccagcgcgcctttcgccagatagccgacgatgtcacccacatcattccccgtcgcgccagaaacagcgacacgtttttcttcgccggacgtttccagttgcagagcgacgactggggactggccttcagccgcagcggctggccaaacccgctggggatcctcccgcactcggagatccagaacgtcagctaccgtctgcgccagcagcggcttgagcgtctgagcttcgatcagcaggatccgctgaccggcagccagccgatggtccgggtgctgctgcgcgaggtaaccgcgtttcgcctgcggttttacgccgacgggcgctggcaggaaacctgggaccgcccgcagaggctgccgcaggggctggagatcaccctgacgctggcgaacagcggggagataacccgcctgtttttactcaccccgggaggcggccagtga

SEQ ID NO: 138409 - DNA, 987 bp, Enterobacter cloacae
gtgataaatcggcaacgcggcgtcgcgctcctgatggtgctgttcatcctcgccctgatgatgatcctcgccagcgccatgaccgagcgcaccgcggtcatgtatcagcataccgccgtgaccctcgataatttgcaggccagatggtacgccctggcggcggaaaatatggccgccgcgctgctgcaacgcgatgcgctggactcgcccagtcaaacgaatctggcgcaaacctgggcgcaggaggggcgccgttttaccctcgacgatggcgaaatccgcgccacgatccgcgacggacacgcctgctttaacctcaatgccatcaaccatcgcgcggatgaggctggcgacggaacgtcctacccgaccgacgtcttcgttcggctgctggcgctgctcggcgagccgccgctgcgcgccagccagatcgccgccgcccttggcgactggacggacagcgacggccagccgcggctgaacggggcggaggacgaggtctatatggcgcaaaccccgggctatctcgccgccaaccagccgatgcaggatgtcagcgagttgcgcctgctggccgggatggacgccgcgctctatcagcgcctgctccccttcgtctgcgtccagccggatgacgcgctgcaggtcaatgtcaacaccctgcgcccctcccaggccgccctgctggtggccctctttcccggcgatctgacgctgcaggaggcgcaacagctgctgcacaaccgcccgcgaaccgggtggagcagcgtcgccgcctttctcgcgcagccgacgctgcagaaaaccgataccacgcttgcccgtccctggctgacggtgcacagcgcacgctttatcgccgcttttaccgtggtgactggcaatctccgctttcagctgcacagcgtcctgcaacaatcggggcgcacgtttaccgtcgtccagcggcgatatggactctctatggtggtcgatgaacaagattaa

SEQ ID NO: 138410 - DNA, 726 bp, Enterobacter cloacae
atgttaagcgtaatcggaattggccctggctcgcaggcgatgatgaccatggaagccgtggaggccctgcaggcggcagagatcgtggtgggctacaagacctacacccacctggtaaaagcctttaccggcgacaagcaggtgatcaaaaccggcatgtgcaaagagattgagcgctgccaggcggccatcgagctggcgcaggccgggcacaacgttgcgctgatcagcagcggcgacgccggcatctacggcatggcggggctggtgctggagctggttaataagcagcagctggacattgaggtccgtctgatcccagggatgacggccagtatcgccgccgcctcgctgctcggcgcgccgctgatgcatgatttctgccatatcagccttagcgatctgctgacgccctggccggtgattgaaaaacgcatagtcgccgccggggaagcggacttcgttatctgtttctacaacccccgcagccgcggccgcgaaggacatctggcgcgcgcctttgcgctgctggcggccagtaaaagcgcagatacgccggtcggcgtagtcaaatccgccggacgcaaaaagcaggagaaatggctgaccaccctcggggagatggattttgccccagtggatatgaccagtctggtgatcgttggcaacaaagcgacttacatcgacaacggcctgatgatcaccccgcgaggctacgcgctgtga

SEQ ID NO: 138411 - DNA, 786 bp, Enterobacter cloacae
gtgaatcacggcgacgtgctggttatcgggggcaccagcgatgcgcgggcgatctgccagcagctggacgccgccgacgtgcgctacaccctgtcggtggcgacccctaccggcgagcggctggccggcgatatccgcgggcagatacgctgcgggcgtatggagtggcagcagatggcggagtggctcagagcgcagcgcacccgctgggtgatcgatgcctctcacccctacgccgaggtggtcagccagaatattgtgcgcgcctgcgccagcgtcggggttctgctcagccgctatcaaaggccggagcagctgagcgatctgcgccatccgctacttcacgtggtcggcgatctgaacgaggcctgcgcggtggctcgtcgcctcggcgagcggatcctgctgaccaccggcagcaaagatctggcggcctggcgggcgggactggcggagaaaacgctgctcgcccgggtgctgccggtgccggaggtggttcagcactgtagcgatctggggtttggcgtcggggagatcttcgccctctgcgggccgttcagcgccgaatttaacgccgccttttatcgccagtgccgggccgatgttgtggtgacgaaagcctcgggggcggaaggaggctatcaggaaaaagtacaaccctgtcttgatgcggggatcccctgcatcgtcattacccgtccggcgccgctggtgacgggcgatgaactactgcaaagccaggccgatttcactgcgcggttgacgcgctggctgtcggcgacttga

SEQ ID NO: 138412 - DNA, 795 bp, Enterobacter cloacae
atgaaaaaagcacttctggtggtgagctttggcaccagctatcacgacacccgcgaaaagaacatcgccgcctgcgagcgcgatctggccgcctgctgcccggaccgcacgctgttccgcgccttcacctcggggatgattattcgcaaactgcagcagcgcgacggtattcatatcgatactccgctgcaggctctgcaaaagctggccgagcagggataccaggatgtggcgatccagtccctgcacattatcaacggcgacgagtacgagaagatcgttcgcgaagtgcagagcatgcgcccgcgctttcagcgtctgacgctgggcgcgccgctgttgagcggtcatggcgattatgtgcagctgatgcaggccctgcgccagcagatgccgccgctggcggcgacggagcgagtggtgtttatggggcacggcgccagccaccacgccttcgcggcctacgcctgtctggatcatatgatggcggtgcagggttttccggcgcgggtgggggcggtggaaagctatcccgaagtggacatcgtcattaacgaactctcccgccagggcgtgaccggcgtgcatctgatgccgctgatgctggtggccggcgatcatgccattaatgatatggcctccgacgaagacgattcgtggaaaacccgcttcaatgccgccggtatccccgccacgccatggcttaacgggttaggggagaatccggcggtgcgggcgatgtttgtcgcccatctgcagcaggcgctgaacgacacgatggagaaagcagcatga

SEQ ID NO: 138413 - DNA, 711 bp, Enterobacter cloacae
atgagcggcaaactatacgccctgagcagcgggccgggggcggccgatctgatcaccgtgcgtgcggcgcggatcctcggccagctggatgtgctgtatgcgccagccggccgcaaaggcggcgacagcctcgcgctctccatcgtacgcgagtacctgggcgcacacacggaggtccgctgctgccattttccgatgagcgccgacagtgcggaaaaagaggcggtgtggaacgacgttgccgcggcgctggcccaggaggtggcggcgggcaggcaggtcgggtttatcaccctcggcgacgccatgttgttcagcacctgggtctttctgctgcagcggattggctgcccggagtggctggagattgtccctggcgttacctccttcgccgccattgccgcacgggcgaaaaccccgctggccatggagcagcagtcgctggcggtcatctcctgcaccgcgccggaagcggacattgccgcggcgctgcgccagcatgacagtctggtgctgatgaaagtctacggccgcttcgcccgcattaaggcgctgctggcgcaggcggggctgctggatgcggcgctgatgatgtcagaggccaccctgccgggcgagcagtgctggcgccgtctgcgcgaggtcagcgatgaccagccgctgccctatttctcgaccattctggttaacaaacagtgggaggaggcgtaa

SEQ ID NO: 138414 - DNA, 738 bp, Enterobacter cloacae
atgaatcaggtgaaatcgctgaagcagctttcgtatggggggctggcggccgctgttctgctgatcatcgtcccgcaggaggcgttcgccatgcatatcatggagggctttttgccgccgatgtgggcgctggcgtggtggctgctgtttttaccctgcctgtggtacggcctggtgcgcctgcggcgtatcgttcaggaagagagcaatcagaaggtgctgctggccctctgcggggcgtttatttttgttctttcggcgctgaagatcccgtcggtgaccggcagctgctcgcatccgaccggcgtcggtctggcggtgatcctcttcgggccgggcgtggtggcggtgctgggggcgatcgttctgctgttccaggcgctgctgctggcgcatggcggcctgaccacccttggcgccaacgggatgtcgatggcggtgatcggcccgatggtcggctatctggtgtggaagctggcctgtcgggcggggatccgtcgcgatgtcggggtctttctctgcgccatgctggcggatctgatgacctactttgtcacctccgtccagctcggggtggcctttcccgatccggcaaccggggcaggtggatcgatcgccaagtttatgggcatcttctgcctgacgcagatcccgatcgccatcgcggaaggtttgctcaccgtgatgatctacgatcagctaaccaaacggcggctgatcgccgcggagggacattaa

SEQ ID NO: 138415 - DNA, 282 bp, Enterobacter cloacae
atgaaaaagcccctgatcctgttggcgatggtggccgccctgatgatcctgccattttttattaaccacggcggcgagtttggcggctcggacggcgaagcggagagccagatccaggtggtggcgccggattatcaaccctggttccagccgctatatgaaccggcgagcggcgagattgagagcctgctgtttaccctgcagggctcgctgggcgcggcggtgattttttacattctcggatatgcgaggggcagacagcgccgtgatgaccgggtttga

SEQ ID NO: 138416 - DNA, 411 bp, Enterobacter cloacae
atgctgttagcgagctttcggttgggcgctttctcgatagggatttccgctccggggctggccgtggccggggagacctgctggcgcagcctggcagcgatggcggccacgctctggctggtgcttaatctgcctttcccacagctgattatcttgctcaagcgcggtcgcgtaccgcggctgttgacggagcagatcctgctgacctggcgcttcatttttattctgttggacgaggcgatggcgattcaccgcgcgcaaaccctgcgttttggctatggtagcgtgccgcagggctatcgctcgctggcgatgctggtgggactgctgttcacccgcgtcctcctgcgctatcagcagatgagcacggcgctggatatcaaattgtaccagggtgattttcacctctaa

SEQ ID NO: 138417 - DNA, 735 bp, Enterobacter cloacae
atgcttgccacaaccgatctctggtttcgctatcaggatgagccggtacttaaagggctgacgctggatttttcccgccatgcggtgaccggcctggtgggggccaacggctgcggaaagtcgacgctgtttatgaacctgagcggcctgctgcgcccgcagcagggggcggtgctgtggcagggagaggcgctgaattacagcaagcgcggtctgctggcgctgcgccagcaggtggcgacggtgtttcaggatccggaccagcaaatattctataccgatatcgacagcgatatcgcttttagtctgcgtaacctcggggtggcggaagaggagatcgcccgccgggtggatgaggcgttgaccctcgtcgatgcccaggggtttcgccagcagccgatccagtgcctcgatccacgcgggcgggcgcagatgatcgccatcatccgccgcattgtcgggcaggggcggcgcgtggtgatctccagccacgatatcgatctgatctatgaggtgagcgacgccgtttacgtactgcgtcacggcgaagtactggccgcgggggatcccggcgaggtatttgcctgcgcggagacgatggacagggcgggattgacgcagccgtggctggtgaaacttcatagcgaactggggctgccgctgtgtaaaaccgaggcggagttttttcagcggatgcacaacaacgcgataggcgcgataaaggaggcgtcatga

SEQ ID NO: 138418 - DNA, 1560 bp, Enterobacter cloacae
  misc_feature (1175)..(1212): n is a, c, g, or t
atgacgctggcagtgatgttgcagggcacggcttccgacgtggggaaaagcgtgctggtggcgggactgtgccgcatttttcatcaggatgggctgcgtaccgcgccgtttaaatcacagaatatggcgctgaactccggcattacgccggatggcaaagagatgggccgggcgcagattttccaggccgaagcggccgggattgcgccggatgtccgcatgaatccgattttgctcaagcccaccagcgaccgtcaggcgcaggtggtgctgatggggcaggtggcgaccagcatggatgcgatgagctatcaccagtacaagccgcgcctgcgcgagcagatcctcgcggtctaccagagcctggccggagagtatgaggcgctggtgctggaaggcgccggcagtccggcggagattaacctgcgcgaccgcgatatcgtcaatatgggcatggccgagatggcgcaatgcccggtgatcctggtggccgatatcgaccgcggcggggtgtttgccgcgatttacggcacgctggcgctgctgcagcctcaggagcgggcgcgggtgaaaggggtgatcatcaataaattccgcggcgatgtggcgctcctgcgctccgggatagagcaaatcgaggcgttgaccggggtgccggtgctgggcgttatgccatggcttgacgtggatctcgaggatgaggacggcgtcgcgctgcaggccgggaaataccatcgcaccgaccggcgcgatatcgacatcgccgtggttcacctgccgcatatcgccaattttaccgactttaacgccctggcggcacagccagacgtccgggtgcgctatgtccgcgatccgcaggcgcttgccgacgccgacctggtcattctcccgggcagtaaaaataccctcggcgatctgtgctggctgcgcgagagcggcatggcgcactcggtcgagcaggcccggcagcgcaaggtgccgctgctggggatctgcggcggctatcagatgctgggcgaaaccattatcgatgaggtggagtctggccttggcgcccagcccgggctgggggtgctgaagaccgtgacccatttcgcccagcacaaaaccaccacccaggtgcaggcgaccctggggtctgcgctcccggattggttagccgacgcggcggggcnnnnnnnnnnnnnnnnnnnnnnnnnnnnnnnnnnnnnncgcgtcagtggctacgaaattcatatgggcgagacgcgccgcgaggcaggctgcccgcccctgctgcagctgcataaagcggggcaggcagtgggcgacggggcgataagcgacgacggcctggcgttcggcacctatctccatggcctgttcgacagcgatgcctttacccgggcgctgctcaacggcctgcgccagcgcaaagggctggcgccgctggacagcgccctggagtatacccgctataaaacccggcagtttgatcggctggccaaggccatgcgcgaacatatcgccatcgataaaatttacgccatcatgcgccaacatcaggagcccctatgctga

SEQ ID NO: 138419 - DNA, 546 bp, Enterobacter cloacae
atgctgactctggttaccggcggcgcgcgcagcggcaaaagtcgccatgccgaggcgctgattgccgatgcgccgcaggtgttatatatcgccacctcgcaaatctttgacgacgagatggccgcaaggatccagcatcatcgcgacggcaggcccgcccactggcgcaccgccgagcgctggcagcagcttgatgaactgatcaccccggctatcgccccagcggaggcgattttgctggaatgcatcaccaccatggtcaccaacctgctgttcgcgctcggcggcgacagcgaccccgacggctgggattacgccgccatggaacgggctattgatgacgaaattggcgtgctgattgccgcctgtcagcgctgtccggcgcacgtcgtgctggtgaccaacgaggtggggatgggcattgtgccggagaaccgcctggcgcggcattttcgcgatattgccgggcgggttaatcagcgcctggcggccgcggcggatgcggtctggctggtggtctccggcatcggcgtcaaaatcaaataa

SEQ ID NO: 138420 - DNA, 1056 bp, Enterobacter cloacae
atgcaaaatttaaacacggttctgcgggcgatccccgcgccggacaccgacgccatggcgcgggcacagcaacacatcgacggcttactcaagccccccggcagcttcgggcgtctggaggcgctggcggtgcagctggcgggaatgcccggcctgggcggccagccgcaggtggcgaaaaaggccttgctggtgatgtgcgccgaccatggagtgtgggacgaaggggtggcgatttcgccgaaggcggtcaccgccatccaggcggcaaatatgacccgcggcaccaccggcgtctgcgtgctcgccgcccaggccggggcgaaagtgcatgtaattgatgtcggtatcgatagcgaaccgctccccggcgtggtgaatatgcgggtggcgcggggctgcggcaatattgcccgcggtccggcgatgagccgtgagcaggggcaggagctgttgctggaggtgatgcgctacacccgcgcgctggcccaggagggcgttaccctgtttggcgtcggcgaactggggatggccaataccacgccggcggcagcgatcgtcagcgttttgaccggcagcgatgcgcaggaggtggtcgggattggcgccaatctgccgctggcgaaggttggcaacaaggtggaggtggtgcggcgggctatcgccgtcaatcagcccgacccgaatgatggcctcgacgtactgagcaaagtcggtggtttcgatctgctggggatgaccggtgtcatgctgggggcggcgtcctgtgggctgccggtggtgctggatggctttctctcctacgcggcggcgctggcggcgtgtcagatagcgccggaggtgaaaccgtatctgatcccgtcccactattcggcggagaagggggcgcgtatcgcgttggcgcacctgggtctcgaaccgtatctcaatatgggcatgcgtctgggagaaggcagcggcgcggcgctggcgatgccgatcgtcgaggcggcctgcgcgatgtaccatcgcatgggcatgctggcggcaagcaatattgtgttaccgaaggggtaa

SEQ ID NO: 138421 - DNA, 411 bp, Enterobacter cloacae
atgcgcccattcgccgctcaggctgcgcacccgattgtgctgcaccatttccagcgtttgcgccagcgcctgctcttcgctctcaatcagcgcgcccggttggctacgcggcaccaggctgccgtcggcctgatagccgcgatcggcgaagacttcctggcgcgtcgtcaactgataatgctgtccggcgcggataagctcgctgcccgccagcccaaccagcaccaggtcggcgtcggcatcgcgcaccgcacgagcgatagcgtcggccaaaggcggctctttcgccgcctggttgtacaacatgccatgcggtttgacgtgccgcagctcgcccccctgggcgtgtacgattgccgccagcgcgccaatttggtacagcacctgggcgtagaccgtctctggcggtaa

SEQ ID NO: 138422 - DNA, 933 bp, Enterobacter cloacae
atgttgaaatttatccgcgccggcatgtatacctcggtacaggatggcggccgggaaggccagcgccagtgggggattagccgctgcggcgcgctggataaaccggcgatgaccattgccaatctgctggtgggcaatgcgccggaggcggcggcgctggaaattacgctgggtcagatcgatgtgcagtttacccgccactgctggttcgcgttgaccggcgccgcctgtgaagcgacgctcgacggcgcgccggtctggttgggctggcgaatggaggcgaaggccgggcagcggctggtgctgaaaaatcctcagcatgggatccgcagctatctggcggtcgcgggcggtattgatgtccctgaagttttaggttcccgctctaccgatctgaaagtcggtatcggcggaatcgaagggcgccggttgcaggatggcgatcaagtgaagattgggaaatcgtcccgccgctttagcgcctcgcgcggcgttaaacagctgccgataggcaatattattcgcgcgctgccggggccggagtatcacgaattcgacagcgtgtcgcaggagtctttctggcgctcgccgtggaagctgagtccgcagagcaaccgtatgggctaccgcctgcaggggcagccgctcaggcgcacaaccgaccgggaaatgctctctcatggcctgctgcccggcgtggtacaggtaccgcataacggccagccgattgtgttgatgaacgatgcgcaaaccaccggcggctatccgcgtatagcctgcattattgaagccgatatgtaccaactggcgcaaattccgctaggtcagccgatccatttcgtcccctgttcgctggaggaagcgctaaaagcgcgcgccgaccagcagcgctaccttgaacaactggcctggagattaagcgatgaaaattga

SEQ ID NO: 138423 - DNA, 657 bp, Enterobacter cloacae
gtgcagcgagcgcgttgttatctgttaggtgaaacggcggtggtcctggagcttgagcctccggtgaccctggagagccaaaaacgtatctggggactgacgcagcggttgaccgatcgcgaagaggtggttgaagtgatcccggggatgaacaacatcaccgttgtgctgcgtcgtccgcaggagatggcgtgggaggcgattgacaagctgcagcgctggtgggaagagagcgatgcgctggagccggaataccgtgagataagtatcccggttatctacggcggcgaggcgggaccagatcttggcgacgtcgcgcgccatagcgggttgagcgaaaagcaggtggttgaactgcactcttcggtggagtacatggtgtggtttctgggtttccagccggggtttccgtactttggcggcctgccggagcagctggcgatgccgcgtcgcgccgagccgcgcgtactggtaccggcgggatccgtcggcatcggcggatcgcaaaccggtatttatccgctggcgacgccgggcggctggcagctactggggcgcacgccgctggcattattcgatccaaaacgtgaagagccggtgctgctgcgttccggcgatcgcgtgcgctttgtgccgcagaaggagggggtatgttga

SEQ ID NO: 138424 - DNA, 744 bp, Enterobacter cloacae
atgaaaaatagcgaactggaacaactgattaacgacaagctcaatagtgcggccatcagtgacttcgcccctaacggtctgcaggtggaaggacgcgaaacggtgcacaagatcgtcaccggagtgacggcctgccaggcgctgctggatgaggccgtccgtctgcaggcggatgcggtgattgttcatcacggctatttctggaaaaacgaattgccagtgatccgcggcatgaagcgccgtcgcctgaaaaccctgctggccaacgatatcaatctctacggttggcacctgccgctggatgcccatccggagctgggcaataacgcgcagctggcgcatctgctggggattaacgtgctcggcgaaatcgaaccgctggtgccgtggggcgagctgtcgatgccggtttccggcctcgaactggcctcgtggatcgaagcgcggctggggcgcaagccgctgtggtgcggcgataccgggccggacaccgtcagccgcgtcgcctggtgtaccggcggcggccagagctttatcgacgccgcggcgcgctttggcgtggacgcctttatcaccggcgaagtgtcggaacaaactattcactctgcccgcgagcagggcctgcatttttatgccgccggccaccacgccaccgagcgtggcggcattcgcgccctcagcgaatggctgacggaaacgaccgatctggatgttacctttattgatattcctaaccctgcctga

SEQ ID NO: 138425 - DNA, 1479 bp, Enterobacter cloacae
atgcagacaacatcatcgcagccgcgggcgatctactacgtcgtggcgctgcaaatctgggagtattttagcttttacggcatgcgcgccctgctgatcctctatctcaccaatcagctcaaatatgacgataaccatgcctacgccctgttcagcgcctactgttcgctggtctatgtgacgccgatcctcggcggctatctggccgataagctgttaggcaaccggatggcggtcatgctcggcgcgctgctgatggccattggccatctggtgctcggggccagcgaaaccgctcctcttttcctgtacctgtcgctggcgatcatcgtctgcggctacgggttgtttaaatccaacgtcagctgtctgctgggcgagctgtacgaacccgccgatccgcgtcgcgatggcggcttttcgctgatgtatgccgccggcaatatcggctcgattatcgcgccgatcgcctgcggctacgtacaggaggagtatagctgggcgatgggctttgccctggcggccatcggcatggtcgcggggctggtgattttcctctgcggcaaccgtcatttccagcataccgctggcgtcaaccgccaggcgctgtgcgcgcgccgcttcctgctgccgaactggggctggctgctggtgttgctggttaccgccccgctgctgattgcggtactgttctggcaggagtggtcggtgtatgccctgatcgtggccacggccattggcctcgcggtactggcgcggatctacctgcgcgccgaaaccgataaacagcgcaaggatctgcgcctgatcgtcgtcctgaccgccttcagcctgctgttctgggccttcgcccaacagggcgggagctccatcagcctgtatattgaccgcttcgttaaccgccatatcatgagctacgaagtccctaccgctatgttccagtcaatcaacgccttcgcggtgatgctctgcgggatggtgctggcgtggctggtgaaagagagcgtgaacggcaatcgcaccgtgcgcatctgggggaaatttgccctcggtctgggcctgatgagcgccgggttctgcattttgaccctcagcgcccgctggtcggcggcctatggtcagtcgtccatgccgctgatggtgctgggtctggcggtgatgggctttgccgaactgtttatcgacccggtcgcgatgtcgcagatcacccgcattgagatcccgggtgtcactggggtactgaccggtatctatatgctgctctcaggggccatcgccaactatctggccggcgttatcgccgaccagacctcgcaggcgtcattcgacgccgccggagcggtgaactactccattgacgcctacattaccgtcttcagccagatcacctggggcgcgctggcctgcgtcggcgtggtgctggtcatctggctgtatcattcgctgaaagtcaggacccgccgtctggcggtggagtaa

SEQ ID NO: 138426 - DNA, 750 bp, Enterobacter cloacae
gtggaagggaccagtcgcctgtcgccctgcctggccatcggcgtgctgtccccccgccagtgcctgcatcgtctgctgacggaacatcccgccgcgctggacggcggagccggcgccacctggcttaacgagctgatctggcgcgagttttaccgccatctgatggtctactatccgaagctctgtaaaggacggccatttactgcctggacagataaggtcgcctggcgcgcagaggaggccgccctgcaggcctggcagcgcggggagaccggttttccgattgttgatgccgccatgcgccagctgaacgccaccggctggatgcataaccggttgcgcatgattgtcgccagcttcctgacgaaagatttgcgcctcgactggcgggcgggcgagcgctatttcatgagccagctgattgatggcgacctggcagcgaataacggcggctggcagtgggcggcttcaacgggcaccgacgccgcgccctatttccgcatatttaatcccaccacccagggcgaaaagtttgataaacagggggtgtttatacgtcgctggctgccggagctggcaaaggtgccggagaaggccctgcatcagccgtgggcgtgggcggataaacaagggatcacgctggactattcgcgcccgatagttgatcacaagcaggcgcggcaggagacgctggcggcctgggaggccgccagaaaaggaattactccaccgccagacggcgggtcctga

SEQ ID NO: 138427 - DNA, 540 bp, Enterobacter cloacae
  misc_feature (524)..(533): n is a, c, g, or t
atggccacccatctggtctggttacgcacggatttacgcattcacgataacctggcgctggctgccgcctgccgcgatccgcaggcgcaggtgctggcgctgtatatcgccaccccggggcagtggcgtgaacatcacctggcgccacggcaggccgcttttatcgccagccatttacagagtctgcatgccgcgctggcggaacggggtataccgctgtgggtagaagaggcggacgattttaccgccagcgtcgaacggctggccgatttttgccagcagcatcaggtcagtcacctgttctacaactatcagtacgaattcaatgaacgccagcgcgatgccgccgttgagaacaccttgcgcgacgtgatttgccagggcttcgacgacagcgtcctgttgccgcccggcagcgtactgaccggtggcggcgaaatgtataaagtcttcaccccgtttaaaaatgcgtttattcgccgtctgcgggacggactgccggcgtgcgtggcggcccctaagcnnnnnnnnnncgggtag

SEQ ID NO: 138428 - DNA, 207 bp, Enterobacter cloacae
atggcgttgtacaaagcttatcctgctcatattattttgctgcgtcgtgctttcgccgtcgtggctggcgtcgcagcgctgccggtgatgctgttctggaaagatcgcgcccgctactacagctggctgcaccgggtgtggtcgaaaaccagcgagcagccggtgtggatggcgcaggcggagaaagccgctcacgatttctattaa

SEQ ID NO: 138429 - DNA, 1680 bp, Enterobacter cloacae
atggctgcccagggatttttattattagccagctatctgctggtattgctggtgctggcgcgcccgctggggatgtgtctggcgagaatggtgaacgatatcccgcttcccggcctggccggcgtcgagcgcgtcctgtggcgcgtggccgggatccgcgccgaggagatgggctggctgcagtatttgctggcgctcctgctgtttaacgccctcggcggcctggcgctgtttgccctgctgatgctccagggcgtgctgccgtttaacccgcagcacctgccggggctgtcatgggatctggcgctcaataccgcgatcagctttatcagcaataccaactggcaggcttacgccggcgaaagcaccatgagttatctcagccagatggtcggcctgacggtgcagaatttcctctccgccgccaccggcatcgccgtggtcttcgccctgacccgcgccttcgcccggcagaaaatgtcgaccctcggcaatgcctgggtcgacctgacgcgcattaccctgtggctgctgctgccgctctctctgctggtggccctgttctttattcagcagggcgtgccgcagaatctgcaggcctaccagccctttaccaccctcgaaggggtgcaccagctgctgccgatggggcctgtcgcctcacaggaagcgattaagctgctgggcactaacggcggcggtttcttcaatgccaactccgcccatccgtttgaaaacccgaccgcgctgaccaatctcgtgcagatgctggcgatcttcctgatcccggcggcgctgtgcttcgccttcggcgaggtggtaagcgatcggcgtcagggacgcgccatcctgtgggcaatgacgctgatctttatcctctgcgtcgccgtggtgatgtgggcggagacccgcggcaatccgcatctgctgacgctgggtgccgacagcagcctgaatatggaaggaaaagagagtcgcttcggtattctcgccagcagtctgttcgcggtgatcaccaccgccgcctcctgcggcgcggtcaatgccatgcatgactccttcaccgcgctgggcggcatggtgccgatgtggctgatgcagattggcgaagtggtattcggcggcgtcggctcgggcctgtacggcatgctgctgttcgttatgctggcggtatttatcgccgggctgatggtcggccgcaccccggagtacctcgggaagaaaatcgatgtccgggaaatgaaaatgatcgccctcgccattctggtcaccccgacgctggtgttgctcggcacggcgctggcgatgatgaccgacgccggccgcgccgggatgttcaaccctggaccgcacggctttagcgaagtgctgtacgccgtcacctcggcggccaataacaacggcagcgccttcgctggcctgggcgcggcgacgccgttctggaacctgctgctggcgttctgcatgctggtcggccgcttcgccgtcatcattccggtgatggccatcgccggctcgctggtggcgaagaaaattcaaccggccagccccggcaccctggccactcacgacgccctgtttatcggtttactgatcggcaccgtgctgctggtgggcgccctgacctttattcctgcgctggcgcttggcccgctggctgaacacttttccttactttga

SEQ ID NO: 138430 - DNA, 1026 bp, Enterobacter cloacae
atggaacagctgccgcacctgctggtggaaggcatgctgatctccgcgttcgcgctgaaagcgtaccgtggctacatcttcctgcgcggtgaatacatcgaagcggctgaaaacctgcgtcgcgcgattgccgaagccactgaagccggtctgctgggtaaaaacatcctgggcaccgggtttgatttcgagctgttcgtgcacaccggtgccgggcgttatatctgcggtgaagaaaccgcgctgattaactccctggaaggccgccgcgcgaacccgcgctccaagccaccgttcccggcaagctccggcgtgtggggtaaaccgacctgcgtcaacaacgtcgaaaccctgtgtaacgtcccggcgatccttgcgaacggcgtggagtggtatcagggcatctcctcaagcaaagatgccggtaccaagctgatgggcttctctggtcgcgtgaagaaccctggcgtctgggagctgccgttcggcaccaccgcacgcgaaattcttgaagactacgcgggcggcatgcgcgatggcctgaaattcaaagcctggcagccgggtggggcagggacggacttcctgaccgaagcccaccttgacctgccaatggagttcgaaagcattggtaaagcaggcagccgtttgggtaccgcgctggcgatggccgtcgaccacgagatcggcatggtatccctggtgcgtaacctggaagagttcttcgcccgcgagtcctgcggctggtgtacaccgtgccgtgatggtctgccgtggagcgtgaagatcctgcgtgctatcgaacgtggcgaaggccagcctggcgatatcgagacacttgagcaactgtgtcgattcttagggccaggtaaaaccttctgtgcccacgcaccgggcgccgttgagccgctgcaaagcgcgattaaatatttccgcgacgaattcgaagcaggcatcaagcagccgttcagcaatacccattcgatcaatggtattcagccgaacctgctgaaagcgcgctggtaa

SEQ ID NO: 138431 - DNA, 129 bp, Enterobacter cloacae
atggtgatcagcgcgatccagcgcggcatcttcacgccaaagcgttcggtctgccagcacaggaagccgccgatgaagggaattaatattagccagggtagtaacatggcgatttacattcctttttaa

SEQ ID NO: 138432 - DNA, 321 bp, Enterobacter cloacae
atggccccacagcgcgatcaggaagtacatcggcaccagcatcatctcccagaagaagaagaacaggaacatgtcgatggccaggaacacgccgatcacgccgcccaggatccacatcaggttcaggtggaagaagccctggtatttttcgatttctcgccaggagcagagtaccgccagaacgccgagcagaccggtcagcaccaccatcagcagcgacagaccgtcaatcgcgaggtggatcgtgataccgaaacgtgggatccacggcagaatgaactcagactgccactgcggaaggcccgcagactgggtcagtga

SEQ ID NO: 138433 - DNA, 1905 bp, Enterobacter cloacae
atgattgttttctcctcgttacaaattcgtcgcggcgtacgcgtcctgctggacaacgccaccgctaccatcaatcctggccaaaaggtcggtctggtggggaaaaacggctgcgggaaatcgacgctgctatcgcttttgaaaaacgagataagcgctgacggcggcagtatgacctttcccggcaactggcagctggcctgggtgaatcaggaaaccccggcgctaccgcagccggcaatcgattatgtcattgacggcgatcgagaatatcgccagctggaggccgcgctccagcaggctaacgaacgcaacgacggtcatgctatcgccaccgtccacggtaagctggacgccatcgacgcctggacgatccgttcgcgcgccgccagcctgctgcacggtctggggttcagcaatgaacagcttgagcggccggtcagcgatttttccggcggctggcgtatgcgccttaacctcgcccaggcgctgatctgccgctccgatctgctgctgctcgatgaaccgactaaccacctcgatctcgatgcggtgatttggctggagaagtggctgaagggctatacgggaacgctgatcctcatctcccacgatcgcgattttctcgatcctatcgtcgacaaaattatccatatcgaacagcagacaatgtttgagtacaccggcaactacagttcgtttgaagtgcagcgcgccacccgcctcgctcagcagcaggcgatgtacgaaagccagcagcagcgcgtcgcgcacctgcaaagctatatcgatcgcttccgtgccaaagccaccaaggccaagcaggcgcaaagccggatcaaaatgctggagcggatggagcttatcgctccggcgcacgtggataacccgttccacttcagcttccgccagccggagagcttgcctaacccgctgctgaagatggagaaagtcagcgccggctacggcgagcgtataattctcgactccatcaagcttaacctggtgccgggctcgcgtatcggcctgctgggccgcaacggcgccgggaagtcgacgctgattaagctcctggcaggcgagctccagcccgtaagcggcgagatcggcctcgcgaaaggcatcaagctcggctacttcgcccagcatcagctggaattcctgcgcgccgatgagtcgccgctgcagcacctggcgcgtctggcgccgcaggagctggagcagaagctgcgtgattatctcggcggctttggtttccagggcgataaggtgagcgaagaaacccgccgcttctccggtggagaaaaggctcgcctggtactggccctgatcgtctggcagcgccctaacctgctgctgctcgatgaaccgaccaaccaccttgacctcgatatgcgtcaggccttaaccgaagcgctgatcgactttgaaggggcgctggtggtcgtatcgcacgatcggcacctgatccgttccaccactgacgatctatacctcgtccacgatggtaaagtcgagccgttcgacggcgatctggaagattatcagcagtggctcagcgactcgcaaaaacaggagtcccagagcggcgaggcgccaaaagagagcggcaatagcgcccaggcgcgcaaagaccagaagcgtcgggaagcggagctgcgcagccagacccaaccgctgcgcaaagagatcgcccgtctggaaaaagagatggacaagctcaacgcgcagttggccagtgcggaagaaaaacttggcgacagtgagctttatgacgcctcacgtaaagccgagctgaccgaatgcctgcagcagcaggccagcgcgaagtccgggctggaggagtgcgagatggcctggctggaggcccaggagcagctggagcgcatgcttcaggaaggctaa

SEQ ID NO: 138434 - DNA, 561 bp, Enterobacter cloacae
atgtctcagacagcgaaagtgttgctgctgtatgcccacccagaatctcaggattccgtggccaaccgggttttattagagccggccttacagttgccgaacgtcaccgtgcacgatctctacgcgcactatccggatttttttatcgatattgcttacgaacaggacctgctgcgccggcatgaggtgattgttttccagcaccctttatatacctggagctgtccggcgctgcttaaggagtggctggatcgtgtgttaagccgcggcttcgccagcggcgccggagggaacgaactggcgggaaagtactggcgcagcgtgatcactaccggcgagcctgagagcgcctaccgtcgcgatgctaatcgctatccgatgaacgatattttacgtccttttgaactgaccgccggcatgtgccgtatgcactggatgagccccattatcgtctactgggcccggaggcagcagccagaggagctgcgcagccgcgccctggcctaccgggactggttggccaaccccatcgccgccggaggtgtccatggcgggatctga

SEQ ID NO: 138435 - DNA, 201 bp, Enterobacter cloacae
atggcagtgcgtaaacgttttattgccggggcgaaatgtccggcgtgccaggcgcaggattcgctggcaatgtggcgtgagaataatgtcgatgttgttgagtgcgttaaatgcggtcatcagatgcgtgaggcagataaagaggcccgtgagcatgtacgcaaagaggagcaggtgattggcatttttcatcccgactag

SEQ ID NO: 138436 - DNA, 594 bp, Enterobacter cloacae
atgaaagtagcaaaagacctggtggtcagcctggcctatcaggtacgtacagaagacggtgtgttggttgatgagtctccggtaagcgcgccgctggattacctgcacggtcacggctccctgatttccggcctggaaaacgcgctggatggccacgaagtgggcgacaaatttgacgttgccgtcggcgctaacgacgcttacggtcagtatgacgaaaacctggtgcagcgtgtaccgaaagacgtcttcatgggcgttgatgaactgcaggttggcatgcgcttcctggcggaaaccgatcagggtccggtaccagtagaaatcactgaagttgaagacgaccacgttgtggttgatggcaaccacatgctggctggccagaacctgaagtttaatgtggaagtcgtcgccatccgcgaagcgactgcggaagagctggagcacggtcacgtgcacggcgcgcatggccacgatcacgatcacgatcatgaccatggtcatgacggttgctgcggcggccacggccacgatcatggtcacgaccatggtaaaggcggctgcggcggccacggtggctgcggctgccactaa

SEQ ID NO: 138437 - DNA, 219 bp, Enterobacter cloacae
atgcacgatagcacattagaaacgcgccttgcggagctggaaagccggctggcgtttcaggaaatcaccatcgaagacctcaacaaaaccgtgaccgcccacgagatcgagatggcgaagatgcgggagcatatgcgtctgatgatcgagaagctgaaggcgacccaaccctcccatatcgcctcccaggcggaagagacgccaccgccgcactattga

SEQ ID NO: 138438 - DNA, 831 bp, Enterobacter cloacae
atgaaatcactgtttaaagtaacgctgctggcgaccacaatggccgtcgccctgaatgcaccgctgaccttcgctgcagatacggcaacgaaggcagccccggcggctgagagtaaatcggcatttaaaaatgacgatcagaaatcggcctatgcgctgggcgcgtccctggggcgttacatggaaaactccctgaaagaacaagagaagctgggcattaagctggataaagcccagctgatcgccggcgtacaggacgcgtttgccgataagagcaaactgtccgaccaggagatcgaacagactctgcaggcctttgaaacgcgcgtgaagaccgcggctcagcagaaaatggaaaaagacgccactgagaacgaagccaaaggcaaagctttccgtgacaactttgccaaagagaagggcgtgaaaacctcaaaaactggcctgctgtataaagtcgagaaagaaggcgctggcgatgcgccgaaagatagcgataccgtggtggtaaactacaaaggtaccctgatcgacggtaaagagtttgataactcttatactcgcggcgagccgctctctttccgtctcgacggcgtgatcccgggctggactgaaggcctgaagaacatcaagaaaggcggcaaaatcaagctggttattccgccggacctggcctacggtaaaactggcgtcccgggcatcccggccaactctacgctggtctttgatgtagaactgctggatatcaaaccggcgccgaaggcagatgcacagccggaagccgcaggcgatgcgaaagccgcggacgcgaaagctgacgctaagaagtaa

SEQ ID NO: 138439 - DNA, 723 bp, Enterobacter cloacae
atgtccaggtcgcttttaaccaatgaaaccagcgagcttgacctgctggatcaacgtccctttgaccagaccgatttcgatattctcaaatcttatgaagcggtagtggacgggttggcgatgctcatcggttcgcactgtgaaatcgtgctgcattctttgcaggatctgaaatgctctgccatccgtatcgccaatggtgaacataccggccgccaaattggttcaccgattaccgatcttgcgctgcgcatgctgcacgatatgacgggcgccgatagcagcgtttccaaatgctactttacccgcgctaaaagcggcgtactgatgaagtcggtgacgattgccattcgcaaccgcgatcaccgagtgattggtctgctgtgtatcaacatgaatctggatgtgccgttttcccagatcatgagcacctttattccgccagaaacgcctgaagtgaactcgccggtgaactttgcttcttcggtagacgatctggtcgcccagacgctggagttcaccattgaagaggtgaatgccgatcgcagcgtgtctaacaatgcgaaaaaccgtcaaatcgtgctgaatctctacgagaaagggatcttcgatattaaagacgctattaaccaggtagccgatcgtctgaacatctccaagcacaccgtctacctctatattcgccagttcaaaagcggcgatttccaggggctggataagtaa

SEQ ID NO: 138440 - DNA, 387 bp, Enterobacter cloacae
atgcgttttgccctcacggtgaccggcccagcctatggcacgcagcaggcgagcagcgcctggcaatttgcccaggccgtgctgcaggaaggccatgagctggcgtgcgtttttttctatcgcgaaggcgtgcttaacgctaaccagttgacggcgcccgccagcgatgagttcgatctggtgcgcgggtggcaatccctccacgatgagcacggcgtcgcgctgcatatctgcgtggcggccgccctgcgtcgtggcgtaacggacgaacgcgaagcgcaacagctcgctctgcctggccacaatttgcagccgggttttaccttgagcgggctcggcgcgctagcggaagcggcgcttacttgcgatcggatggtgcagttctga

SEQ ID NO: 138441 - DNA, 360 bp, Enterobacter cloacae
atgaaacgtgtggcttttgtattttcctctgcgccgcacggcagcgccgctggcagggaaggcctcgatgccttattagcaacctctgcgctcaccgacgatattggcgtgttttttgtgggcgacggcgtgtttcagctgttacccgaacagcggcctggcgctgtgctggcccgcgactacatcgctacctttaaattgctgtcgctatatgatatcgaccagtgctggctgtgcgccgactcagcgcgagagcgcggcctggatcccgcgaccccgtgggtggtggatgtcgaatgcctggcgccggatgccctgcgcgcccgtctgcatgaatttgatgtgattttgcgtttctga

SEQ ID NO: 138442 - DNA, 288 bp, Enterobacter cloacae
atgctccatacgctcagtgtttccccctggcatgccgacatcgcagcgatgcttcgtttgatggagcacggcgacgatctggtactactgtctgacggcgtcaccgcggccatcgccgatggtcgcttccttgagatcctgcaatccgcccccataaccctatacgtgctgcaagacgacgttgacgcccgcgggctggctggtcaaattgcggacagtgtcggcagggttagctatactgatttcgtcagactcacagtcaaacatgccggtcagttggcctggtga

SEQ ID NO: 138443 - DNA, 585 bp, Enterobacter cloacae
atgtctgatcttatcctcgcgtcaacctctccctggcggcgcatgctgctggaaaaactgggtttaccgtttgaatgtgccgcgcctgacgtcgacgaaacgccccggcctgatgaatccgcacgtcagcttgtcacccgactggcgcaggccaaagcgcaaagtctggccacacgcttccctaatcaccttattataggctccgatcaggtttgcgtactggacggtgaaatcaccggcaaaccgcacaccgaggaaaatgcccgcaggcagttaagaaaggccagcgggtcaatcattaccttttataccggactggcgctgtacaactctgccagcggccatctgcaaaccgaatgcgaaccctttgacgttcactttcgccatctcagtgataaagagatagaaggctatgtgcgcaaagagaacccgctgcagtgcgccgggagtttcaagagcgaagggttgggcattacgctgttcgaacggctggaaggccgcgacccgaacaccctggtcggtttacccttaatcgcgctctgtcagatgttgcgccgtgaaaactacaacccgctgttaggctaa

SEQ ID NO: 138444 - DNA, 996 bp, Enterobacter cloacae
atgagtggcgctaatgcgtccggctatttagaatcgcgcaccatgaaaactgagaccccaaccgtaaaaatggttgccattgctgctgatgaagcggggcaacgtatcgacaactttttgcgtacgcaattgaaaggcgtaccgaagagcatgatttatcgcatcctgcgtaaaggcgaggtgcgggtaaacaaaaagcgcgtgaagccggagtataagctggaagcgggcgatgaagtccgtatcccgccggtgcgcgtggcggagcgtgaagaagaggcggtatcgccgcacctgcagaaagtggccgcgctctctgaggtgatcctctatgaagacgatcatattctggtgctcaataagccttctggtaccgcggtacacggcggcagcggcctaagcttcggcgtgattgaagggctgcgcgccctgcgcccggaggcgcgtttccttgagctggtgcatcgtctcgaccgggatacctccggcgtgctgctggtggcgaaaaagcgctcagcgctgcgttcgctgcacgagcaactgcgcgataaaggcatgcagaaagattatctggcgctggtgcgcggccagtggcagtcgcataccaaagtggtccaggccccgctgttgaagaatattctgcagagcggggagcgcatcgttcgcgtgagtcaggaaggcaagccgtcggagacgcgctttaaagtggaagagcgttacgaattcgccacgctggtgcgctgcagcccggtcaccggccgcacgcatcagatccgcgttcatacgcagtatgccggccatcctatcgcttttgacgaccgctatggcgaccgcgagttcgacaagcagctgtccgctaccggcttaaaccgcctgttcctgcacgcggcggcgctgaagtttacccacccggggagcggggaggtgatgcgcgttgaggcgccgctggacaaccagctgaagcactgtttacaggtgctacggaagagcaaataa

SEQ ID NO: 138445 - DNA, 3246 bp, Enterobacter cloacae
  misc_feature (73)..(82): n is a, c, g, or t
atgggcagcgcctgtacgacctggatatcgaaagccccgggcacgaacagaaaaaagcgaacatctacaaagnnnnnnnnnntgtacgacctggatatcgaaagccccgggcacgaacagaaaaaagcgaacatctacaaaggcaaaatcacccgcattgaacccagccttgaagccgcgtttgttgattacggcgccgagcgtcatggtttcctccccctcaaagaaatcgcccgcgaatacttccccgccaactacaatgcgcatggtcgtcctaatatcaaagacgtactgcgggaaggtcaggaagttatcgtgcagattgataaagaagaacgcggcaacaaaggcgctgcgctcaccacctttatcagcctggcgggcagctatctggtactgatgccgaacaacccgcgcgccgggggaatttcccgccgtatcgagggcgacgaccgtaccgaactgaaagaagcgctggcgagcctggagcttccggacggcatgggcctgatcgttcgcaccgctggcgtcggcaaatccgccgaagccctgcagtgggacctgagcttccgcctgaagcactgggaagcgattcagaaagccgcggaaagccgtccggcgccgttcctgatccaccaggaaagcaacgtcattgtccgcgccttccgtgactacctgcgccaggacatcggcgaaatcctgatcgataacccgaaagtgcttgagctggcgcgccagcatatcgccgcgctgggtcgtccggatttcagcagcaaaatcaaactgtacaccggtgaaatcccgctgttcagccattatcagatcgaatcgcaaattgagtccgccttccagcgcgaagtgcgcctgccttccggcgggtctatcgttatcgatagcaccgaagcgctgaccgcgatcgatatcaactccgcccgcgccacccgcggcggcgatatcgaagagacagccttcaataccaacctcgaagcggctgacgaaattgcccgccagctgcgtctgcgcgacctcggcggcctgatcgttatcgacttcatcgatatgaccccggttcgccaccagcgcgccgtggagaatcgtctgcgcgaagccgtccgtcaggaccgggcgcgcattcagatcagccatatttcgcgcttcggcctgctggagatgtcccgtcagcgcctgagcccgtcgctgggcgagtccagccaccacgtctgcccgcgctgctccggcaccggcaccgtgcgtgataacgaatcgctgtcgctctctattctgcgtctgatcgaagaagaagcgctgaaagagaataccaaagaagtccacgccattgttccggtaccgatcgcctcctatctgctgaacgaaaaacgtgccgcagtgagcgctatcgaatcccgtcagggcgatgtgcgcgttattatcgtgccaaacgacgaaatgcaaacgccgcactactccgtcctgcgcgtgcgcaaaggtgaagaaacctcaacgctgagctatctgctgccgaagctgcatgaagaagaaatggcgctgccaggcgacgatgagccggcggagcggaaacgtccggaacagccggccctggccgcttttgtcatgccagatgcgccgccagccccgatgctcgaagagcctgccgccgcgcctgtcgccgcagcggcaccggtcgcggccgccgcaccggcgcagcctggcctgctctcacgcttcttcagcgcgctgaagaatatcttctctggcgccgaagaggccaaaccggctgaagttcaggtcgagaagaaagcggaagaaaaaccggagcgtcagcaggagcgtcgtaaaccgcgcgccaacaaccgccgcgaccgcaacgaccgccgtgataaccgcgacaatcgtgacaaccgcgataaccgtgacaatcgcgacacccgtgcggacaatgccgagggccgtgaaccgcgcgaatcgcgtgaagagaaccgtcgcaaccgtcgcgagaagccgtcgcagaacgtggaagcccgtgatgttcgccaaacctcaggcgacgacgcggagaaagcgaaatcccgtgacgagcagcagccgcgccgcgaacgcacccgccgccgcagtgacgacaaacgtcaggcgcagcaggaagccaaagcgcagactcgcgaagagccggttgtgcaggagacggagcaggaagagcgtgtacaaactctgccgcgtcgtaaaccgcgccagctggcacagaaagtgcgcgttgagtccgctgtcgtcgagccagttgccgagatcgtgccagaagccgtagtggctgaagttatcgctccgcacagcgagccggtgaaagccgagctgccggcaggggtggagagcgttgcggaccaggacgaaaatggcgaatcccgtgaagcgaacggtatgccgcgtcgctcacgtcgctccccgcgtcacctgcgcgtcagcggtcagcgtcgtcgtcgctatcgtgacgaacgctatccgacccagtcgcctatgccgctgaccgtagcctgcgcatcgccggagatggcttccggtaaagtctggatccgctacccggtggttcgtccgcaggatcagcagccggaagaggttcaggttcaggacgccagcgtcgcgaaaactgtcgaggccgtagcggccccggttgccgtcgttgaaaccgttaccgctgcgccggtcaccgtcgagccggctaccatggaaccagtaaccgctgagccggtagtcgtcgagccggtagcggccgccgagccgctggtcgttgatgctgcggaagttgtcgcgccagcagccgtcgagccagcgcctcaggagccggtcaccgaagcaccggctgtcgaagcgcctcaggctatcgcgccagtgacgctcgacgccgagccggtggtggtagaacctgaagcggtggaaacgacgcctgtcgttgcagcgccagtggaaactatcgccccggtcgcagaaaccgtggagcaagcgccagtgaccgaagcggcccctgccgaaccggtcaaagccgagcccccggtgagcaagccggtcgtagtggcgggtcatcgccatgccaccgcgccaatgacccgtgcgccagctccggactatgtcccggaagcaccgcgtcacagcacctgggtgcgcccgccgttcgcctttgaaggtaaaggcgccgccggtggtcatagcgcgacccataaagccaccgctgaaccgactcgcccacagcccgtcgagtaa

SEQ ID NO: 138446 - DNA, 936 bp, Enterobacter cloacae
atgaaaagacaagagcgtatagaccgcattgagctgatgcgcacctatatccgcatcgtagaggccggatcgctctccgccgccgcagggcagatggacactacccaggcgaccgtcagccgccgcctgcagtcccttgaagggctgctgggggttaagctgatcctgcgcaccacccatgcgatgaagctcactgacgatggcgaacgctgttatcgtcacgcccgtcaggtggtggacgcctggctggcgctggaggatgacctgcgtattgccgacgatcggccggtgggcgttctgcgagtgcgggcgccccacgcgtttggccagcagcagctgctggcgccgctggtggcatttctacagcgccatccgcagctgtcggtggagtggatgctaaacgataataccgtcgacttcctcagcgataatatcgactgcgctattcgcgtgggggcggaggtggatccagcaacggtatccgtactgctggcggaagtgccgcgctgcgtagtggcttctcctgagctgctggcgaagtatccgccgttaacctcgctggaggcgttatcgggcctgccatggatcgccattaataccttttatcagcatgaggtacggctcaggcatcaggcaagcgggcagattgtctctacagcgattactccctgtctgagcactgacagtctttacgtcgcgcgcaacaccgcgctggcggggctgggggtggcgatggtgtccagctggacggtcgtggaggatattgccgccggacggctgattgagctgttcccgcagtggcgacccgcctcgctgccggttcatctggtttatccctgggcgcgctattacccgacacgcctgcgtaagttcctcgacctgatgcgggagatcatgccggatctcgccgggatgcagcgtctgcaaagcgcataa

SEQ ID NO: 138447 - DNA, 1215 bp, Enterobacter cloacae
atgacaccgacttccctttccacccgcgacgcaggctggattatcttcattctcgcactcggcgccggctttagcgtcgcctctatttactacgcgcagccgctgctgccgttgatgggcgccaatctccacctgactgtagaaggtatggggctggtccctaccctgacgcaggcgggttatgcgctcggcattctgttcctgctcccgctcggcgaccgccacgatcgccgccggctgatcctggtgaaaagcgcgctgctggcgctcctgctgctcctgtgcagcctcaccggccagctcagctcactgctggtggtcagtctgctgatcggtatggcggcgaccatggcgcaggatatcgtcccggcggcggcgatcctcgccccggcgggcaagcagggaaaaatggtgggcacggtgatgaccgggctgctgctggggatcctgctctcccggacggtcagcggcgtggtgggcgccgtattcggctggcgggtgatgtatcaggcggcggcggtcagcgtcgcgctgattggcctggtaatgtggcgcgtcctgccgcgcttcgctgtgcactcgacgctgagctatccgcagctgatggcctcgatggcgcatctgtggcagcgttacccggcattacgccgcgccgcgctagctcagggcgcgctctccatcgcctttagcgccttctggtcgacgctggcggtgatgctctccgaacactatcacatgggcagcgcagtagcgggcggtttcggtatcgccggggccgccggggcgctggccgcgccgcttgccggcggtctggccgataaatttggcgccggtaaggtgacacagatgggtgcggcgctggtcaccctctcctttgccctgatgtttatgctgccgctgctgccagtgcacgctcagttggcgctgattgccctgtcggcgattggctttgaccttggcctgcagtcaagcctggtggcgcatcagaacctggtatatggccttgagccacaggcccgcggccgcctcaacgccctgctgttcaccgtggtgtttatcgggatgtcgctggggtcggtgctgggcagtaagctgtacgtgctggccggctggaacggagtggtcacgctggcagtgatcactggcgcgctagccctggcgatccgcctgctggagaatgcccgcatcctcgctgccgaacgcagcgcatcataa

SEQ ID NO: 138448 - DNA, 618 bp, Enterobacter cloacae
atggactggggactgcgtctctgttttctgctggcgctgccgagcgcggtggcgctggggatcctcgccaaaccgctgaccgtggctctgttccagtacggcaaattcagcgcctttgacgcggcgatgacccagcgcgcgctggtggcctattccgtggggctgatgggccttatcgtggtgaaagtgctggcgccgggcttctattcccgtcaggacatcaagaccccggtcaagattgctattatcaccctgattatgacccaggtaatgaacctggcctttatcggcccgctgaagcatgcgggtctgtcgctgtccatcggcctggcggcctgcctgaacgccgcgctgctctactggcagctgcgtaaacagaaaattttcaccccgcagccaggctggttggccttcctgctgcgtctgattattgcagtgctggttatggccgcggcgctgctgggcgtcatgcatctcatgcctgagtggtcgctggggacgatgccgttccgtctgatgcgtttgctggcggtggttatcgccggggtggtagcctatttcgccacgctgctggtgctgggcttccgcgtgaaagagtttgtccgtcgcacggcgtaa

SEQ ID NO: 138449 - DNA, 366 bp, Enterobacter cloacae
atgatcggcagagtgacagaggccttaagcaaggttaaagggtcgattggaagcaacgagcgccatgctttgcctggcgtgatcggggacgaccttctgcggtttgggaaactgccactctgcctgttcatttgcatcattattacggcgattaccgtggtcactactgcgcatcacacgcgcctgttgaccgcgcagcgtgaacagctggttctggagcgcgacgccctggatattgagtggcgcaacctgatcctcgaagagaacgcgctcggcgatcacagtcgggttgagcggatcgcgaccgagaagttacagatgcaacacgtcgatccatcacaagaaaatatcgttgtacagaaataa

SEQ ID NO: 138450 - DNA, 942 bp, Enterobacter cloacae
atgatggaaaattataaacatactacggtacttctggatgaagccgtcaacggcctcaatattcgtccagacggtatctatattgatggtacttttggccgcggcggtcactcgcgcctgatcctctcccggctgggtgcggaaggacgcttgctggctatcgatcgcgacccgcaggcgattgctgtcgcgcaaaccatcgatgacccccgcttttccatcgtacatggtcccttttcacaactcgctgagtacgtcggcgagcgcaatcttaccggtaagatcgacggcattctgctcgatctcggcgtctcttccccgcagcttgacgatgcggaacgcggcttttcctttatgcgtgacgggccgctggatatgcgcatggatccgacgcgcggtcagtccgcggccgaatggctgcagacggctgaagaagacgatatcgcctgggtgattaaaacctttggcgaagagcgtttcggcaaacgtatcgcccgcgcgatcgtcgaacgtaatcgcattcagccgatgacccgcaccaaagagctggcggaagtcatcgccgcggcgatgccggtaaaagataagcataaacatcccgcgacccgtaccttccaggcggtgcgcatatgggtaaacagtgaactggaggagatagagcaggcgctaaaaagctcgctcagcgtgctggccccgggcgggcggctgtcgatcattagttttcattcgctggaagatcgcattgtgaagcgctttatgcgtgagcaaagccgcggtccgcaggttccggcgggaataccgatgaccgaagcgcagctcaaaaaactgggcggccgtgagttgcgagcactaggcaagttgatgccgggcgaagaagaggtggcagagaatccacgcgcccgtagttcagtgctgcgtatcgcagagaggacgaacgcatga

SEQ ID NO: 138451 - DNA, 459 bp, Enterobacter cloacae
atgttccgtggagcaacgttagtcaatctcgacagcaaaggccgcctggccgtgccaacgcgctatcgcgaagggctgatcgaggacgctgccggtcaattggtatgcaccattgacatccatcacccgtgcctgctgctttatccattgcctgaatgggaagtcatcgagcagaaattgtcgcgtttatcgagcatgaatcccgttgagcggcgcgtacagcgtttgcttttgggtcatgccagcgaatgtcagatggataatgccggccgcttgctgattgcgccggtgttacggcagcatgccgggctgacaaaagaagtgatgctggtcgggcagtttaataaatttgaactgtgggatgaaacgacctggtatcaacgggtcaaggaagatatcgacgctgagcagtccgcgaccggtgaactgtcggagcgcctgcaggatttgtccttataa

SEQ ID NO: 138452 - DNA, 1005 bp, Enterobacter cloacae
gtgaaactggatgaaatcgcccggctggccggtgtttcaagaaccaccgcgagctatgtgattaatggcaaagcgaagcagtaccgcgtaagcgataaaacggtcgaaaaagtgatggctgtggtgcgagagcacaactatcacccaaatgcggtcgctgctggcctgcgtgcaggacgcacacgctctatcggtctggtgatcccggatctggaaaacaccagctatacccggattgcaaattatctcgaacgtcaggcgcgtcagcgcggctatcagctgctgattgcctgctcggaggatcagcccgataacgagatgcgctgcatcgagcatctgctgcagcgccaggtggacgctatcattgtctctacttcgctgccgccggagcaccctttttatcagcgctgggctaacgacccgtttccgattgtcgccctcgaccgcgccctcgatcgcgagcacttcaccagcgtggttggcgctgaccaggatgacgccgagatgctcgcagctgagctgcggacgtttcctggcgaaacggtgctctatctcggcgcgctgccggagctgtcggtgagcttcctgcgcgaacagggcttccgtaaagcctggcaggacgatccgcgtgaggtgcattatctctatgccaacagctatgagcgcgaagcggcggcccagctgtttgagaaatggcttgaaacccatccgatgccacaggcgctgtttaccacctctttcccgctgctgcagggcgtaatggatgtgaccttgcgtcgcgagggtaaactgccctccgagctggcgatcgccaccttcggtgataatgagctgctcgattttctgcagtgtccggtactggccgtggcccagcgtcatcgcgatgtcgctgagcgggtgctggagattgtcctcgccagcctcgacgaacctcgcaagccgaagccgggtcttagccgtattcgccgtaatctctatcgtcgcggtagcctgaatcgccgctaa

SEQ ID NO: 138453 - DNA, 492 bp, Enterobacter cloacae
atgcgccggatattatcggtattactggaaaacgaatcgggtgcattgtcccgcgttatcggcctcttttcccagcgtggctataatatagaaagcctgactgtcgcgccgacggacgatcccactctctccagaatgaccattcagaccgtgggcgatgaaaaagcgattgagcagattgaaaagcaactgcacaagctggtggatgtcctgcgggtcagcgagctggggcagggggctcatgttgaacgcgaaattatgctggtgaaggttcaggccagcggctatggccgtgaagaagtgaagcgcaacaccgaaatcttccgcggacagattatcgacgtgacgccttctatctataccgtccagctcgccggcaccagcgataagctggatgcatttctggcctcgctgcgcgatgtcgctcggattgtggaagtggctcgctccggcgtggtcggcctgtctcgcggtgataaaatcatgcgctaa

SEQ ID NO: 138454 - DNA, 1725 bp, Enterobacter cloacae
atggagatgttgtcaggagccgagatggtcgtccaatcgcttgtcgatcagggcgtcaagcaagtattcggctatcccggaggcgcagtcctcgatatctatgatgcgttacatacccttggcggtatcgatcatgtgctggttcgtcacgagcaggcggcggtgcatatggcggatggcctggcgcgggcgaccggggaggtcggcgtggtgctggtgacctctgggcctggggcgacgaacgccatcactggcattgcgacagcctatatggactctattccgttggtgatcctctcggggcaggtagccacctcgcttatcggctacgatgccttccaggagtgcgacatggtggggatttcccgtccggtggtgaagcacagtttcctggtgaagcagaccgaagatattcccggcgtgctgaagaaagccttctggctggcggccagcggtcgccccggtccggtagtggtcgatctgccgaaggatattctcaatccggcgaagaagctgccttacgtctggccggacgcagtgagcatgcgctcgtataacccaaccaccagtggccataaagggcagattaaacgcgccctgcagaccctggtggccgcaagtaagccggtcgtctacgtcggcggcggggcgatcaatgcgcattgcgaacctcagctgcgcgagctggtggaaaaactgaagctgccggtggcctcatccttgatgggacttggcgctttcccggcgacacactcgcaggcgctggggatgctggggatgcacggcacctatgaagccaacatgaccatgcaccactcggacgtgatttttgccgtcggcgttcgctttgacgaccggaccaccaataacctggccaagtattgtccgaacgcgacggtactgcatattgatatcgatccgacttcaatctcgaaaaccgtgccggcagatgtgccgatcgtcggcgatgcccggctggtgctggagcagatgctggagctgctggagcaggaggaagcgcagcagccgctggacgacattcgcgactggtggcaacagatcgagcagtggcgtgcccgtcattgtctgcgctacgacgaccagagcgataaaatcaaaccgcaggcggtaattgaaactatctggcggctgacccagggcgatgcctacgtcacttccgatgtgggtcagcatcagatgttcgccgccctgtattaccccttcgataaaccgcggcgctggattaactccggtggtctcggcaccatgggctttggcctaccggctgcgctgggggtcaaaatggctctgccggacgaaatggtggtctgcgtgaccggtgacggcagtatccagatgaacattcaggaactctccactgcgctgcagtatgagctgccggtcctggtgcttaacctcaacaaccgctatctcgggatggtgaagcagtggcaggatatgctctattccgggcgtcactcgcagtcctatatggaatcgctaccggactttgtccgtctggcggaagcctatggccacgtcgggatccgcatcagcgagccgcaggagctggagacgaagcttgctgaagctctggagcaggtgcgccagcgtcggctggtgtttgtcgatgtgaccgtcgacggcagtgagcatgtgtaccccatgcagatccgcggcggcggcatggatgaaatgtggttgagcaaaacggagaggacctga

SEQ ID NO: 138455 - DNA, 951 bp, Enterobacter cloacae
atgttaattgaaactccagaatataaatcagcccccggacaggaagtcgttaaacctcaactacggatggttgatctcaatctgcttaccgtttttgatgcggttatgcaagagcagaatattactcgtgccgcccatacgctcggcatgtcacaacccgcggtgagcaatgcggtttcacgactgaaagtgatgtttaatgacgagctttttgtgcgctatggccgcggtattcagccgacggcgcgcgcctatcagctgtttggctcggtacgccaggcgctgcagctggtccaaaacgaattgccaggctccggttttgaaccgctgagcagtgagcgcgtgttccatctgtgcgtctgcagcccgctggataacatcctgacgtcggttatttttaataaagttgcagagatagcacccaatattcatttagtctttaagtctgcgctgaatcaaaatacggaacatcagctacgttatcaggaaacagaattcgtaatcggttatgaagagttccgtcgccctgagtttgcctgcgttccgttatttaaagacgaaatggtcctggtcgccagtcgcaaccatccgcgtatttccgggccgatgatggaggcggatatttatcgcgaggagcatgccgccgttgctctcgaccggtatgcctcatttagtttgccgtggtatgacacggccgataaacaagcgcgtatcgcctatcagggtaatgcgatggtcagcgtattaaacgtagtatcgcaaacccagatggtggccattgccccgcgctggctggcagatgaatttgctgacaagcttgccctgcaaatattacctttgccgttgaaggtcaacagtcggacctgctatctctcctggcacgaagccgctggtcgtgataaaggccaccagtggatggaagagctgttggtggacatttgcaagcgctga

SEQ ID NO: 138456 - DNA, 726 bp, Enterobacter cloacae
atgcatcagaagattaatgaagaaagtctcactttaggtaagggggagatcctgcttatcaaccagtttgccagacacgaaattgaagccgcagggcagaatgatattatcatcaattttattattaagaccgaatttttcggtcgactcatgtccctttttgacgaaaataacatcatttcccgctttatcctttcagcaattaatggcagaaaaaaacatggagagcatattcactttaaagtgggggaaatcgacgcaattcaaaacattatgcatgtcatcattagcgagatctacagtaataaccacttaaaagagatacgcgtcaatttcctggtgggactgttgatgaccgaactgctctcgaatgtgcaagccagcgattaccatatcaacggcagttacaatgaatcacttgccatggccgtgttgagatatattgataccgattataaaactgccagcctgaaagagatctcctgtcgtttaaatcagcctaattataaggtgagtaaactgataaaagacttcactggtaagaactttagcgatttgttggttgaaaaacgcctggatgtgttgatccatctccttaagcatactaatcactctattattgatgttattaatatgacgggttatgaaaacgcctcgcattgttataaggtatttaaagagaaatataatatgagtattaaggagtatcgtgatctgaactcctga

SEQ ID NO: 138457 - DNA, 1284 bp, Enterobacter cloacae
atgaaacccagaattattatttcaggtgttatctcatgttttctgcctgcgaccttatgccatgcggccaatctaagcgacgacggcagcttccagttaaatggatatggcatggtggctggagattttcagagcgaactaaaccgtcacaaaaacatgtcgttgcataccgatcccaccggacctaatcaggatcctcgtggcaaaatgggcgatttgggaaacagtttctggcacgattactggacatcgctggctatcactaaaaaatggcaggggctggcttctcccgagcaatgggctgattacacctatgaaatggtgggttacggcgataaaacggtagaaacggcacagaattatgggcgctttggtgggctctcttttcttcccgagggcgcaaacatttgggctgggcgtcgttacctcgatcaacgtattaatatcttcgcttacaataccaaagaagtacatattgattccggcctcggttataacagtaagaattttgatttgaacgttggtaccgaccagatcgactggtccagcgataccgcgccgcaggcgatagaaggctcgcggcgcatcgttgatatggcttatcgtatcgatcagacagagctgggtatgacctatgttaaagaaattgatgacccattgggcactggcaagcagaaagcaattagtttttccgcgaaatacagcatgccgtctttttggggagtggcaaagggacaatcgacagtcaaattacagtatggtaaaggggttattgctccttatctgaacaccagtcgtattaccgtccttagcgaagagggcgattgttcaatgcgtttttccaccgacggaaacttgacgttatttgatgattttgccgtctcgccggctttcatctatgaatataccaagcgtgaaaaaactgctgaccgaaccacctttatacctgatacaggttattcagggggggacatgacctatggttccgcaaatgaaaccgggatctttaccggcgtaaacgttaaacaaaatattcatcaccaaaatctctccatgttgtatgaagtcatggtgaataacactatcaataaaaatggcgtcgaaggtgccagcggcgtcggctacaaaattgccgccggcccggccctgcaactggatgttttaccgtatgtcgcgccgattctcagtttgacggttacctacgcaggcggggacaaagaggtcacgttattgccggaagactcggagtggcgagtcgggtatcgaatggaagtctggttctga

SEQ ID NO: 138458 - DNA, 966 bp, Enterobacter cloacae
atgaacaaacacgtcgctgctatgctgacgatgcttattattccgtctgcttttgcgcaaacacctttaacagacagcaaaactatcgttattaaacctagcgctctggccgtcgagatggtgcctgatattgcctattcatttacgcaaaatatcatgggacgaccgctccagttaacgatggatttgctcaagccttatgctgataaaccgttacccgcagtagtatttattaccggcggcggctttctcgatgcgcccaaatcaaaatttatcggtcagcgggtcgatattgcccgggccggttacgtcgtcgccagcattacctatcgggtcgtacccaatgtgactttcccgggcatggttgaagatgcgaaaacggcggtcagatttttacgcgccaatgctgaaaaattaggcatcgatcccaaccatatcgctgtgatgggcgagtcggcgggtgggtatttagccgccatggtgggtaccaccagcggccataaggaattcgaccagggagagtattcaaatcaaagcagtgatgtgcaggcggtggttgatctctatggcctgtccgatctgacgaaagtcggggctgacttttctgcggacattcaaaaagcgcatcagtcaccggccataccagaggcgatgctggttaatggtattccctggcaaggcggtggcgcgatctccgcctatcccgaaaaggcgaaacgggctaatcccatcacctggatttcgaataaaacgccgccttttctgctaatgaacggcgatgccgacaatgtggtttcacccagccagtcaacgcttttacacgaggcgctggtagcgaaaaaaataccgtccacccattacgtggtgaaaggggcggatcacgcaggtttgatgtggtatcagcctgaagtatcaaaaattattattaattttttagacgaaaatctcaaagataagcatcaataa

SEQ ID NO: 138459 - DNA, 324 bp, Enterobacter cloacae
atgaaaaaaatatttttgtgctgcgctgccggcatgtcaacgagcatggtaatgaataaaatgaaacaagcggccgcggcgcaaggcattgctgtcgatattattgctgtttcaatggatgattttgatcgcacgttaccaaattacgattgctgtcttttagggccgcagattaaatataaattcgaagaatttaacaaaaaggccgctgcggtgggcaagagagtcgccgttatcgatagcatggattacggcatgatgcgtggcgataaaattcttgctgcggcgctggcgctgctggatgaaccttcacttaacaagtag

SEQ ID NO: 138460 - DNA, 315 bp, Enterobacter cloacae
atggatatggaagcaaccgttatggaactcatcattaacgccggtgagtcccgcagtctggcgatgcaggcgctgcaagccgccagaaaaggagtatggcaggacgttgataggctgatgcaggacgccgcagattccgcaaaacgcgcgcatgatgtacaaaccatgcttattggtatggatgagggctgtggcaaagtaccggttaatcttattctggtacatgcccaggatcatataatgacctctatgcttgcgcgggagttgatcgcggagcttattgaggttcagcgccagctgcaacatcgcaactga

SEQ ID NO: 138461 - DNA, 1407 bp, Enterobacter cloacae
atgtctaccacccaggttctcggcgaaacgccctatgcttcgctaggacaaccgcacgccagcttaaccggacgcattgatgcgctgcccgcctcatttgggttatggtcgtttattaccctgctctcacttggcggcttctttgagctctacgatctcttccagaccgggtatatcagcgcgggcctgctggcggagggcattttccacaccggacaggcgggcatcttcggcatcgccgaccaggcggccttcgcctccgccacctttatggggctgtttatcggcgccagtctgctggcgccgctggcggacaaactgggccgccgcctgacctttatggtggcgctcgcctggtacggtcttttttcgctgctgatggcgacgcagagtagcgcggaaggggtgatcttcttccgctttctggtggggatcggcctcggcattgagctggtgaccattgatacctacctcagcgaatgggtgccaacccatctgcgcaataaagcctttgcctttgccttcttcatccagttcctctcggttccggcggtggcgctgatgtcctggatgctggtgccgaccaccctgttcggcctcagcggctggcgctgggtgatcatctttggcgcactgttctcgctggcgatctggtttatccgcaaaaagctaccggagtcagcccgctggctggaaagcaaagggcggcatgatgacgcgcatacggtgatgtgtgagatggaagcccgctgcggcctgacgccgtcgccgaagcatgcgcatgcggcacagagcgtcgtcaaacgcggcaccttccgcgaaatctgggcgccgcagtatcggcagcgcaccctgatgctgatggtgatgaacttcttccaggcgatcggtttcttcggctttggcaactggctgccggcgctgctctccggtcagggcgccagcatcacccatagcctgctgtacgccttctttatcaccctcgcctatccgctgggctgtctgttctgcacccgcttcgtgcatcgctttgaaaacaagtggcagattgtcctctccgcgctgatgaccgttatcttcggcaccctgttcgctctgcaaaacagtccgatcctgttggtgatctgcgggtttatgatcacctggtccaacgcctggctgaccatcagctaccacgcctaccaggccgaggtcttcccgacccatattcgcgcccgcgccgtcggcttctgctactcgttcagccggctctcgaccgcggtgaccagcattctgatcggcattattctgcaatacgccggcacgccgggggtgattagctttatcgtcgtcagtatgctgatggtgatgctgtcggtggggatcttcggcccgagaacgcgcggcattcgtctggagaatatctga

SEQ ID NO: 138462 - DNA, 681 bp, Enterobacter cloacae
atggtatttccttatatgacacatttactcgcggcaatgttgttgggggcgctgatcggcgcggaacgacagtggcggcaacgtatggccggtttacgcaccaatgccctggtggccaccggcgcggcggtgtttattctcagcgcgatgtcggcctcgccggacagcccggggcgtattgcggcgcagatcgtctccggtatcggcttccttggggcaggggtgattatgcgcgatggcatgaacgtccgcggcctcaataccgccgccacgctgtggtgttcggccggtatcggcgtactctgcggcctgggacagttctggaacgcgacggcggctacgctgattattctgtgcgccaatatcctgctgcgcgaggcggcgcagcgcattcatgccttgccgggggccggtgacgaagagaaacgctatgtcttacgcgtcacctgtctgcgcgaacatgaaaatgccgtgcgtcagctgttgctgaatattgcgcagcagcagcggtttaccctgcagggattgcagtcggcggcggcggacacagcggaccatctggagatttgcgcgcagctgattagccataagcagcaccaaaaaacgctggcgcaaattatggcgcagatgggcgttcagcagaacgtcacatcggtgcactggcgtgtcggagaggcgtag

SEQ ID NO: 138463 - DNA, 1062 bp, Enterobacter cloacae
atgttaaataatggatgtgtaccctcggaatctggtcccacagaggtgacggctgattttcgttttacccgcgtgatggccgagcaggcggtgcgggcgcgtctgacgctggacgacgatcagctgtcactcatcgcccgccttgacgccctcggtcagcagttggtgtccacgacaggcaggccgcagggggtgtacgtctggggacgtaccgggcgagggaaaagctttatcctcgaccactttttcgccagcctgccgctcgccgccaggcggcgggtccattttcatcacttcttccgcgaactgcaccagcggctgaatgcccccggagcgcccgacctgcagacggtgatgaggcagatgacatccggttgccgcctgctatgcttcgacgaatttcatctgcacgaccccggcgacgccatgctgattaaagccttgctggaacacctctttcaacacggtatcgtgctgctggccacctcaaactacccgccggagatgctgctgcccaatccgctgtatcacgatcgctttttaccgtcgatcgcgctgatccgcgcccatctaacggtggtggcgctgaacggcgaggaagattatcgcgaacggcatctgagccaggataacgccttctgcagcgggcggatgtgggttaatccgaatgcacaacagcgtcagctgtatgacctgccgtcgctgcctggcgaaccggtttcgctgacggtaggctatcgcacgctgctggcggccgcggcgtcgcccgcgttgctgcacttcacctttacccagctttgtcaggccgccacggcggtgatggactatctgacgctctgcgaaagctatgccgtctggctactggacgaggtgccgccattggctacggtggggccggcggcccagcagcgctttatcaatgtgattgatgtgctgtatgaaaagcagatccgcctgctgctggtgacccgctgcgacctggagatgctggtggcaggggtggaactggaggatattcaacgaacgcggagtcgcctgcaacagctgccgcgggcggtataa

SEQ ID NO: 138464 - DNA, 654 bp, Enterobacter cloacae
gtgctgccgaccctgcaggcgatccagcgcgcctccggcaaagcgtcgctggccgatattatcgtgctggccggcgtggtcggcgttgagcaggcggccgctgccgccggcgtcagcgtcaatgtgccgtttaccccaggccgcgtcgacgctctgcctgagcagaccgacgtcgagacgtttgatctgctgcagccgctggcggatggcttccgcaactatcgccgtatcgaaggcggtgtctcgacggaaaccctgctgatcgataaagcgcagcagctgacgctaaccgccccggaaatgaccgtgctggtcggtggcttgcgcgtactgggcgcgaactacgacggcagcaaacacggggtgtttaccgaccgcgtcggcgtgctcagcaatgacttcttcgttaatctgcttgatatggctaccgtctggaaagcggccgatgataacgcggagctgtttaccggcagcgaccgtaaaaccggcgaagcgaagtacagcgccacccgcgtggatctggtgtttggctccaactcggtactgcgcgccctggcggaagtgtacgcctgcgccgacgggcagcagaagctggtgcatgacttcgttgccgcctggaccaaggtgatgaacctcgaccgcttcgatctgtaa

SEQ ID NO: 138465 - DNA, 903 bp, Enterobacter cloacae
gtggtcaatcatttcctgagcgtcttgttcagtgattttgcctgctttcaggtcacgttcgatgtacgcatccaggaaggtggatacgcggccgaaggacattgctgcaccgttctgagacttaacagcggccaggtagccgaagtaggtccactggatagcttcctgagcgttggtagcaggaccagagatatcgcagccgtatttagccgccatctctttgatctgacccagcgcacggtgctgttcagcgatctcttcacgcagacggatagtcgcttccaggtttacgccgttttccaggtcagactggagagagacgaactgcgcgtatttgtctttcatcaggaagtcgataccgtacagcgcaacgcgacggtagtcaccgatgatacggccacggccataggcatctggcagaccggtcagaacgccagatttacggcagttcagaatgtctttggtgtaaacatcgaatacgccctggttatgggttttgcggtattcggtgaagatttttttcagcattgggtccagctcgcggttatacgctttgcaggaaccttcaaccattttgataccaccgaacgggatgattgcgcgtttcagtggtgcttcagtttgcagaccaacgattttctcaagggctttgttgatgtagccagcatcgtgagaagtgatggtagaagcaacggaggtgtcaaaatcaactggcgcgtgagtgcggttttccagtttaacgccttccattacgctgtcccacagcttggtggttgcgtcagtcgcaccagccaggaaggattcgtcaccttcatacggggtatagtttttctgaatgaagtcacggacgttgacttcattctgccagtcacctttcgtaaaaccttcccaggctgtggctaa

SEQ ID NO: 138466 - DNA, 312 bp, Enterobacter cloacae
atgacggagtttgagttctttatggagcttcgcataagcagcgttgaacagctggggcaggtgcgtctggcgattatggaaacgaacggacaaatcagcgtctattactatcccgacgatgaggtgaagcccggcctgtgcatcctgccggatatgctcatcgagcgatacaaaactgtacctgaagcgggcgagtatgcctgcataaaatgtagtcatgtggtggttatgcaggcgggcgatcatcaattatgcccccgctgtacgaatccagaatggacgaaggttagccgggctaaacgcatcacctga

SEQ ID NO: 138467 - DNA, 384 bp, Enterobacter cloacae
atgttgaagatgcagatcatccaaaaatgcggactcacaaagagctcgagacgcgcgctgcggcgcgcttcctgcgaggttttatcgctgctcgctctcgcctccagttgtacgccgcgcagcccgatgcgtacaaaaatcagcaccggtatcgtcagcatcgccatcacgaaaaatgtgctctgccagccgaaggtattgagtagccaaattgacagcgggaaacccagcgccgcgccaaccggcgtgccgagcagccacagcatggtggcgcgggcctgtagccgctgcgggaaggtgtggcgcaccacggcgaacgccaacggaaacagcggcccttcagcaatgcccaacaggatgcgcagcgtcaccatcagcgcgtag

SEQ ID NO: 138468 - DNA, 1197 bp, Enterobacter cloacae
atgacggcgcggatagtcattatcggcggtggccaggctggcggctgggcggcgaaaacgctgcgtgatgaagggtttagcggcgagatttgcgtggttgccgaagagcaatgggatttttacgagcgcccgccgctgtcgaaagcggcattgctggaggccgaaccggcgctgccgcggttattcagcgccgaggtgcagcaggcactggatctgcgctggtaccgcccgctgcgcgcgaaatcgatcgaccggcaaaataaaaccctggcgctgagcaacggcgaaacgctggcgtacgacctactgctgatcgccaccggcggccgcgcgcggctgccgtccgaggcctgggggcagcatcctcaggtatataccctgcgccactggcaggacgcgcagcgtctgaagcagcggttggcatcggcaacgcggctggcgatcgtcggcggcggctggattggcctcgaaatcgccgcctcggcgcgcaaaagcggcgtagccgtgaccctttatgaacagcagccggcgctgtgcatgcgctcggtcagtatggaggtctcgcaggcgctggatgagttgcatcgcgggcagggcgttgatattcgccgcggctgcggcgcgctggagctggaagatgataacggcttgccgacgctgcactgcgacggccagcgggaaaccttcgatgcggtagtggtggggatcggcgtcgatctgaatctcgaactggcgcgcgatgccgggctcactgtcgatcgcgggattgtcgttaatgcccaggggcgcagtaacgatccggcgattttcgccgctggcgatgtcgcccagcaccatcagtacggtctgtgcattcagtcgtgggcctttgcgcaaaatcaggccatcgcgacagcgaaagcgatgctcgatccacaggccagcggctacgacgaggcgccgtggctgtggtcagatcaatacgatcgcaatgtccagatcctcgggatcccgcaagcgggcagccggaccattgtgcgtgacgagccgcagggcgcgatctacttctccctgaatgccgatggacgcttaactcagctggtggccttcaataatgcacgtatcgtgaagctggcgaagcgctggatggcggcgggaagggatctctctaacgtcccgctcgctgacccgactttctcgctgatgtcattgcgataa

SEQ ID NO: 138469 - DNA, 927 bp, Enterobacter cloacae
atgagtattaccggaattgaaaagctggaatttggcgtagacgacctgaaccacagcgctaaattcatgcgcgattttggcctgaccggcgacgccagcggccgcgcgtttaccaccctcagcggcgcgcgggtcgaacttaacccgaccgatgccgccgacctgccgccagcctttgaggcgggcaacactctgcgtcgcatgacctggggcgtggcggatcgggcggggctggatgcgctacgcccgaagctggaacgccagcccgctttccgtgaaatcgacggtgcgctggaatgccgcgatcccaacggtatgacgctgcgggtgcaggttagccagcaaacggcggttgaactgaacgttgaaccgatcaaccagtggggcgatgtgcgtcgcatcgacaccccgagcccggtctacgaccgcgcgcagccgattaacgtcggccacgtggtgttcttcgtggaagaactggcggcggtggaaagtttctatcgcgaagtactcggctttcaggtgtcagaccgctacatcaatcgcgcggtgttcctgcgctgcggcgtgcgcggcggacaccataacctcttcttattgcagttgcccaaccgcaagcgcgggctaaaccacgtcgcgtttaccgtgcgggatattcatgaagtgatcggcggcggcattgcgatgaataaaaacgcgtggagcacgtttatcggtcccggccgccatccggtctcctcggcctacttctggtatgtcaacagcccgaccggcggcgcttttgagtactacaccaacgatgactatctgacggaaaactggcagccgcgcgagcttgagcattcactcgtgtcctttaccgaatgggcggtggaaggcggtatcgatcacgatacccgtcgccagcagaaaaaaccggaggcggtatga

SEQ ID NO: 138470 - DNA, 789 bp, Enterobacter cloacae
atggcgaacgatcaggaagtgaagtatctggtgcccggtcttgagcgcggtttacaactgctgctggcgtttggcgaacagcatcgcgatctgacctttgccgagctgcatcggctggtggatatgccgaaagcgaccgcctatcgcgtggtgcagacgctggaatatatgggctttctcgagcgcaacgcccgcaccaataccttttcgctgggcatgaacgtactgcgtctgggctttgaatatatcgcctcactggatgtcgctcaggtgggtcagccggtcatcgagcaactgcgcgatatcagccagtgcagcagccatctggcgatccgcgacggccgcgacattatctacatcgcccgcgtcagcgccgccggttcgcgtatcaaccaggtcagcgtcggaacgcggctaccggtgcactgcacctcgcttggccgcatgctgctgaccgatgtttcccgcagcgagtttgaacaattgttcccgaatgaacgtctgccgggcaatacgccgggccagctgtacgaccgcgaagcgctgtggcagatggtgcagcaggataaagcccgcggctacgtgattggcgaatcgttctatcgccacggcatctcatcgattgtctatccggtctttaaccgcagcggccgggtggcggcggtcgtcagcattctggtgccgtcggacgagatcccgcaaagcgatcgcgaacggttgcagaacgacgtcagtatggcagcggacaaaatttccggcttcctcggatatttgtcacaggcaagttaa

SEQ ID NO: 138471 - DNA, 750 bp, Enterobacter cloacae
atgaacggcctgctaaccggtaaacgtattgtcgtcaccggcgcggcgcgcggcctcgggtaccactttgccgaagcttgcgccgctcagggcgcgacggtggtgatgtgcgacatcctgcagggagagctggcggaaagcgctcatcgcctgcagcggaagggctatcaggtcgaatctcacgccatcgatcttgccagtcaagcatcgatcgagcaggtcttcagcgccatcggcgcgcaggggtctatcgatggcttagtcaataacgcagcgatggccaccggcgtcggcggaaaaaatatgatcgattacgatccggatctgtgggatcgggtaatgacggtcaacgttaaaggcacctggttggtgacccgcgcggcggtaccgctgctgcgcgaaggggcggcgatcgtcaacgtcgcttcggataccgcgctgtggggcgcgccgcggctgatggcctatgtcgccagtaagggcgcggtgattgcgatgacccgctctatggcccgcgagctgggtgaaaagcggatccgtatcaacgccatcgcgccgggactgacccgcgttgaggccacggaatacgttccagccgagcgtcatcaactgtatgagaacggccgcgcgctcagcggcgcgcagcagccggaagatgtcaccggcagcgtggtctggctgctgagcgatctttcgcgctttatcaccggccagctgatcccggtcaacggcggttttgtctttaactaa

SEQ ID NO: 138472 - DNA, 1023 bp, Enterobacter cloacae
atgacgacaacggtacaaaactatcttgataaagggttgcgcggcctgtggtatccggtgctggcgagctgggaagtgcagtctgcgccggtaggcataacccgtctcggcgagcagatcgtggtctggcggaataaagatggccagctgcaggccctggaagaccgctgcccgcatcgtggcgcgcgcctgtcgatgggctggaacttaggcgatcgtatcgcctgctggtatcacggcgtggaagtcgccggcaacggcgaagtgaaagacgttccggcggtggatcgctgcccgctggtcggccagcagtgcgtgcgcagctacagcgtgcacgaagcgcacggggcaatcttcctgtggtttggcgtcaccgccgatcagcagcctgatgaattgagcttccctgaggaactagccgatagcgaaaaatacagtaacttcctgtgcaccgcggcgtggaaatgcaactaccagtacgcgctggaaaacgtgatggacccgatgcatggcacctatttgcactcatcatcgcactcgatggcagaaggcgatcgcaaagccgatatggtcctgcagccgacgaaaaccggctttatcttcgagaaaaaagggcagagcggcgttaactttgactgggttgaactgggcaacagcggcgcctactggatgcgtctgtctattccgtacaaaaagcgtttcgggccgggcggccacttctggatcgtcggcatggtggttccggaagataacgataactgtcgcgtcttcttctggcgcatccgcggcgttcagggctggcagcgcgatctgtggcgctttatgtaccgcaaccgtctggaaaaactgcactgggaagtactggagcaggatcgcgtggtgctggaaagcctggcgccgaacgcccgcgatcatgaatacctttatcaacatgacgtcggtctgtcccgcctgcgccgcatgatgcagaaagcggcgaaagagcagttagcgctccgcgaagcgcagcagggtgccgcctga

SEQ ID NO: 138473 - DNA, 309 bp, Enterobacter cloacae
atgagcgaatccctggacttcaacccggcgctaccggaaagccgccagtttacgccaccggcggaaggcggaaacggcaatatccataagcctggcgactatcacaatctgatttggcaaacccgcagccgggtaccggaaaactgggaactgcagcttatcgccaccctggaaacgttgttcgagcagggcgcggaaagtctcggtgaactggtgaacggcctcaatggcgtcaggatgcatgaccaacagggcgaaccgtggagcgaaagcagcttccaggcatttttacaggttaacggctactga

SEQ ID NO: 138474 - DNA, 324 bp, Enterobacter cloacae
atgagctggataggcgtatgtgacgcggagcaagtacaggaagatttcccatatagcggcaatatcgacggtaaggaaatcggtatttatctgattgatggcgaatattacgcgctggaagacgtttgccctcatgcctatgcgctcctgagccagggctttgtcgaagatggcaaggtggaatgcccgctgcatgaggcggtattcgacgtcaaaaccggccagtgcctgcatggacccggcggtcgcaaccttaatcgttacccggtgcgggtatacgacaatcagatccagattacctttatcgaggagaacgtggcatga

SEQ ID NO: 138475 - DNA, 1221 bp, Enterobacter cloacae
atggcggcaagatggcaaggggtaatagcattacttttgttaataattatttcctacgtcgatcgggttaatatctcggtgatgatccttaacccggaattcgctgcccattttcagttaaatgaaaacagaatgttacaaggcatgctaatgacatgctttcttctgggttatggtttttcggcattattattaaccccagttatagaaagtagatggcattatcgtcagggactcttaagcagcattgctatatgggcgctggtgtgcgccatttccccgctactcggctcactgctgggaatgttgatcgcgcgcatcgttcttggcgtggcggaggggccgctgttctctctgaaaacgcgctttatcaacgacaacttcgccgctgatgaaataggcaagccgaatgcgctgaccgcccttggcgtatcgttggggctggcggtaggcttcccgctggtcacctggctgatggcgcacgttggctggatcggctccttctacgcgctggcgctgcttaacctgctgctcggcggcggattaatctggcggtttctccccgcgccacaagtaacctcacagcgcgcgaagcctggctttagccaaacttttgccctcgcctggcgtacgccgctgctaggctggatcctgctggtagaaatcgccacgctcagctatctgtgggggagtagcgcctggttgcccgcctggctgcgcgacgagcaccacttctcgctacaggctaccggcctgctggcggctgtcccctttctgttaagcctcggctcaaagtttcttggcggcgtgctcctcgacaaaatgcgcccggagcaggcgccgctgctgtttattatcggcggcctactcaccgccggttctgtgctggcgctgatgctcagccagcagccggcgatgctggcgctgtttatgctggcggcgaacgttttctggggattacagggggcagcgatccccgcggtggttcagcatcacgccccgcgcgaagcggtgggcagcgcctatgggatcattaacggcattggcaatatttgcgcggcgtttattccgctgctgatgggagtggtgatgaaatcggtgggatcagtcagttcaggtttttccgttctggtggcatcgcagctgatcacgctgtgcgccggcggcgcactgctgctgcgtatgcgtcgcgcagcagcagtaaacgcgtctataccctaa

SEQ ID NO: 138476 - DNA, 147 bp, Enterobacter cloacae
gtgcgcggcctgaaggatctgaacatcgtcgggatggacgtggtggaagtcgccccggcctacgatcagtccgaaattaccgctctggcggcggcgaccctggcgctggagatgctgtacatccaggcggcgaaaaagggcgaataa

SEQ ID NO: 138477 - DNA, 777 bp, Enterobacter cloacae
atggacaaagtgcaggataaagccagcgataaggacaaggagcgtgtgatgaagaacatcaacattatgtgggatgccctgtccaaaaaccggctctttgacggcaataaggagctgaaggagtttgtgatgaccctgaccgggacgctgatttttggtgagaacagtgagatcacgccgctgccagcacgcaccactgaccaggacctgattaaagccatgatggagggcggcacggctaaaatctaccactgcaatgattcggataagtgtcttaaggtcgttgctgatgcgaccgtgaccatcacctccagtaaggcgctgaaaagccagatttccgctttgttaagcagtatccagaataaagcagtggctgatgaaaaactgacggatcaggagaaagggtttatctccagcaccaccatcccggtgttcaaatacctggtcgacccgcagatgctcggggtgtctaactcacttatttaccagctgacagactatatcggctacgacatcctgctgcagtacattcaggaacttatccagcaggcccgggcgatgatctcaaccggtaattatccccagtcgacaatggatatgatcatggaaaacctcaaccaggcgagtgtgcagattgccgctttccagtcccgtgttcaggtccagcaggacgccttgctcgtggtggacagacaaatgagttacatgcgccagcaggtctccgcccgcatgatgacccgctaccagaataactatcatttcggagggagcctctga

SEQ ID NO: 138478 - DNA, 2850 bp, Enterobacter cloacae
atgacgccacttgaaatctacaccatcgccggaggcgactggctgcggggtaatctcaatgccatcgcggcgttcatggggaccgccacctggtcgtctattgagaaaatgtgcatcgcgttttcggtgttgattgtcgccgtcagctgggtgaaaaaacacaacatcatggacctcctcggctgggtgttctccctgaccctggtctcgatgctggtcgtcatccgcacgcctgtgcagataatcgactacagcaacgtggcgcaggtctacaaagtggataatgtgccgattggtctggccatcccggcgtcgctgagtacgcgcgtcggcaatgccctggtgcagagctacgagatgattttctccctgcccgacagtgtcacctacagtaagaccggcatgctgtttggcggaaacctggtggcgaaaagcacggattttgtttcgcagaaccccgaaatcaccacgctgttctccgactacgtgcagaactgcgtgatgggtgacatctttctcaatggcaaatacacccttgaagagctgatgaactcgtctgacccgtacacgctggtgttttcgaatcccagcccgctgagaggggtattcgataaaaacaacaagttccagacctgtctggaggcttcacgtgatttgaagtcagcgttagcgcttgactctcagaccggcgggaaaacctggagttattatgtacgccagttgtttggcggcaaacccaatccggacctgctgttcagccagatgattggcgacagttacagctacttctacagctcaggccagagtgccgggcagattatccgccagaatgtcaccatgaatgcgctgcgtaacggcatccagagctacgcgtcccgcagcggcgacacagcaagcctggtgaacatcgccaacaccacgtcgctggaaaaacaacgactggcccaggccacgatggggcatcaggcactgcgctcactgccgatgatgcagacggtcatcatgggcatcatgattgggatgttcccgatcatgattatggcagcaatgttcaatatgatgacgttgcaggtcctgaaaggatacatgtttgcccttatatggctgcagtcctggccactgctgtatgccatcctgaacagcgcaatggcgtattacgccagacagaacggtgtgccggtggtgctgtctgaactctctcaggtgcagctgaaaaactcagatattgcgaccaccgccgggtatatctcgatgatgataccgccgctcagctgggcgatgataaaaagtatgggggcagggttctccagtgcttacagccactttgcctcctcgggactcagttcgacgtcccaggcctcatccagcgtcgtggacggcaattactcttttgccaatatgcaaatggagaacgtcagcggctacagctggggtaccaacagttcgaccagcttcggtcagatgtcgcggcagctggggaacggtggcacggagacgcagaccggggacgggacgactatctgggatgcgcgcagttctaagctaccggttgatatcaatgtcagccggcaactggccagcgcgaaccaacagatggcacgtgagtcagatgtgcaggcacagagtgccctgcatggctataacagcagcgtgacaagtgcctggaacagcctgaagcagtttggcacaaatatgggtaccagtgcatcgacgacgagtggggccgataatactgagtcttcacaggattcaatggccagaagtaaaatgtggaatgcggttgtttctaatgcgaaggccaataacatcagcaatgaagagtcattcaatcagttgatggaagattcttccaaaagagctcagtcattcgatgcgcacgtatcaggtaaactcagttcgggagatcagctattcggtaagctgggtaaatggggtactggactatcagctgaagtcggtgctaaaggcagtgcaggttggactcataactcaggagatacggatagtatcggatcttcaggtaggcagtcacatgacagccgtcatgataccagcagtcaggcggcaaaagacttcaaggaagcatcggattactttaccagccgtaaaactagtacatcgggtaataggacagataacaatgccagctcacgcgttgaccagtttgcggcatcgctgtcgagcgcgaaaaacagctatgaccagtacacaagcagccggactcgtagccatgaatatagtgagatggcatcccgtacagagagcatgagcggccagatgaacgagaacctgactcagcagtttgctcactttgtccaacagcgttctccgcagaatgcagaagtcattctgaccaacacaagttcaccagaagtcgctgcgcaacgtgaggcactggcgcgtgaattcgtcaaagcgcaggttgaaccaaaagttgatggtgcttatcaacagggccgcgaaagcatcggtcagaacatgtccggtgtatcaggtggtagtgaccgtggttcggtaatggccgactacggacataatgccggcaatatcgaagctatgacacgagatgcggggattaaggataatgtgggtcagaaagtggatgggatgatagcgcagaataatcaacagcatcaagaaacccagcaggggatagagcgtgatggcaatgagattagaaaacagaattctgatctcgaaaaacatcataatacagagggaaataagttcgaaaatgaatataatgaaagagccagcgtagtgaaatccttacccggagctgactcaccacgtgagctagaggcaaaggcagccaaaattcaaaaggattacattgatgggaaaaggtga

SEQ ID NO: 138479 - DNA, 531 bp, Enterobacter cloacae
atgatgatgaataataaaacgcttattaaagaagtggatgagttaaaagatgtgctttcaaagggcgatgccgaaataccgtctttttgggtatgcatgtggcccggtctttgtctggtaatatggaatattttttgcgcattaattagtgtgcgatcagagtattatgatgtcaaatacatattctgggttttgatatttcctggtgctgtgggtctgattcttctgctcggggtggcgaacgctcgttctctatttttatcagttccaaagtccttcagggaaaagtcagtaatatatcgttttttttcaaaaaaacttcttgcttatgcttttgcatacatgatgataatcatggcactggctatttataatagatttttttatgactccccatttccttatgcattcatggttcttttgacaacgattttttttggttttgttatgaatttagattttggaagatatcaattgtcactgctgacatcagtattaagcactctcaaaggtaatgtggtggaaaattga

SEQ ID NO: 138480 - DNA, 669 bp, Enterobacter cloacae
atggaagaaacacatgaactcacatcgaccgatctgtattcgccgcgtgtagcttacgaatcatacgtttcttcaaaaacagacccgtcatttttcagttatgatgtggatttgttagcagttagtggcgctgttattattttcggtttgttattgttttacgctttctcacgatatgcagtatcttcgcacatcaaaaataaatgtagtactttgcctgcgggtcccgataaaaagcctgacgtgcagagcgagccagactattttcatctcaccttatgtgtggaaggggcagcagacgctgatgattccgtcctgtcttctcttgcttctcgtgttgtccgcgaagcggagaatctttatatccccggcatcaatcgccgcgacagcactgacggtgagtttgcctggtctgtacagacaaaatttccttctgacaagctgtgtggttcccggctttttccggagacgggctggtttgagagtccgaatgtcattgaacgtcccatgaagatgctgtgcgtctgcctgcaatacaccgctgaaacatcgccagccacactgtattcactggtcgatgaagccgggcggcaggtggagaaatcgtaccttaaaggcggacattatcatggctctgagggctataccttctgcatgagtcagttctga

SEQ ID NO: 138481 - DNA, 2310 bp, Enterobacter cloacae
atgagttttaatgccaaagacatgacgcagggcggtcagattgccaatatgcgtttccgcatgtttggtcagattgccaatattatattttatgtgctgtttattttattctgggtgctgtgcgggctgatgctgatgtaccgactcagctggcagacctttgtgaacggctgcgtgtactggtggtgtacgacgctcggtcccatgcgcgatattattcgctcccagcccgtctacaccattcagtattacggccagtcgctggaatatacctcagaacaaatcctggccgataaatacaccatctggtgcggtgagcagttgtggaccagttttattttcgccgccgtggtttctctcgtcatctgtatcgtgacgttctttgttgccagctgggtactgggccggcaggggaaacagcagagcgaggatgagaataccggcggacgccagctgtccgacaagcccaaagaagtggcccgccagatgaagcgtgatggtatggcttcggatattaaaattggcgacctgccgatactgctgaactctgaaatccagaacttctgtctccacgggactgtgggctccggtaaatctgaagtgatacggcgtctgctgaactacgtccgcgcccggggcgatatggccatcatctacgaccggtcctgtgagttcgtcaaaagctattacgacccgtcgctcgataaaatcctcaacccgctagactcgcgctgtgccgcctgggatttgtggaaagagtgtctgtcgctgccggatttcgacaacatatcgaatacccttatcccgatggggaccaaagaagacccgttctggcagggatcagggcgcaccatctttgctgaaggcgcgtacctgatgcgtgaagacaaggatcgcagctacgagaagctggtcgacaccatgctgtccatcaaaattgacaaactgcgcgcctatctgcaaaacaccccggccgcaaacctggtggaagagaagattgagaaaaccgccatcagtatccgtgcggtgctgaccaactacgtcaaggccatccgctacctgcagggcattgagaagaacggcgagccgttcactatccgcgactggatgcgcggtgtgcgtgaagaccagcccaacggctggctgttcatctcctccaacgcagacacccatgcttccctgaagccggttatctcgatgtggctgtcgattgccatccgcggcctgctggcgatgggggagaaccgcaaccggcgcgtgtggattttcgctgacgagcttcccacgctgcacaaactgccggacctggtcgaaatcctcccggaagcccgtaagttcgggggctgttatgtctttggtattcagtcgtatgcccagctggaagatatctacggcgtgaaacccgccgccacgctctttgatgtcatgaacacccgggcattcttccgctccccgagtaaagagattgcggagtttgccgccggtgaaattggtgagaaggaaattctcaaagccagcgaacagtactcttacggtgctgacccggtgcgtgatggggtgtcgaccgggaaagaaaaagagcgggaaacgctggtcagttactccgatattcagacgctaccggacctgtcctgctatgtcacgctgcccgggccgtatccggccgtgaagctggccctcaaatacaagccgcgtccgaaaattgccgaaggatttattcctcgcactctcgatgcgcgggtggatgcgcggctcagtgcgctgcttgaagcgcgggaagctgaaggcagtcttgccagggcgcttttcacgccggatgccccggcatccgggccagatgatgccggcagtcacgccggtgaacagcctgagccggtcagtcagcctgcgccagcagtaatgacggtaactcctgcaccggtaaaatcgccgccgacaacaaagcgtccggcagcggaaccctccgccaggacagctgagcctcccgtcctgcgggtcacgaccgtaccgttgatcaaaccaaaagcagccgcagcggccggaactgccgcaacagcatcctctgccggtacccctgctgcagcggcaggcgggacagaacaggtactggcgcagcagtccgcagaacaggggcaggccatgctgccggccggtatgaacgaggacggtgtgattgaagacatgcaggcgtatgacgcctgggctgatgagcagacgcagcgggatatgcagcggcgtgaagaggtcaatatcaaccacagccaccgccacgatgagcaggatgatctcgaaattggggggaatttctga

SEQ ID NO: 138482 - DNA, 918 bp, Enterobacter cloacae
atgctcagtgaaaaattacttgggaacagtgccgccagaatcaaagccgccaacttcagccaagccaaagggagggttgatgaaagcaatgccaaagtccggcatattcacgagatcttctccacagtggccgaacaactggaacaggatagtgaaaattcatgtaaacagctgcgtcaaagtttcagtttgttccggcaccgcctggaagccctcagaaccaaattagttgatgaactggtcagctccgtacgtgcttcggtctactcagtgattgaacaagatatcagtagcgatgaatttaaaagtagcctgcacagttgcattacgcagcagcaggaggcattcagcgaaaagttgattaaaggcattcagcaggacgttgaaatcttccagcaagactccaaagatatcctcacaaggtttgaacaatacagtcaggaattgctcaactcctatggcaagcttcgtgctgaaaagttcaatccagcctttgatatcaagataaaaatggataatggggttaatggatggggattgctagctgggctgactgggattgcgcttgcccctttcaccgcaggagcaagcttctgggtgggtggagcggctgtactaacatctttgatttccgtcggcaaagccttggctagattttttagcacttcatacaaacagtcccagcaacgcaaagccacaaatgaaaatcttgcagtgatacgctcactcctgcagacagacattgattctgctctggagggcatcacaccacaaatgcaaaaaacaattgatcagcttgaacaggctttgaaaacaccaggtcagcaggtcgcatctaaagccaagatccttaaacgatccacccaaaaacttgaccttctatctcgccagatcagtaatgtaggtaacttgccatga

SEQ ID NO: 138483 - DNA, 1701 bp, Enterobacter cloacae
atgaacgaaacacttaatacatttaacgcacaacaaactcatgcggtgaaacttctacaaaagctagaaacctttctacagcaaggagctttggcgggagttcccatcgatccagcactcagcggtaaaatacacaatgcaatagccagtttagctgatgagaaacttaaggtggcactcattggcggtttttcagagggtaaaacctctatcgcggcggcttggatggagaagcttgataagaccagcatgaagatcagccaccaagaatcctctaatgaagtaaaggtgtacgaggttggtcaggatttcgtcctgatcgatacacctgggctgttcggtttcaaagaacaggaaaatgatgatactcatgccatcgaaaagtataaagacatcaccaaaaagtacgttagtgaagcccatctggtgctttacgtcatgaatccaaccaatccaattaaggaaagtcaccaggaagacctgacatggcttttccgtacactcgatttattaccacgcagcatattcgtgctgagtcgttttgacgaagtggccgatgtcgaggatgaagatgattatgagcataacctgaatatcaaacgagcaaatgtggcgaaacgcctcagcgaaatgatcagccttaccgcgcaggaacaggcagatttgtctattgtcggggtcgccgctaacccctttgatctagggactgagcactggctggcgaatagtgaacagtttaaatcgttatctcacatatccagcctgcaagccgcaaccactgaaaagatccaacacagcggtggcaatatggctctggccaatgacatgcgcagcagcgttatccgcgatattttgcacaaccagctgcccgttgctattgataacgatgaaaaaatatctcaagaagtcctcaaactcgacagcctttatagccgaatgaaaacggagctcgcacaggcagatcgggaaatcgaaaacaccgtgattaatctgcgtgaatttgtcatccgctacttctccgatctaattctgcaagctcaaggatgcagcatggaaaccttcagcgagttctttgaacgtgaagtgggcgatgatggaattatcgtcagcatgcgactggaaaacgaattcagccgacagattcagccgattgaaatcaacatggagaaaatgcaactaagctttgacactgaagttaatcagttcaataccactatcaaggcgtttggaaaacaaggcattaatcatgtcctaaagggtaatctgattaacaacaagaccgtgatcggtgcccgcgatggtattgttggcatgggtaagttatttggtaaggatttcgggaatgcattaaaattcaagccttggggagcgactaaactggcgaaaggggcaaatggagcgttgattgtagtcggtatagcgctggaggcgtgggatagttaccagcaatatcagcgagaaagagaattccaggaagccattgcaggtatgattcagaactttaagcttcagcgtgagaatctgaaagaactgataggaaaaactcagttcaaggagcagttctttggcgatttgaaaagtaatgccagagaacttgaagccagcctgaatgccagtagggaaagtcagcaacgattccaagcatggcgtactatggcagaaactatcgaagatgaacttaattccgagttaccggattaa

SEQ ID NO: 138484 - DNA, 756 bp, Enterobacter cloacae
atggataatgataatttttcactggtcgattggctaccgaaattttttcagcaatggccaaaaaatcaggaatggaccagagaaaaagataaaaaaataaatgttgatacagtgcaattagccgaattttttaatcaactctctgacccactgaaagttttgcagcatcgatctttatcttttgatccatgggaagttgctggcctcaaacgtagagaagttcgcaattctgcagtccttgcttggcttcttgatcccgaagggacccatggtttcgggagactacctttacaggcattcttacggacaatacgacgcaaccggaaagatatccctgaggattatcgtaactactgccgagtacaagttgaaacgaatcctaccggcgataatacaaatcgtgttgatgtagagatcaatgcggataattttttcctgcttatcgaggtgaaaattgacgcatatgagcagccggagcaagttgccagatactgttctgatgccaaagtacgcgcgatgtcacgtccttgggccgttgtctttttaacgccccatggtggaaagccgctgacctgtggggcacatttcaaaccagaggatgttccctgtatttcttggcgaagtctcgccacaactttagggtcttcgttgcaaccgcattacaaagaactcatttctgccaatgaaaactcaccttcacgccaaatggctgcacatgcagcattttgctttcttaatcgagttcgtaaattttaa

SEQ ID NO: 138485 - DNA, 645 bp, Enterobacter cloacae
atgaacccacatagcgaaacggaacgtcaggccggtatactgatactttctaaactaaagatgtttaacgaagctgtcgtttattttgaacagtatataatcccagccttctggaaaagctttgatcagtgtgttgaacgatttatgaacgacagtaactgggtaggcaaagcaaattatgaacatcaggattattgctggctggcccacccaacctgggtaattgaaggaattaattgcaaatattggtttgaaaacagttcgacagttactgatggaaatgattatattttagccgtgctaactggtacaggaaccgagcagggacagtttggttttgagtttaaactgaatgctggcttttttggtggggccaaaaagattactagttatacgcttgcaattcagcaaaaacatcgtaagcaactccatgaattaggattagtggataggggaaagggtgggtattttcatcctgttacccttgacccaatattacttactgagtgctggagggagtatggtgaatttccagtggagcatgaggtattttccccactaagaacagcacttgaaaagttactgaaatcgactgaaattctggatgctatcttttcgtccgatatgcacaccccaagcagctaa

SEQ ID NO: 138486 - DNA, 1422 bp, Enterobacter cloacae
atgtttaacgctcgtccttttcctattgattcgtttcctcagattatcagaaatgcggtttatgaagtggaacagcacacgcaggctcctcaggctttgattgccgcatcggtactgggagttatttcgcttgcatgccagaaccgtattgatgtgtgccgactgaataatttgcgcagtccggtatcacttttcttactgacgctggcggaatctggtgaacgcaaaagtactgtggacaaactactgatgaagccattgtatcaactggaagaagaatggtttgaaaaatataaccatgacttggttgtctggaggaatgaagaaacggtttttaacattgaaaagaaagccctgatgtcaaaactgaagtcagatattcgcaagaataaagatcactcggcaacgaatgaacgtctgaaagagtttctggagtcgcatcttagagcaccagtgaggttcaagcagatatttaacgacgctacacctgcggctattaaggattacctctgtggctactggcgttctatcggtattatgtctgatgaggctggtaccatttttaatggttatacgctgaacgaactcccttttatcaacaaaatgtgggatggtgcaactttttccgtggaaaggaaaagcgaaccagagaaattaatcaaaaatgccagactgacgttaggtttgatggttcagcctgatatatttaaaggttatctgcaacgtaaaggtgatgcagctaaaggtatcggattcttcgcacggtgcttgatatgtcagcctgattcaaagcaaggttccagaataatctccagcccagttatttcaagtgaacatttgccgatattccatcagcgactgatggagatagttaacgaaaatattgctagagataatcaaaatgaacgtctttgtctgcgcttcttggtagaagcggaaaatcgctggatagaattttataacaaggtggagtcagatatgggcttacttggcaccttaacagactttaaagactatgcatctaagatcgcagaaaatacggcaagagtggccgctcttctgcatttttttaatggcaatgatggagatatacctctttctgcagtcgaagatgctgtgaggatatcgacctggtatctaaatgagtacatccacttattttctaagcctcaagaatttactctggcaatctcggaggcggatgagctttattggtggataaaaaaccattgtaatcgccttgtagtaccttacattactaaaaataccatcctccaatatggccctaataaattcaggagtcgtagtaaagcaaatgaattgctgagtgctttgttctctcaaaataaaatccttgtagggaagagggggaaaactacattaatagctatcgctggtttgaaccccgcaacttcattctaa

SEQ ID NO: 138487 - DNA, 237 bp, Enterobacter cloacae
atgaaaacaacattcaagtatccaacatcaagcgaacgcttgcagatcctacgcaactatggcgaaccccatgatcgcctcgtacgtgaaaaagaacgtcagtgcatcacatcgatatctcgttcaacggcttggaaactggagcaagttggtcagtttccgttgcgtaagtctattgggttgaagtcctgtggttggttgttaagcgatctgctttgctggattaacgaacgttag

SEQ ID NO: 138488 - DNA, 1011 bp, Enterobacter cloacae
atgaaagctgggtcttatttttattctttaaaattagtttctgataaattgaagatagatcctgagttgatcgttgatgagtggcttcaacatagggtttcattgtatatgaaattgaattctttgccctgtagaattattcggtatattggtgccgattcttttttgttgaaatacgagattttaaaaataaaaaatggaatggattattatcaacatgagttaatgccggaattcaaagttagacaattccatccaaccaagaataccgacattgatgccaggttaataaataatgaccttggaatatcccgttttacatatagtggttatgcgtatggttattggagattgaaaccaacaaaaacagcccattttttaaaagaaaaaattatatcaccaggcctaaatattgtgttaagtgataatgaagtccttgagagtatcactattcatgggcgagatgatagtgattatttaattttgtccaatgaggcgtcaaaaattttagttgaggtgtatgttgatagtaaatcttttgattttttgcagaattattatttattaagtgatgaagtggaagtttctaaagacagcattgattataattattgtgatataaaaaagtcagtggattcaattccgtttattgaacactatagagcggcgctatatatttttatacatgaatggtggggggcgggatcatctgaggaagtagtgattaataaattgatcacacatcttgaaatgagtcatcaattaaaagttaagcattcaactgttaaacgatgggctgaaaaaccgcaaataaatgcaaaatatagaagcatgtctgatcagaaaaaagttttgtccattttaatttctgagtactgtagtacgaaaaacattaaaaaagaacctatggcagttgcatctttgttgaatgaatttattcactctgagaaatattgttttaactgtgaagtcacttttagtgaactagaggtagccacatggataatttaa

SEQ ID NO: 138489 - DNA, 2259 bp, Enterobacter cloacae
atgaaatacacgtctcacttcccgctggggatcgtcattcctctgctcgcctgtagcgtgccgctgcaggcggcagagaacatgaccgaacaatcgacgcctgacgagagcgccgccactgccgaaaatcacgaggagacgatggtcataaccgccgccaggcagaacctgcaggcgccgggcgtgtcgaccatcaccgcagaagagatccgcaaacatccccccgcccgcgatgtgtcggagttaattcgtacgcagcccggggtaaacctgaccggcaactctaccagcgggcagcgcggcaacaaccggcaaattgatatccgtggcatggggcccgagaatacgttggtgctggtcgatggtaaaccggtgaccagccgtaactcggtgcggtatggctggcgcggcgatcgtgactcccgcggcgataccagttgggtgccagcggagatgatcgatcatatcgatgtgatccgcggcccggcggcggcgcgctatggtaatggcgcgatgggtggggtcgtcaacatcgtgaccaaaccgaccacaccagaatggcacgggtcgtggaatacctatatgaacgctccgcagcaccgtaaagaaggggcgacgaaacgtactaactttagcctcaatggtccgctgtcggacagtgtcagcttcaatctctggggtaatctgagtaaaacccaggccgatgcgcaggatattaacgccgggcatgaagcggaacgtaccggttcctacgccggttcttatcccgccggacgtgaaggggtggtgaacaaagatattcacagtaagctgcgctgggagtttgccccgatgcaggccctggagtttgaggccggttacagccgccagggtaatctctatgccggcgacacacaaaacaccaataccagtacgctggtgaagagtatgtacgggaaagagaccaaccgtctctaccggcaaacttacggcgtaacatggaccggcggctgggataatggcgtgaccagcaacagctatgcccagtacgaacacacccgtaactcgcgaatggatgaagggctggcgggcggtacggaagggatcttctccagtagcgagttttcagatatcgatctggccgatgtcctgctacatagtgaagtgaatattccgtttacgctgggggtcgatcagaatctgacgctggggacagaatggaatcagcagcggatgaaagatggcgtatcgacaacccaggcgctctcttacggcactatcgatggcgtatcggctaccggtcgtagcccgtactccagcgccgagatcttctcgctgtttaccgaagataatatggcgctaacggacagcaccatgctgacacccgctctgcgcttcgatcaccacagcatcgtcggcaataactggagcccctcactgaacctgtctcaggagctgacggacgactggacgctgaagctgggcattgcccgcgcttacaaggcgcctaacctctaccagttgaacccgaactatattctctacagcaacggtcaaggctgttacgccagtagttccgcctgctatctgatggggaatagcgatctgaaagcggagaccagcgttaataaagagattggtcttgagtacaagcatgatggctatcaggcggggatcacctggttccgtaacgactatcacaataagattgagtcagggtatgcggcggtgggtaccgccagcaacggcaccaccaatatctatcagtgggaaaacgtaccaaaggcgttagtggaaggcctggaaggaacgctgaatctgccggtgggggaggcggttaactggagcaataacctgacctggatgctgcagagcaagaataagacgaccggcgaccggctgtcagtgatcccgcagtttaccctgaactcgaccctaagctggcaggttcgtgaagatctctccctgcagagcacctttacctggtatggccgacagaaaccaaaacgcttcaattataagggcgaggcggtcagcggcagcgaactaaacgaagtcagcccatacagcattgtcggcctcagtgcgacctgggatgtgaacaaaaatctgagcttcaccagcgggatagataacctgtttgatatccgccactaccgggcagggaatgcgcaaacgaccggcaacgcgacgacgggagcttatctgtatggcgcgggtgccgagtcctataacgaatcggggcggaccttctttatgagcgttaatactcatttctga

SEQ ID NO: 138490 - DNA, 369 bp, Enterobacter cloacae
atgggattggccgcaattatgcgtagcaaaacgctccagcaatcggtattaagcgacctgctcttgtggatcgataataatctggataagaaactgaccgtcgacgatctgagcgatatctctggttattccccctggcatttgtttcggctcttccgtcattattttgatcgttcgccaatggaatatatccgccagcagcgcatgtcgctgtgtcgccgtttattgctgacgacgcctggttaccgaatcgtcgatatttgtatgatggtcggttatgacgatctcagtgcgtttaatcgtaccttcaaaaaatatcatgcgctcacgcccactcagtatcgctatcagatcacgcggcaaaaataa

SEQ ID NO: 138491 - DNA, 1761 bp, Enterobacter cloacae
atgacacgcttactcaagacaatcttgcccatcatcctctgcgccctcttcgggttatcgttcgcttcacccacgcaggctgtcgccagtctgccgatcgttcttcccgcgctgacatgcgatgcgctaagcgctaccaacttcagcgcggccgttggcgcaaaggtcactatcaatcacactgaaatgcagacctccgcgcagggaagctggtgcaaggtgagcgccactatcgcccctgagattggcgtgcagattgccctgccgactcaacgctggagtcaacgttttttgcaggtcggctgtggcggactgtgcgggagtattaacctgagtctgtcgaatgccagcggctgcctgccggcaatgaacggcgagtttgtggtggcagcaaccgatatggggcaccatggcagtatgatggatgcgtcatgggccgaagatccgcaaaagcgcatcgattttgcctggcgcgccaaccacctgaccgccgtgctggccaaagcggtgatgcagacgctttaccgccagccgccaaagtatgcctactttatgggctgctcagacggcggtcgcgaagcattgatggaagcgcagcgctttccgcaggattttgacggtatcagcgctggcgcgccagcggcctttttccagtttcagaactccttcttccacggctggaatgtggccgccaatcagcgcccggacggtaccgctatcctgctgaaaaatcgccttcctctgattcaccaggccgtgctggctcactgcccgacgctttccggcgtgcaggatggtatcctgcaaaatccgtatgcctgtcagttctctgagtcatggctcccccgctgtcctgccgatgctcgggatcgttctacctgcctgacgcaggaagagatcgaggtggtgaaaaagctctaccgcggggcttacgacagccacggcgcccagttcgtcgcgggcggtctgccgctgggttccgagctacgctggccggtgcccgagacgccgaccggccactcaatgtcggaaatgatggtactaccggctctgcaatccgtgctcctgccaggagaaaaacagaagatccaatcgatgcgggattttccgcttaaccagcagaattttgacgccgtcgcccaactggcgccgctctataacgcggcaaataccaatcttcatgcctatcaacagcgcggcggcaagcttatcctctggcacggtctggccgatgactccgtcagtccggccttttctatcgcctattatcgcggcgtagaagcagagatgggccatgccgcaacggataccttcctgcggttattcctgctgcctggggtagcccattgcggtaatggcgaaggttacgatcaaattgatctccttaccccgctgatgcgctggaccgaggaaggcatcgcgccgcaggagatcatggccggcaaacgggcaacagccgctgccgacctgccgccgatgacagaaaaaccagatgcgcaaacgcagtttcacggcgtgcagaaagtcagtcagccttacgctgacgctgctccagctgttatcgcgactcgtccggtgtatcccttcccggctattgcccgttataacgggcgcggcgacgtgaatgacggcgaaaattatcatgcagagcaaactaccgcctttggtcatctgcagctggcaaaacccgccagcgactatattggccctgataatcaaaaaaattatcaggttcgccacggcacactcactgttcaataa

SEQ ID NO: 138492 - DNA, 2424 bp, Enterobacter cloacae
atgttaaaaaagactcatatcatcagcggattattgatcgcccctttaacgttatatgccgcaacatcatatcaagttgatgatatccgttttgaagggctacagcgcgtgaccgtcggggcggcgctattaagtatgccattgcacgcgggagatgcggtaacgccagaagatgtcagcgaggcagtgcgcgcgctgtatgcgagcggcaatttcgaaaatgtgcagatcctgcgcgatgggaaaacgctggtggtgcaggttaaggaacggcccactattgccagcgtcagttttttcgggaataaggcagtgaaggatgatgcgctaaaggaaaatctcaccgcgtccggtatttctgcaggtagcgcactggacagaaattcgcttagcgaaatagaaaaggggttgcaggatttctattacagcgcggggaaatacagtgcgcaggttcacgcggtggtgaccccgttaccgcgtaatcgcgttgacttaacgttcgtctttcaggaaggcatctcggcgaaaatcgcacaaataaacattatcggtaatcaggcgtttcgggaagagacgctcctggaccagcttcagctacgtgataatgtgccgtggtggaacgtggtagccgataaaaaataccagaagcagaagctggaagccgatctggaaacgctgcgcagtttttatctcgatcgcggctatgcgcgctttgctatcgagtccacgcaggtcagtatgacgccagataaaaaatccctgtatatcactatcgccctcaatgaaggcgaacgttatcgggtcgaccgaactcaggtgacaggcgatctggctcagcatgggccggagatcgaggcgcttgcccagccgctggcgggggcatggtatagcggggcacaagtcaccacggttgaaaatgagatcaaaaagcattttggtaagtatggttatgcctggccacaggtgacgaccacaccggaaatcgatgatgcgcatcaccgcgtggtgctgcatattcaggtcaacgcgggccgccgctactcggtacgccagatccgcttttccggtaacgacacctcccgggacgcggtgctgcgtcgtgaaatgcgccaaatggaaggggcgtggctcaacaacgaaaaagtcgatcaagggaaggtacgtcttgatcgaacgggtttttttgagaacgttgaacagcagatcgttccggtcaatggaacggcggatcaggtcgatgtggtctacaaggtgaaggagcgcaacaccggctcattcaacgtgggcctgggatttggtacggacagcggcgtgagctatcagcttggcgtgacgcaggataactggctgggtacgggtaatagcgtgagcttcaacgggacgcgcaacagctaccagtcttatcttgaactgggggcgacgaacccgtggtttaccgtagatggcatcagcctgggcggaaagattttttataacagctatgatgcttctgatgcggatgccgggagctacaaccagcagagctatggtttaggtagtacgctagggtttcccattagcgaaaataactccctgaacctgggactggattatgtccataatcgcctgaccaatatggatccggagctgacgacctggcgctacctcagctctcggggaatcgagcccagcgtggtgacgaaagatggcgacagcggcgcaaaatatagcgccaacgattattttgcgagtcttggatggggctacaacgatctcgatcgcggcttcttcccgcgtgcgggaaacaagagcagcctgagcggtaaagtgacgctccccggttcggataatagctactacaaactctcttttgacaccgcccagtatctgccgctgagcgagaacaagcgctgggtctggatggaacgcctgcgcgcaggctatgccggcgggttagacggcaaaagtgtgccgttctacgataacttttacgcaggcggttcgtcgtcagtgcgcggattttcttctaacactattgggcctaaagcggcctattaccgctgtaacggtagcgaaagcagctatagcgcctgcccgctggacgcctcgtctgatgcggtcggcgggaatgccatggcggtgctgaacagcgaatttatcattccaaccccctttgtgaatgacaaatacgccgatagtctgcgaacctcgctgtttgttgacgcggggacggtctggagtacatcctggcacaacaccgcgcagacgctggcggcagggatccctgactacggcgatccgagtcatattcgtctctccgcggggattgccgtgcagtggatgtctcccctcggtccactggtcttctcctgggcagagccgtttaaaaagtacgatggtgataaagcagaacagtttcagtttaatatcggcaaaacctggtag

SEQ ID NO: 138493 - DNA, 762 bp, Enterobacter cloacae
atggtttcatcatccgcaccgaccccgcgcagcggcgtttattatttttcgcagggctggaaactcatcgggctgccgggcatacggcgttatgtcttcctgcctttactggttaacgtgctgctgatgggcgctgccttctggtggctgtttacccgtctcggcagctggatcccctcgctgatgagccatgtgccggactggctgcagtggctaaactacctgctgtggccggtggtagtgctctcaatcctgctggtgtttggctacttcttttcgacgatcgccaactggatagccgcgccgttcagcggcctgctggcggaacagctggaagcgcgcctgaccggcgctaccccgccggacgtcggcgtctttggcatcatgaaagatattccgcggattatgaagcgtgagtggcagaagctggcctggtatctgccgcgcgccatcgtgctgttgctgctctactttattcccggcgttggccagacggtagccccggtactctggttcctgttcagcgcatggatgctggcgattcaatactgtgattatccctttgataatcacaaggttcccttcaaaaccatgcgcgaagcgctgcgcagtcgcaaagtgatgaatatgcagtttggggcgctcaccagcctgttcacaatgatcccggtgttaaacctggtgatccttccggtggctatctgcggcgccaccgccatgtgggtcgattgctatcgcgatagacacgccagctggaaatag

SEQ ID NO: 138494 - DNA, 405 bp, Enterobacter cloacae
atgaaatcgctataccggctttccgtagggcttatcctcggcgtgtcatttatcacctcggcggccgctaacgaccataaaattctcggcgtgatagctatgccgcgcaatgaaaccaacgacctgacgctgacgctccccgtctgccgggtggtcaaacgcattcagctcagcgccgaccgcggcgatgtacaactctccggggcgacggtctactttaaggccagccgcggcgccagccacacgctgaacgtccccgccgggatcaaagagggcagcaccaccggctggatcaacatcaatagcgataacgacaacaaacgttgcgtgaagaagatcgccttctccggccacacggtgcactcctcagatatggcatcactgaaaattatcggcgatgactaa

SEQ ID NO: 138495 - DNA, 750 bp, Enterobacter cloacae
atgcatattaattacctggaggatgacgatctcgcctttctgcctgagtgcagcgaggcgcatctggaagcctttacccgcattctgacccacggggaaaatggcaaaccccgtctctccagcacgctcctgcgcaacgagacatttttagcgatggaggggcacccggagcgttatcgccgcaactggcagctaatcgccggtgagctacagcattttggcggcgatagcatcgccaacacgctgcgccgccatggcaaattttatcgcgcgatcctgctggatgtatgtaaacgactgaaagcgaaggtcgacaaacagctgtcgacgccgcagatcgagcagcagttgctggcgcattttctgcagcacagctggaataaactgaacgcggagcaaaaagcgcagtttctcgccgcggtggagtgccggagccatgagctggacagcctgatggctcatctgctgaggcatcgcaagctaagcgaaggcgtcactttgttgctggacgaacgcttaaccgccatcctgcgcacgcacgccgcggtgagcgtcatcggtcatggcctggtgcgcggcgccgggctgggcggaccgctcggcgccgcgctgaacagcgtaaaagcggtgagcggcagcgcctaccgggtcaccatccccgcggtcctgcatattgcctgtttacggcaaatgctccagccgccgtcagacaccgcggaaattggtgaaaaataccccgccagatcatag

SEQ ID NO: 138496 - DNA, 567 bp, Enterobacter cloacae
atgggcaacactaagttggctaatccggcaccgctgggccttatgggcttcggcatgaccactattctgcttaacctggcgaatagcggcctgttcgcattcgatgtagctatcctggcgatgggcattttttacggcggcattgcgcaaatttttgccggcctgctggaatacaaaaaaggcaacacttttggcttaaccgcttttacctcctacggcagcttctggctgacgctggtggcgattcttctgatgccgaaaatgggcctggcagacgcgccaaacgcgcacttcctcggtatgtacctcggcctgtggggcgtctttaccctgtttatgttctttggcaccctgaaggcagcccgcatgctgcagtttgtcttcctgagcctgaccgtactgttcgcgctgctggcgattggccatttggccgataacgaaggcattgtgaaggtagccggctgggtcggcctgatttgtggcgccagcgctatttacctggcgatgggtgaagtgctgaacgaacagttcggccgcaccgtgctgccgatcggcgaaccgcgctaa

SEQ ID NO: 138497 - DNA, 1305 bp, Enterobacter cloacae
atgtcatatgcaaaccgaccgctcaaccgccaggattataaaacgctgacgctggccgccctgggcggcgcgctggagttttatgactttatcattttcgttttcttcgccgccgtcgtcggcgagctcttctttcccgcagatattcccgaatggctgcgccaggtgcaaacttttggcattttcgccgccggttacctggcgcgtccgctggggggcatcatcatggcccactttggcgatctggtggggcgcaagaaaatgttcaccctcagcatcctgctgatggcgctgccaaccctggcgatcggtctgctaccgacctatagctcggtaggtatcatcgccccgctgctattgctgctgatgcgtattctgcagggagcggcgatcggcggtgaagttccaggcgcctgggtgtttgtcgctgagcatgtcccggaaaaacgcattggtatcgcctgcggcacgctgacggccggcctgacggttggcattctgctggggtcggtggtggccacgcttatcaataccagtctgacgccgcaggggatccacgacggcggctggcggatccccttcctgctgggcggcgtatttggtctgatagcgatgtatctgcgccgctggctgcaggagacgccgatttttcttgagatgcagcagcgcaaagcgctggcgcaggagctgccggtaaaagcggtggcgctcaagcaccagaaggcggtggtgatctctatgctgctgacctggctgctgtcggctggcgtggtggtggtgatcctgatgtcgccggtctggctgcagaagcactatggttttgcgccggccattaccctgcaggccaacagcatcgccaccattatgttgtgcatcggctgtctgctcgccgggctggcggcggaccgcttcggcgccagccgcacttttatcgtcggcagcctgctgctggcggttgccagctgggcattttaccatcttgccggcgccagcccgcagcggctgtttctgctctacggtacggtggggctgtgcgtcggcgtggtgggggcggtgccctatgtgatggtgcgggccttcccggcggaagtacgcttcaccggcatctctttctcctacaacctgtcgtacgcgatctttggcggcctgacgccgattgcggtcaccatgctgatgggggtgtcgccgatggcgccggcctggtatgtgctggccctgtcgctgatggggctgggattaggtatctggctgcgtcaggagctgacggcgccgacggggatgccggaaggggagctgcagcgttaa

SEQ ID NO: 138498 - DNA, 588 bp, Enterobacter cloacae
atgaataccttacgaatcggcttagtttccatttccgatcgcgcctccagcggcgtctatcaggacaaaggcatcccggcactggaagagtggctggcacgcgccctgaccacccctttcgagctgcaaacccgtctgattccggatgagcaggccatcattgagcaaacgctgtgcgaactggttgacgaaatggggtgccatctggtgctgaccaccggcggaaccggccctgcgcgtcgagatgtgacgcccgacgcaacgctggcgatcgccgatcgcgagatgccgggcttcggcgagcaaatgcgccaggttagcctacactttgtgccgacggctatcctttcccggcaggtcggtgtgatccgcaagcaggcgctgatcctcaaccttcccgggcaaccgaaagcaattcaggagactctggaaggggtgaaagatgctgacggcaacgtgctggtgcacggtattttcgccagtgtaccttattgtgtacagttgcttgaagggccttatgtggaaaccgatggccgtgtagtagaagcttttcgtcccaagagcgccagacgcgaaactttatcctga

SEQ ID NO: 138499 - DNA, 954 bp, Enterobacter cloacae
atgacggataaattaacttctctgcgtcagtacaccactgtcgtcgctgacaccggagatattgcggcaatgaagctgtatcagcctcaggatgccaccactaacccttccctgattctcggcgcggctcagatccctgagtaccgtaagctgattgacgacgctgtcgcctgggctcgtagccagagcagcgatcgcgcgcagcagatcctcgatgcttccgataagctggcggtgaacattggtctcgaaattctgaaactgatcccgggccgtatctccaccgaagtggacgcacgtctctcctatgacaccgaagcgtctatcgcgaaagccaagcgcatcatcaagctgtacaacgacgcgggcatcagcaacgatcgcattctgatcaaactggcctccacctggcagggcattcgcgccgctgaacagctggaaaaagaaggcattaactgtaacctgacgctgctgttctccttcgctcaggctcgcgcttgcgccgaagcgggcgtcttcctgatttcgccgttcgttggccgtatcctcgactggtacaaagccaacaccgacaagaaagagtacgcaccggcagaagatccgggcgtagtttccgtcagcgaaatctacgagtattacaagcagcacggctatgaaaccgtcgtgatgggcgcaagcttccgtaacgttggcgaaattctggaactggctggctgtgaccgcctgaccatcgccccggcgctgctgaaagagctgtccgaaagcgaaggcgctgttgagcgtaagctggtatataccggtgaagtgaaagcgcgtccggagcgtattaccgaatctgagttcctgtggcagcataaccaggatccgatggcggtagacaaactggcggaaggtatccgtaagtttgcgatcgaccaggaaaaactggaaaaaatgatcgacgaactgctgtaa

SEQ ID NO: 138500 - DNA, 1431 bp, Enterobacter cloacae
atgcctgattttctctcatttatcaatgaaatactctggggctcagtgatgatttatctgctactgggcgccggtatctggtttagctggcaaacccggggtattcagtttcgttacgtgcgcaaattcggccgcagtctaaaaaaaagcctgcacccgcagccgggtggtttaacgtcctttcaggcgctctgtaccagccttgccgcccgggtcggcagcggcaatcttgccggggtgacgctggcgatcgccgccggtgggcccggcgccgtattctggatgtgggtttccgccctgctcggcatggccagcagctttgctgaatgttcccttgctcagctgtataaagaacgcgatagccgcggacagtttcgcggcggcccggcctggtacatggcgcgcgggctcggcatgcgttggatgggcgtcctgttttcgatcctcctgctgctggcctatggttttatcttcaataccgtgcaggctaactccgtggcccatgccttgcgctatgcgttcgatctgccggcggcggtcagcggcggcgtgctggccgttgtcgttttgctggcgatcctccgtggtttacgcggcgtggcgcgtctgatgcaatggatcgttccctttatggcgctgttgtggatcgccaccagcctgctcatcggcctgtggcacatcaccgccctgccgacgattttcgccaccatctttcgctgcgccttcggctggcaggaggccgccgccggcgcggtgggctacaccatcagccaggcgctgaccagcggcttccagcgcggcatgttctccaatgaagcagggatgggctcttcgcctaacgccgccgcggccgccgcctcctggccgccgcacccggcggcgcaggggatcgtgcagatgattggcgtgtttatcgatactatcgtgatctgtaccgccagcgcgattatcgtcatgctggcgccgcggcccgacaatgaatatacgctcaacggtattcaggacttgcaacacgcgatgagcgtgctggtcggcggctggggagcgggtttcatcgccctcatcgtgctgctgttcgcctttagctctatcgtagccaattacgtgtacgcggaaaataatctggtcttcctgcgcctggataagccgcgctatatctgggggctgcgaatactcaccgtcctgatggtgctgttggggaccatggttagcctgcctgtcgtctggcagagcgcggatatcatcatggcgctgatggcgatgaccaacctgacggccattctgttgctctccccgacggtgcggattatcgccagcgattatctgcgtcagcggcggctgggtatccagccgactttcgatgccactcgttacccggatattgaccaacagctggccccgggcgcctggaatgaattgccgcgcgaatag

SEQ ID NO: 138501 - DNA, 774 bp, Enterobacter cloacae
atgctgattctgatttcacctgctaaaacgctcgattatcaaagcccgctggcaacgactcgctatacccagcccgaactcctcgagtattctcagcagcttatcggcatcgcccgtaagctgaccgcgccgcaaatcggcaagctgatgagcattagcgacaagctggcggatctaaacgccacccgcttccacgactggcaccctgactttacgccgcaaaatgcccgccaggcgatcctcgcctttaaaggcgatgtctacactggcctgcaggcagagacactcaccgaggacgactttgacttcgcccagcaacacctgcgcatgctctccgggctgtatggcgtgctgcgcccgttagacctgatgcagccctaccgcctggagatggggatccgtctggaaaatccgcgcggcaaagatctgtaccagttctggggggataccattaccgagaagctgaatcaggcgctgcgcgaccagggcgacgatatcgtcatcaacctggcttccgatgaatattttaaatcggtgaaaacgccaaaattgcagggtcagctgatcaagccggtattcctcgatgagaagaacggcaaattcaaagtgatcagtttttatgcgaagaaagcccgcggcctgatgagtcgctacattattgaaaaccgcttaacccagccggagcagctcaaagcctttaatagcgaaggctatttctttgatgcggatgcctcagagaaaggcgaactggtgtttaaacgccacgagcagtaa

SEQ ID NO: 138502 - DNA, 354 bp, Enterobacter cloacae
gtggtgttcgctttaacaggctgctccgggacaacgattggcggtaatgaagataaattaacgccagcctatctgaaacaacatctcattgtcggaaaaaccaccaaggccgaggttcgtcagtattttggtgccccggattctggtcatacgacggtgacggcgtcgggtaaagagagctggtattattcagtagataaagggatcaacctggtcagcctcgcgggttccatgatcccggtaaccggggcatcgcaagctgccgatgcggtcgataagtccagccaaaaagattcgaactcgctgatgattttcttcgatgaaaaaggcgtggtggaaaactgggtgcgttaa

SEQ ID NO: 138503 - DNA, 399 bp, Enterobacter cloacae
atggctcccggagaacatttcgcggaagccctgcatgcccgccagcatcagcgccgcgctgtgcttgcggctgcgctcgtagcggcgcagataaagatgctggccgatatctttgccctgagcgtgcaggcgcttcagctcgtcaataagctcggcggcatccataaaaccgaggttgaccccctgcccggccagcggatggatggtatgcgcggcatcgccgaccagcgccagccggtgggcggcaaactgacgggcatagcggccggtcagcgggaaaacttcacgttcacttgccagttggcagaggccaaggcgattatcgaacgcgatattcagcgcctggttgaagatggtttcatcagcctgctgcatccgctgcgcttcccccggcgatag

SEQ ID NO: 138504 - DNA, 783 bp, Enterobacter cloacae
gtggaagcggtcagtcgcagccaggagagcgtcagccttacgcttgagggcggcgaaatcattaacggtaagctgctggtggcggcggacggttcccgttcggcactgggcgcccgctgcggcatcagctggcagcagcagccgtatgagcagatagcgatcattgctaacgtcagcaccgcgttgccccacgaaggtcgcgccttcgagcgctttaccgagcatggcccgctggcgatgctgccgatgtcgcaagggcgctgctcgctggtgtggtgtcatccgcagtcgcgccgcgatgaggtgcagagctggtctgaagaacgcttttgtcaggagctgcagcaggcattcggctggcggctggggcgtattacccacgccgggaagcgcagcgtttatccgctggccctcaccaccgccagccgcgcggtgtcgcaccgcctggcgctggtcggcaacgcggcgcagacgctgcacccgatcgccgggcagggctttaatctcggcctgcgcgatgtgatgagcctggcggaattacttgctgacgcccatctcagcggcgaagatgtcggtcattatccactgctgtgccgctatcaggcgcgcagggcaggggataaagccgccaccatcggcgtgaccgatgggctggtgcatctgtttgccaaccgttgggcgccgctggtggcggggcgcaacgtcggtctgatggcgatggaattatttaccccggcgcgcgatgcgctggcgcagcgtaccctcggttgggttccccgttaa

SEQ ID NO: 138505 - DNA, 267 bp, Enterobacter cloacae
gtgcagcgtgacgcctggcgcctcgcgcagcagaccaaacagccgctggccgacatcgtggagttcaaccacctggcccagcgccgacaggccataatccgcggccgccagattcacaaacccggcatgaccgcggtcgctgacgtgtactcgctggatgggcgtcgcgcgttcggcgaggcgttgccagataccgatacgcgccagctgctggcaggtgcccgcagccagggcgatcgcccggtcgtcaaagccagggtggcgtga

SEQ ID NO: 138506 - DNA, 1317 bp, Enterobacter cloacae
atgactcagcaggaatttctatcgcgtcgccagacgctgttggcgcagatgcagccaggcagcgcggcgctgattttcgccgcaccggaagcggtgcgcagtgcagattcggaatatccctaccggcagaacagcgatttctggtacttcaccggctttaacgaaccggaagcgctgctggtgttgattaaaagcgatgaaacccacaaccatagcgtgctgttcaaccgggttcgcgatctgaccgctgagatctggtttggacgccgtctgggccaggaggccgcgccggcgaagcttggcgtcgaccgggcgctggcgttcagcgaaatcaaccagcagctgtatcagctgctcaacggtctggacgcgatctacttcgcccagggtgaatatgcctatgccgatgagattgtgttcaacgccctcgaaaaactgcgcaaaggctcgcgccagaatctgcaggcgccgaactcggttatcgactggcggcccattgtgcatgagatgcgcctgtttaaatccgcggaagagcttgccgtgatgcgccgcgccggggagatcaccgcgctggcccatacccgggcgatggaaaaatgccgccctggcatgttcgaatatcagctggaaggtgaaattctccatgaattcaaccgccacggggcacgtttcccctcctataacaccatcgttggcggcggcgaaaacggctgtattctgcactacaccgaaaacgaatctgaactgcgcgacggcgatttagtcctgattgacgccggctgcgagtatcgcggctatgccggggacattacccgcaccttcccggtaaacggtaaatttacccagccgcagcgcgagatctacgacattgtgctcgaatcgctggagaccgcgctgaaactctatcggccgggcacctcgatctgtcaggtcaaccaggaagtggtgcgcattatgattaccggcctggtgcggctggggatcctgaaaggcgagattgacgagcttatcgccaacaacgcccaccgcccgtactttatgcatggcctgagccactggctgggtctggatgtgcacgatgtcggtaattacgacaccgaccgttcgcgcgtcctggagccgggaatggtgctgaccgtcgagccgggactgtatatcgccaccgatgccgacgtgccggcgcagtatcgcggcatcggcatccgtattgaagatgacatcgtgattaccgaagacggtaacgaaaatctcaccgccggcgtggtgaggaaggcggatgagatcgaggcgctgatggcggcggcgcgccagtcatga

SEQ ID NO: 138507 - DNA, 585 bp, Enterobacter cloacae
atgcgcatgtctatacagaacgaaatgcctggttacaacgatgtagaccagttactgaaccaacaaggggtaggcctcaccccggccgaaatgcacggtttgatcagcggattgctgtgcggcggcaacacggacagcagctggcagccgctggtgcacgacctgaccaacgaaggtctcgcctttggccatgaactggctcaggcgctgcgtaacatgcattccgccatcagcgattcactggatgacgacggtttcctctttcaactgtatctgccggaaggcgatgcggtgagcgtctttgaccgtgccgacgccctcgccggttgggtcaaccacttcctgcttggtcttggcgttagccagccgaagctggataaagtgaaggatgaaaccggggaagcgattgacgatctgcgtaatattgcccagctgggctacgatgaagacgaagatcaggaagagctggagatgtctctggaggagattatcgagtatgtccgcgttgccgcactgctgtgccacgacacctttgcccgtcagcagccaaccgcaccggaagtccgcaaaccgacattacactaa

SEQ ID NO: 138508 - DNA, 330 bp, Enterobacter cloacae
atgtctgcacaacccgtagatctccaaattttcggccgttcactgcgagtgaattgcccgcctgaacaaagggatgccctgaatcaggcagctgaagaccttaatcagcggttgcaagatttaaaagaacgcactagagtcacaaatactgagcagctggtcttcatcgcggcgttgaacatcagctatgagttgactcaggaaaaagcgaagacccgcgactacgcttccagcatggagcagcgcattcgcatgcttcagcagaccatcgaacaagcattgcttgagcaaggtcgcataagcgaaaagccagggtcgaagtttgaataa

SEQ ID NO: 138509 - DNA, 597 bp, Enterobacter cloacae
atgactatacagcccgataccctgctctcccgtcagcatattcgccagcagatccgcgatcgtcgacgcgcactcagcccggagcaacagcgcctgtttgcccaacaggccgccgagcgaatgatggcctggccgccgatagttctcgctcacaacgtggcgctgtttctctcctttgacggcgagctggacacccagccgctgatcgaccagctctggcgcgccggcaagcgggtatatctcccggtgctgcatccctttagccccggcaatctgctgtttttacactaccatccgcagagccaactgatcgtgaatcgcctgaagatccgcgaaccgaagctcgatgtgcgggatgtgctgccgctggctgaactcgatgtgctggtgaccccgctggtggccttcgatgtcagtggccaacggctgggaatgggcggcggtttttacgaccggacgctgcaaaactggcagcagtatcgcctgcagccggtgggctacgcgcacgactgccagcaggtggatagcctgccgagcgaagagtgggatatcccgctgccggcggtcatcaccccgggaaaaacctggtgttggtag

SEQ ID NO: 138510 - DNA, 1233 bp, Enterobacter cloacae
atggctaaggtatcactggaaaaagacaagattaaatttctgctggttgaaggtgtgcatcaaaaggcaatcgatagccttcgcgcagcgggttacaccaacattgaatttcataaaggcgcgctggattcagaacagctgaaagcgtcgatccgtgatgcccatttcatcggcctgcgttcccgtacccatctgactgaagagattttcgccgcagcggaaaaactggttgccgtcggttgcttctgcatcgggaccaaccaggtcgatctgaacgccgctgcgaagcgcggtattccggtgtttaacgcgccgttctctaacacccgctcggtggccgagttggtgatcggcgaactgctgctgatgctgcgcggcgtgccggaagccaacgccaaagcgcaccgcggggtgtggaacaagcaggcggtcggcagcttcgaagcgcgtggtaaaaagctgggcatcatcggttacggccacatcggtacccagcttggcattctggcggaatcgctgggaatgcacgtcttcttctatgatattgaaaacaaactgccgctcggcaacgccactcaggtacagcatctctccgacctgctgaacatgagcgatgtggtcagcctgcacgtgccggaaaacgcctctaccaaaaatatgatgggtgcggaagaactggcgctgatgaagccgggcgcgctgctgatcaacgcctcccgcggtaccgtggtggacattccggcgctatgcgatgcgctggccagtaagcatctggccggggcggctatcgacgtcttcccgactgaacctgcgaccaacagcgaccccttcacttcgccgctgtgcgagtttgataacgtgatcctcacaccgcatatcggtggctccactcaggaagcgcaggagaacatcggtctggaagtagctggcaagctggcgaaatactctgacaacgggtcaaccctgtcggcagttaacttcccggaagtttctctaccgctgcacggcggccgtcgtctgctgcatatccatgagaaccggccgggcgtcctgaccgcaatcaaccaaatcttcgccgcgcagagcatcaacattgccgcccagtatctgcaaacgtcgccgcagatgggctacgtggtgattgatattgaagcggaagaagatgttgcccagcaggcgctgcaggcaatgaaagcgatcccggggactatccgcgcccgtctgctgttctaa

SEQ ID NO: 138511 - DNA, 660 bp, Enterobacter cloacae
atgacgcaggatgaactgaaaaaagcggtaggttgggcagcactgcaatatgtacagccagggactattgtcggcgtaggcaccggctcgacggcggcccattttattgacgcgctgggcaccatgaaggggcagatcgaaggggcggtttccagctccgacgcctccaccgagaagctgaaaagcctcgggatcaccgtcttcgatcttaacagcgtcgatcgcctggggatctatgttgacggcgcggatgagatcaacggccatatgcagatgatcaaaggcggcggcgcggcgctgacccgtgaaaagatcatcgcctcggtcgcggataaatttatctgcatcgccgacgcctccaagcaggtcgatattctgggcaagttcccgctgccggtggaagtcattccgatggcgcgcagcgccgtggcgcgtcagctggtcaagctgggcggccgtccagagtaccgtcagggcgtggtgaccgataacggcaacgtgatccttgacgtgcacggcctggaaattcttgatgcgatcgcgctggaaaacgcgatcaacggtattcctggcgtcgtcaccgtggggctgttcgccaaccgtggcgccgacgtggcgctgattggcactgccgacggcgtgaagaccatcgtaaaatag

SEQ ID NO: 138512 - DNA, 489 bp, Enterobacter cloacae
gtggcaagttaccgtagccagggacgctgggttatctggctctcgtttcttatcgcgctattgctgcaaattatgccctggccggcggacatcagcgttttccggcccaactgggtattattgatcctgctgtactggatcctcgcgttgccgcaccgggtaaacgtggggacgggtttcgtgatgggggctattcttgatctcatcagcggttcaacgctcggcgttcgcgcgctgtctttaagcatcgtcgcctatctggtcgcgctgaagtatcagctgttccgtaacctggcgctgtggcaacaggcgctggtggtaatgctgttatccctggccgtggatatcattgttttctgggcagagtttttagtgatcaacgtctctttccgtccggaagtattctggagtagtgtagtaaacggcatcctctggccatggctcttcctgctgatgcgtaaagtgcgtcagcaatttgcagtgcaataa

SEQ ID NO: 138513 - DNA, 993 bp, Enterobacter cloacae
atgaagccaatttttagccgtggcccctcgctacagattcgccttattctggcggtgctggtggcgcttggcgtgattatcgccgacagccgcctgggtacgttcagtcaaatcagaacgtacatggatacagccgtcagccctttctactttgtctctaatggtccccgggaactgctcgacagcgtatcgcagacgctagctacccgcgaccagctcgaactggaaaaccgcgcgctgcgccaggagctgttgctgaaaaacagcgatctgctgatgctgggccagtacaagcaggagaacgcgcgcctgcgtgaactgcttggctcgccgctgcgccaggacgagcaaaaaatggttacgcaggtcatctcaacggtcaacgacccttacagcgatcaggtggttattgacaaaggcagcgtgaacggcgtctatgaaggccagccggttatcagcgataaaggcgtcgtggggcaggtcgtggccgtggcgaaaatgaccagccgggtgctgctgatctgcgatgccactcatgcgctgccgatccaggttctgcgtaacgacattcgcgtcattgccgccggtaacggctgcacggacgatctccagcttgagcatctgccggcaaataccgatattcgcgtcggcgacgtgctggtgacctccggtctcggcggtcgtttccctgaagggtatccggtcggggtagtctcctcggtgaaactggacacccagcgcgcctataccgtgattcaggcgcgtccgacggccgggctgcagcgcttgcgctatctgttgctgctgtggggcgccgatcgtaatggcgctaacccgatgaccccggaagaggttcatcgggtggctaacgaacgtctgatgcagatgatgccgcaggtactgcctgcgccggatgcgatggggccgcagatgccggcgcccgccaccgggttgacgccgcctcagccgtcgcagcctgcaggggggcaatag

SEQ ID NO: 138514 - DNA, 1044 bp, Enterobacter cloacae
atgttaaaaaaatttcgtggcatgttttccaatgacctgtccattgacctgggtaccgcgaatacccttatttacgtaaaaggacaaggcatcgtattgaatgagccttccgtggtggccattcgtcaggatcgtgccggatcgccgaaaagcgtcgccgccgtgggtcatgaagcgaagcagatgctcggccgtaccccgggtaatatcgcggcgattcgcccgatgaaggacggcgttatcgctgacttcttcgtgacggaaaagatgctgcagcactttatcaaacaagtgcacagcaacagctttatgcgcccgagcccgcgcgtgctggtgtgtgtaccggttggcgcaacccaggtcgaacgtcgcgctattcgtgaatccgcgcagggcgcaggcgcccgtgaagtcttcctgatcgaagagccgatggcggcagcgattggcgcaggcttaccggtttctgaagcgaccggctccatggtggtggatatcggtggcggtaccactgaggtggcggttatctccctgaacggcgtggtctattcctcttctgtacgtatcggcggtgaccgcttcgacgaagccgttatcaattacgtgcgtcgtaactacggctccctgatcggtgaagcgacagctgaacgtatcaagcatgaaatcggttcggcttacccgggcgatgaagtgcgcgaaattgaagtgcgcggtcgtaacctggcggaaggcgtgccacgcggcttcaccctgaactcaaacgaaattcttgaagcgctgcaggagcctctgaccggcatcgtgagtgcggtcatggttgcccttgagcagtgcccgccggaactggcgtctgatatctctgaacgcgggatggttctcaccggcggtggtgcgctgctgcgcaacctggaccgtctgttaatggaagaaaccggtattccagtcgtggttgctgaagatccgctgacctgcgtagcgcgtggcggcggcaaggcgctggagatgatcgacatgcacggcggcgacctgtttagcgaagagtag

SEQ ID NO: 138515 - DNA, 1941 bp, Enterobacter cloacae
atgcgattaacgacgaagttctcagcctttattacgctgctaactagcctgaccatctttgtcacgctgattggcgcttcgctgagtttttataacggcattgagaacaaggtcgaaaaccgcgttcaggcggtggcgaccatgctggataaccggctcatcaccacctctttcgataagcttgaaccgcagttggatgagctgatgacgccgatcgagatcgtgcatatcgatttcatgctcaacggcaaaccgctctacagccattcccgacccgatagctatcgcccgctcggcagccatgagcaattccgtgagatcacggttcagtcgcttaaacatcctggtattacgctgcatctggtctacgttgacccgatggtgaactatttccgttcgctgtcgatcactgccccgctgtcgatctccattggcttcatggtggtaattattttcttcgccgtccgctggatccgccgccagctggccggccaggagctgctggagctgcgttccacgcgtatcctgagcggcgagcgcgggccgcaggtgcgcgggtcggtctatgaatggccggccagcaccagtagcgcgctggatatgctgctgtcggagctgcagttcgccagcgatcagcgcagccggatggatacgcttattcgctcctacgcggcgcaggattcgaaaaccggactgaataaccgcctgttttttgacaatcagctggccacgctgctggaagaccaggagaaggtgggagcctacggcatcgtgatgatgatccgtctgccggagtttgatctgctacgggacaactggggacgggcggcggccgaagaacattactttacgcttatcaacctgctctctacctttattatgcgttaccccggcgcgctgttggcgcgctatcaccgtagcgacttcgccgtgctgctgccgcaccgtacgttgaaagaggcggatagtatcgccggcctgttgctgaaggcgatggatgcgctgcctccaacgcgtatcctcgatcgcgacgatatgatgcatatcggcatctgttcgttccgcagcgggcaatcggcggcgcaggtgatggaacatgcggaagcggcgacgcgcaacgcggtgctgcagggcagcaacagctggtcggtctatgatgacacccttccggagaaaggtcgcggcaacgttcgctggcgaacgctgatcgaacagatgctgagccgcggcgggccgcggttgtaccaaaaaccagctgtcacccgcgacgggcgggtacatcatcgtgaactgatgtcgcggatgtacgacggtaaagaagaggtgattgcagcggaatacatgccgatggtgctgcagtttggcctggcggaggagtatgaccgcctgcaggtaacgcgcctgctgccgtttttaggcttctggcccgaggagaatctggcgctccaactgtcggtggagtcgctgatccgtccgcgtttccagcgctggctgcgcgatgccttgatgcagtgtgaaaaatcgcagcgtcagcggattatttttgaacttgcagaggcagatgtttgtcaatatatcggccgtctgcagccggttatgcgattggttaacgctctgggcgttcgggtggcagtggttcaggcggggttaaccctggttggaaccagctggatcaagcagctggatgcggagctgatcaaactgcatccgggtctggcgcgcaacatcgaaaagcgcagcgagaaccaactgctggtgcaaagcctggtggaagcctgtaaaggcatgcctatgcaagtttttgcgacgggcgtacgcagccgcagcgagtggttggtactgtcccaatgcggtgtcacgggcgggcagggggaattttttgccgcctcacagccacttgacacaaatgtgaaaaaatattcgcaaagatactcggtttga

SEQ ID NO: 138516 - DNA, 1002 bp, Enterobacter cloacae
atgaaaagaaaaaaactgacggaagccgacgtcacggccgaatccgtttttatgctcaagcggcgccaggtgctgaaaatgctgggtatcagcgcgacggcgctttcgcttcccgccgccgcgcaggccgatctgctggactggtttaaaggaaatgaccgcccgccggccccggcgggcaaggccctggagtttgctaaacccgccgagtggcaggctaatctgacgcttaccccggaagataaggtcgccggttacaataatttttatgaattcggcctcgataaagccgatccggcggcgaacgcgggtagcctgcgcaccgatccctggacgctcaccatcggtggcgaagtggcgaaacctctgacccttgaccatgacgatctgaccaaacgcttcccgctggaagagcgcatttatcgtatgcgctgtgtggaagcctggtcgatggtggtcccctgggtcggcttcccgctgcataaactgctggcgctggtggagcccaccagcagcgcgcgctatgtggccttcaaaaccctctatgctccggatcaaatgcccggccagaaagaccggtttatcggcggggggctcgcttacccttacgtggaggggctacggctggatgaagcgatgcacccgctgacgctactcaccgtcggggtgtatggcaaagcgctgccgccgcaaaacggcgcgccggtccgcctgaccgtgccgtggaagtacggttttaaaggcataaaatccattgttagtatcgagctgacccgcgagcggccgccaaccacctggaacctggcggcgccggacgaatacggcttcttcgctaacgtcaatccgcacgtcgatcacccccgctggtcgcaggctagcgagcggtttatcggcgccggcggcgtgctcgatgtgaagcgtcaaccgacgttgctgtttaatggctatgccgacgaagtggcgtcgctgtatcgcggcatgaatctgcgggagaacttctag

SEQ ID NO: 138517 - DNA, 609 bp, Enterobacter cloacae
gtgcgtttcaccgtcaaacagatcgtctggctgaaggttttacttcaccttgcggggtttttgccgctggtctggttattctgggccgggcaccagggctactttagcgccgatccagccaaggatatccagcactttaccggcagaatggcgcttaagtttctgctggcgacgctgctggtctctccgctggcgcgctatgcgaagcagccattattgattcgcgttcgtcggctgttaggtttatggtgttttgcctgggcgacgctgcacctgaccagctataccctactggagctgggcattaacaatctggctctgctgggctcggagattatcacccgcccctatctgacattgggcatgatcagctgggcgattctgctggcgctggcggtgacctccacgcaagcgatgcagcgaaaactggggcgtcgctggcaacttttacacaacttcgtctatctggtggcgatcctcgcgccgatacactacctgtggtcagtgaagatcgtctcgccgcagcccgttatatatgccctgctggcagcggggctattgacatggcgttacaagaagttccgccagtggtggcgctcaatccggtaa

SEQ ID NO: 138518 - DNA, 453 bp, Enterobacter cloacae
atggcagtgaagtttcacattttgcttttgaatggtccaaacattaacatgctcggtacccgcgagcctgagaagtatggccctctcacgctggctgaaattgttaaccgtttaacatctgaagcggcggcgctgaatgtgagtctggatcacctgcagtccaacgcggagcatgcgttaatcgaccgaattcatcaggctaaagacaacgtggactatatcctgattaatccggccgcgttcacgcataccagcgtagcaatccgtgacgctttgctcgccgtgaacatcccgtttatcgagattcacctgagcaatgtgcatgcacgcgaacccttccgccagcactcgtatctgtcagatgtcgccgctggcgtcatttgcgggctgggggcggatggttattcatacgctttacagacggcggtaaaacgcctgtcacaatcacactaa

SEQ ID NO: 138519 - DNA, 468 bp, Enterobacter cloacae
gtgagacgggccatcaacggttttctgagtagcggtggtagcgtggacggtggtcatcaggccttcaacgataccgaagttgtcgttgataactttagccagcggcgccaggcagttggtggtgcaggaagcgttggaaacgatgtcctggccagcgtaagcgtcgaagttagcgccgcgaacgaacatcggagtgttgtctttggacgggccagtcagaacgacttttttcgcgccagcggtgatgtgtttacgagcggtttcgtcggtcaggaagataccggttgcttcagcaacaacgtcaacaccaacttcgtcccacttcaggttagccgggtcacgttcagcggtaacacggatttttttaccgttaacgaccagatgaccgtctttcacttcaacggtaccgtcgaaacgaccgtgagtggagtcatacttcagcatgtaagccatgtactctgcgtctaa

SEQ ID NO: 138520 - DNA, 414 bp, Enterobacter cloacae
atggcgaataaacccaccccggaagagctgaaaaatggcttgagcgaaatgcagttttacgtgacgcagcatcatggcaccgaaccgcctttcaccggacggctgttgcacaacaagaaaaatggcgtgtaccactgcctggtgtgcgatgcgccgctgtttaactcccagactaaatacgactccggctgcggctggccgagcttctacgagccggtaagcgcggaggccattcgctatctgaccgacaattcgcacggcatgcagcgcattgagatccgttgcggaaactgtgatgcccatctcggccacgtgtttccggatggtccgcagccgaccggcgagcgctattgtgtcaactcggcatcgctgagcttcaccgatgagcaaaatggcgagcaaatcaagggttga

SEQ ID NO: 138521 - DNA, 279 bp, Enterobacter cloacae
atggatattgagcaaattatcgacagtatgacgccggaagtgtatcagcgtctggcgacggcggtagagctgggaaaatggccggatggcgtcgcgctgacgccggagcagaaggaaaatagcctgcagctggtgatgctctggcaggcccggtataacaccgacgcccagcacatgaccattgacaccagcgggcagatggtaatgaagagcaaacagcagctgaaagaggattttggcatcgtgccgaagccgatcgccaccgttaaactgcaataa

SEQ ID NO: 138522 - DNA, 345 bp, Enterobacter cloacae
atggcctatatccccaaaaattacgcacgtctggaagtgggttaccgcgaaaaggcgctcaagctttttccctgggtgtgcggacgctgctcacgggagtttgtctactccaatctgcgcgagctgacggtgcaccacatcgatcacgaccactccaataacccggaagatggcagcaactgggagatgttgtgcctgtactgtcacgatcacgaacattccaagtacaccgaagccgatcagtatggctccacggtggtggcaggagaagatgcgcaaaagagcgtcggcgaggccacctacaacccgtttgccgatctgaaagcgatgatgaacaaaaagtaa

SEQ ID NO: 138523 - DNA, 1254 bp, Enterobacter cloacae
atgaaacgtttgcccttgctggcagctttgcccttgctttgcgcttccgcgctctctgcccaaccgctgatgtccgtcggctattttaatggcggcggcgacgtcaccgccgggccgggcggtgatatcgataagctggacgtccggcagatcacccatctcaactactcgtttggccttatctataacgatgaaaaagacgagaccaatgcggccctgaaggatcctgctcatctgcacgagatctggctgtcgccgaaggtgcaggcggatctgcaaaagctccccgccctgcgtaaacagaatccggacctcaaagtcctgctgtcggtcggcggctggggcgcgcgtggtttctccggcgcggcggcgaccgcagaaagtcgcgccgtctttattcgttccgcgcagaaaatcatccagcaatatggtctggacggcattgacctcgactgggagtttccggtcaacggcgcctggggactggtggccagccagccggctgaccgcgacaacttcactgccctgctgaaatcgctgcgtgaggcagtcggtgagcaaaagctggtgactatcgccgtgggcgccaatgccgagagcccgaaaagctgggtggacgtcaaagcggtggccccggtgctgaactacatcaacctgatgacctacgacatggcctacggcacgcagtacttcaactcgaatctgtatgactccagccactggccgacggtcgccgcagcggataaatacagcgccgattttgtggtcaacaattacctggccgccgggcttaaacccagccagatgaacctcgggattggtttttatggccgggtaccgaaacgggcggtcgagccggggattgactggacgaaagcggatgcgcaaaacaatccggtcacccagccctattttgggccacaacagatcgcactgtttgcctcgctgggctatgacctgagcaaagacacctacgtgaaatacaatgatatcgtgggcaaactgctcaacgatccgcaaaagcgttttaccgagcactgggacgatgaggcgaaggttccgtggctgtcggtgcagtccgtggagggcaagccgctgttcgccctctcctatgagaacccgcgctcggtagccattaaggcggactatatcaaggcgaagggcctcgccggggccatgttctgggaatatggcgccgatgaccagaatcagctggcccgtcagctggcggaatcgctggggatcaaacactaa

SEQ ID NO: 138524 - DNA, 642 bp, Enterobacter cloacae
atggcacatcgagcgctgttactggttgatttgcagaacgacttttgcgccggcggcgcgctggcggttcctgaaggcgacagtaccgtcgaggtagccaatgcgcttatcgactggagcctggcgcgcggcgagcccatcgtcgccagccaggactggcatccggcggatcacggcagtttcgccagccagcaccaggtggaaccctacaccgagggcgagctggacggcctggcgcaaactttctggccggatcactgcgtgcagcacagcgaaggcgcggcgctgcatccgctgctcaagcagcaggcgatcgccgctgtgtttcacaaagggcaaaaccggagcatcgacagctatagcgctttctttgacaacggtcaccggcagaaaaccgaactggacggctggctgcgtggtcaggggatcgtggagctgaccgttctcggcctcgccaccgattactgcgttaagttcaccgtgctggatgccctggcgctgggctacgcggtcaacgtcatcaccgacggctgtcgcggcgtaaatctgcagccgcaggacagcagccaggcgtttatggagatggccgccgcgggcgccacgctctataccctcgacgactggcgggaaactcaggcttga

SEQ ID NO: 138525 - DNA, 1020 bp, Enterobacter cloacae
atgcaaaaaaaatcgatttacgttgcctacaccggtgggaccatcggtatgcagcgctctgaacacggctatgtacccgtttccggccatctgcagcgtcagctggcgctgatgccggagttccatcgtccggagatgccggacttcacgatccatgaataccatcccctgatggattcatccgatatgacccccgaggactggcagcacatcgccgacgatatccgcagccattatgaggagtatgatggctttgtgatcctccacggaaccgacaccatggcgtttaccgcctcggcgctgtcgttcatgctggaaaaccttggtaagccggtcattgtgacagggtcacaaattccgctggccgagctgcgttccgatggtcagattaacctgctcaacgccctgtacgtcgccgccaactatccgattaacgaagtggcgctgttcttcaacaatcgactgttccgcggcaaccgcaccaccaaagcccatgccgacggcttcgacgctttcgcctcgccaaaccttgccccgctgctggaggccgggatccatattcgccgtctcggtactccgccggcgccgcagggtagcggagagcttatcgtgcaccccatcactccgcagccgattggcgtggtgacgatttaccccggcatctccgccgacgtggtgcgtaattttctgcgccaaccggtgaaagcgctgatcctccgctcctatggcgtcggcaatgccccacagaatggcgaatttattcaggtgctggcggaagccagccagcgcggtattgtggtggtcaatctgacgcagtgcatgtccggaaaggtgaacatgggcggctatgccaccggcaacgccctcgctcaggcgggggtcatcagtggtttcgatatgacagtggaagcgacgctgaccaagctacactatctgcttagccagcagctggacgttgacgccattcgcgcggcgatgcagcaaaatctgcgtggcgaactcacccccgacgaggcttaa

SEQ ID NO: 138526 - DNA, 1851 bp, Enterobacter cloacae
  misc_feature (1184)..(1193): n is a, c, g, or t
atgcgaaccctttggcgactgattgccagcttttttaaatggacgtggcggatactcaactttattcgcaaactggccctcaatgcgatcttcctggtgctggtgctggtgtgtatcggcatctggagccagttcagcagcaccaccagcgaacatgccgcgcgcggcgcgctgttgctggatattaccggcgtggtggtggataaaccatccgccagcagcaagctcggcgtgattggccgccagctgtttggcgccagctcggaccgtctgcaggagaactccctgttcgatatcgtgcagaccattcgccaggcgaaggatgaccgcaatatcaccggtattgtgctggatttgaaaaacttcgtcggcggcgaccagccatccatgcagtacatcggcaaagcgctgcgcgaattccacgatagcggcaaaccggtgtatgccgtcggcagcagctacagccagggccagtactacctggcgagcttcgccaacaaaatctggctctcgccgcagggcgaggtagacctgcacggcttcgctaccaacgggctatattacaaatcgctgctggataagctgaaggtctccacccatgtattccgcgtcggcacctataaatccgccgtcgagccattcatccgcgatgatatgtcccctgccgcccgcgaagcggatagccgctggattggcgaactgtggcagaactacctcaacaccattgccgccaaccgccagatcaccgcccagcagctcttcccgggcgcccagggcattatcgatggcctgcgtaaggtgggcggcgatacggcgaaatatgcgctggacaataagctggtggatgagctggcgacctccacggaagtggaaaaggcgctgaccaaacagtttggctggagcaaagcggataacaattaccgggcgatcagctactacgactacaacgtgaagacgccgtctgaccagggttccgccatcgcggtaatcttcgccaacggcgccatcatggacggtgaagagaccccgggcaacgtcggcggcgacaccaccgcagcgcaaattcgcgatgcgcgcctcgatccgaaaattaaggccatcgttctgcgcgtaaacagcccgggcggcagcgtaaccgcttcggaaatcattcgtgaagagctggcggcagccaaagccgccgnnnnnnnnnnggtctcgatgggcggcatggcggcgtccggcggctactggatctccaccccagcggattacatcgtggcgaacccaagcaccctcaccggctccattggcatctttggggtgatcaacaccgtggaaaataccctcgggtcgattggcgtccacaccgacggcgtcgccacgtcgccgctggcggatgtctccagcaccaaagcgctgccgccggaagtgcagcagctgatgcagttgagcattgagaatggctatcagcgctttatcaccctggtggctaacgcccgtaagagcacgccggagaaaatcgatcagattgcccagggccacgtctggaccggggaagatgccaaagccaacggcctggtcgacagcctcggcgacttcgacgacgcggtggccaaagcggccgagctggcgaagctgaaaacctggcacctcaactactatcaggaagagccgaccttcttctcgatggtgctggacagcctgaccggctcggtacgcgcctcgctgccggcggccattcaggcctggctgcctgcgccggtcgccgcggcggccgagacggtgaaagcggagagcgacaagctggcggcgtttaacgacccgcagaatcgctatgccttctgcctgacctgcgctaacatccgttaa

SEQ ID NO: 138527 - DNA, 552 bp, Enterobacter cloacae
atggatgctctcgatctactgcttaatcgccgcagcgcttcccgcctggcggaacctgccccggcgggtgaacagctggaaaacattctgcgcgccgggctgcgcgccccggatcatggcaccctgcagccgtggcgcttctttattatcgccgatgacggccgcgagcgcttcagccagttgctggaaaaaggggccagagaggccggccaggatgagaagggaattgagaaagcccgcaatgcgccgttccgcgcgccgctgattattaccgtggtcgcgcgctgtgaagaccaccctaaggtgccgcgctgggagcaggagatgtccgctggctgcgcggtgatggcgatgcagatggcggccctggctcagggattcaacggtatctggcgcagcggagcattgaccgagagtccggtggtgcgggccggcttcgagtgccgcgaacaggataaaattgtcggcttcctctatctggggacgccgcagctaaaagcctcaaccaccattgccctgccggataccgcgccgtttgtgacgcgattctga

SEQ ID NO: 138528 - DNA, 129 bp, Enterobacter cloacae
atgccttacccggcctacagccccaaatcaccgctggcgctggggtcgctgaaactgccggtgctggcggcctcaacatcgctgagacgttcccggaaggccggggcagcccgcatggatgcgggctga

SEQ ID NO: 138529 - DNA, 609 bp, Enterobacter cloacae
  misc_feature (571)..(580): n is a, c, g, or t
atgaacaaaatcagagccgccgtggtcggcgcgggtatctacggcaaacaccatatgaacgcgtaccgccataacccggacacggtgctggtcgccatctgcgacaccgacacagagcgctgcgacgaccttgccatgtcatacggcatcatgggctatacccggctggaaacgctgctggaagaggaagccatcgacgtggtctcggtggcgacgccagacccgtaccacaccgaatccatcctcaccgcgctgcgctacggcaaacacgtgctggcggaaaagcccctcgccacctcggtacgcgaatgcgagcttatcgtggagatggcgcagcagcgggacctgctggtcggcgtcgatttccacaagcgctgggacccggcggtgatgcgcattaaggctgaactggataagccggaagccgggcgcatcctgcgcgggcatatcagcatggacgacgtgataagtgtgccgacggagtggctgaactgggcgggcgcaagctccccggtgtggtttctcggctcacactgctttgacctggtgcgccacctctccggacaggaannnnnnnnnnggtgtacgccgtcgggcagaagcggttga

SEQ ID NO: 138530 - DNA, 408 bp, Enterobacter cloacae
atggtcgaatgcggcctcgacaccttcgacagcgtgcagagcctgctgacgatggccgacggcagttcgtgggtggtggaaaactcatgggtgctgccggaaggcttcccgaaggacaacgacgggcgcatcgatatcctctgcgaggccacttatatccgcagcacctcgcagcatcgcgggctggaaatcatcacgccgggcatgacgctcacgcccaacagctatttcatcaactaccgcaacggcgttgccagcggttttggtatcgaccccatcaatgactttgtgcgcgcggtcaggaacaggtcaccgtacccggtgacggcagaagacggactggcggtcagccggatctgcgaggcggtacaccagagtctcgagagcaggaaatctgaaactatttaa

SEQ ID NO: 138531 - DNA, 495 bp, Enterobacter cloacae
atggatgttaagataaatttatatgatggaaatgttaataagcatttagataaactaacattaggtctgtacggctatagtgacagaacaaaagctagaccaatcgttcgagggaatgatggtattcctaatgtaaaccaaagtcgtaatgtcactcacccagtaattttcctaagtttagccagattacttcctattacattgcgtacagattattctaccagggatgttcaatatattaaagataacgctgaagatatcagagttatgaataatcaattattgttaaaaaccagcggtagtgctgtaacagctactcaaggaactattgattcaatagttgttcatggcgaaaattatgatcatgaatctgtatcagttggagaagataacgttggacaaataattcaggctattttttcgttcaaaagacttaaagaaacatatcctgattatcatggtggcattctcttaattgatgaggctgatgcgtaa

SEQ ID NO: 138532 - DNA, 1305 bp, Enterobacter cloacae
atgactacgccattgaaaaaaatcgtaattgtgggtggcggcgctggcggactggaactggcaactcagctggggagaaagttagggcgccataagaaagcgaaaatcactctggtggaccgtaaccacagccatctgtggaagccgctgctgcacgaagtggccaccggttctctggatgaaggcgttgatgcgctgagctatctggcccatgcccgcaaccacggtttccagttccagctgggctcggtggttgatatcaaccgcgaagggaaaaccatcaccctcggcgagctgcgcaatgaaaaaggcgagctgctggtggctgagcgtaaactgccgtacgacacgctggtcatggcgttgggcagtacctcgaatgactttaatacccctggcgtaaaagagaactgcattttcctcgacaacccgcaccaggcgcgtcgcttccatcaggaaatgctcaacctgttccttaaatactctgctaacctcggcgctaacggtaaagtaaatatcgccatcgtcggcggtggcgccaccggcgtggagctctccgctgagttgcacaatgcggtgaaacagctgcacagctacggctacaaagggctgaccaacgaagcgctgaacgtcacgctggtcgaggcgggtgagcgcattctgcctgcgctgccgccgcgcatttccggggcagcgcataatgagctgactaagctgggcgtacgggttctgacgcagaccatggtcaccagcgcggatgcgggcggcctgcacactaaagatggcgaatatattgaggcggatctaatggtctgggcggcggggatcaaagcgccagatttcatgaaagagatcggcggcctcgaaaccaaccgtatcaatcagctggtggtcgagccgacgctgcagactacccgcgatgcggatattttcgccatcggcgactgcgcctcctgcgcccgtccggaaggcggctttgtgcctccgcgggcccaggcggcgcaccagatggctacctgcgcgctgaacaacatcctggcgcagatgaaaggcaaaccgctgaaggcatacacctataaagaccatggctcgctggtgtcgctgtcaaattactccaccgtcggcagcctgatgggtaacctgatgcgcggttcgatgatggtggaagggcgcattgcgcgcttcgtgtacatctccctgtaccgtatgcaccagattgccctgcatggttacttcaagaccggcctgatgatgctggttgggcgcatcaaccgcatcattcgcccgcgcctgaagctgcactaa

SEQ ID NO: 138533 - DNA, 540 bp, Enterobacter cloacae
gtgaataaatctatgttggcgggtatagggataggcgtggctgccgcgctgggcgttgcagctgtcgctggtctcaacgtgttggatcgcggcccgcagtatgcgcaagtggtctccagtacaccgattaaagaaaccgtgaaaacgccgcgtcaggaatgccgcaatgtcacggtgactcatcgtcgtccggtacaggatgaaaaccgcatcgccggttcggtgctgggcgcggtggcgggcggggtgattggccaccagtttggcggcggtcacggacgcagcgtggcgacggtcgtaggtgcgctgggcggcggctatgcaggcaaccagatccagggcgcgatgcaggacaacgacacctacaccaccacccagcagcgctgcaaaacggtgtatgacaaatccgataaaatgctcggctatgatgtgacctataagataggcgatcagcaggggaaaatccgcatggatcacgatcccggcagccagatcccgctggacaacaacggccagctggtcctgaacaacaaaatctaa

SEQ ID NO: 138534 - DNA, 2190 bp, Enterobacter cloacae
atgaaaaagcgcctctgggtgctccaccctctgctgctggccagcacgctgcctgcgctggcggctcagtctgatgaagacagcatcatcgttagcgcaaaccgcacccatcgcaccgtggccgaaatggcccaaaccacctgggtcattgagggccaggagattgagcagcaggtccagggcgggaaagagttcaaagacgtgctggcgcagctgatccccggcatcgacgtcagcagccaggggcggaccaactatgggatgaacatgcgcgggcgcgcgatcgtcgtgctgattgacggcgtccgactcaactcctcacgcaccgacagccgccagctcgacgccatcgatccattcaacatcgaacatatcgaagtgatctccggagcgacctcgctgtacggcgggggcagtaccggcgggcttatcaacatcgttaccaaaaaggggcagcaggatcgtcaggtcgatcttgaggtgggcagcaagagcggttttgcgaacagcaacgatcatgatgagcgcgtcgcggcggccgtcagcggcggaacagaccacgcatccggccgcttgtcggtagcctatcagcgtttcggcggctggtacgacggcaataacgatgcgctgatcctcgataatacccaaacggggctccagcactctgaccgcctcgacgtgatggggacggggacgattgagatcgatgataaccgccagctgcagctggtcacccagtattataaaagccagggcgatgatgactacggtctgtggctcgggaagaacatgtccgcggtcaccagcggcggcaaagcgtataccaccgacgggctcaattccgatcgtatccccggcaccgaacgccatctgatcagcctccagtactccgatgccgactttttcggccagaatctggtgagccaggtgtactatcgcgatgagtccctcaccttctatccgttcccgacgctcacgaaaggtcaggtcagtagcttctcctcgtcgcagcaggataccgatcagtatggggccaagctgaccctcaacagccaaccgctggcggggtgggatctcacctggggtctcgacgccgatcatgagacctttaatgccaaccaaatgttcttcgatctgccacaatcgatggcctccggcgggttgcacaacgaatcgatctacacaaccggccgctacccgggatacagtatttccaatgtcgcgccattcctgcagtccagctacgatctgaacgatatctttaccgtcagcggcggggtacgctaccagtggaccgaaaaccgggtcgacgactttgtcggctacgcccagcagcaggatatcgccaacggcaaagcgcgctccgccgacgccatcaaaggcggcaaaaccgattatgacaatttcctgtttaacgccgggatcgtggcccacctgaccgagcgtcaacaaacctggtttaacttctcgcagggcgtcgagctaccggaccctggtaaatactatggcatcggtaaatatggcgcggcggtgaatggtcatctgccgctgatctccagcgtcaacgtcgatgactcgccgctgcaggggatcaaagttaactcgtacgagctgggctggcgctacactggcgataacctgcgcacccagctggcggcgtactactcgacctcggataagaccattgtcgtcaaccgcaccgacatgaccatcgacgttcagtccgacaaacggcgtatttacggcgttgagggggcggtcgactactttattccggatagcgactggagcgtcggcggtaactttaacgtgctgaaatcccaggtgcagaccgacggccgctggcaaaaatgggacgtcaccctcgcctcgccgtctaaagccaccgcctgggtggggtgggcgccggatccgtggagcctgcgcgtgcagagtcagcaggtatttgacctcagcgatgccgccggtaacaagctggaaggctataacaccgtcgattttatcggtagttacgcgctgccggtggggaaactgaccttcagtatcgaaaacctgcttaacgaagactatgtcactatctggggccagcgcgcgccgctgctctacagcccaacctacggcagttcatcgctgtatgagtacaaaggtcgtggccgcacctttggtctgaactacgccttaaccttctga

SEQ ID NO: 138535 - DNA, 570 bp, Enterobacter cloacae
  misc_feature (17)..(26): n is a, c, g, or t
atgcggcgctggacaannnnnnnnnncttctggcagcacggctatgaggcgacctcgctcgccgatctggtcgaggcgacaggagcaaaagcccccaccctgtatgcggaatttgtgaataaagaaggcctattccgcgcagtgttggatcgttacatttcgcgctttgccgcgaagcacgaagccgtgctgtttgccgagggaaaatccgtcgatcgcgcgttgcgtgactacttcacggcggtcgccacctgctttaccagcaaagagacgccggccggctgctttatcatcaatacctccgccgcgctggccgcctcctcgacggatatcgccaataccatcaaatcccgccatgcgatgcaggagcaggcgctaacccagtttctgcagcagcggcaggcgcagggcgaactgcccgcgggccgcgatgtcgcgcagctggcgcaatttcttaactgcgttctgcaggggatgtcgattagcgcccgggaaggcgcggatttcgacaagctgatgcaaatcaccgacaccactctccgtctctggccgcaggtcctcgagtcctga

SEQ ID NO: 138536 - DNA, 258 bp, Enterobacter cloacae
atgaaaaccgttaatactctggctattgccgccgttttaagttccctttctttcgccagctttgccgctgtagaggtgcagtccacccctgcaggacagcataaagtaggcaccatctctgcttctgccgggactaacctgggctcgctggaagaccagctggcgcagaaagcggatgagatgggcgccacttcataccgtattacttcggtaaccggtccgaatacccttcacggtaccgccgttatctacaagtaa

SEQ ID NO: 138537 - DNA, 960 bp, Enterobacter cloacae
atgagaaaccgtttccccgtgacgctttggctgacgctagtcgcgttagtcgccgcgctggccctccccgcgcgcgctaacacctggccccttcccccgccgggcagccggctggtgggtcagaatcagtttcatgtggtacaggatgacggcggttcgctggaagcgattgccaagaagtacaatgtcggcttcctggccctgctgcaggccaatcccggggttgacccctatgttccgcgcgccggcagcgtgctgaccatccccctgcagacgctgctgcccgatgcgccgcgcgaagggctggtgataaacctcgccgaactgcgcctctactattacccgccgggcaaaaatgaagtgaccgtctacccaatcggcatcggccagctgggcggaaccaccatcacaccgacgatggtcacaaccgtgtccgacaaacgggccaatccgacctggacacctaccgccaacattcgcgcgcgctacaaggctatggggattgagctgccggcggtagtgcctgctggtcctgacaatccgatgggccatcacgccatccgcctcgccgcctatggcggagtctatctcctgcacggcaccaatgccgatttcggcatcggtatgcgcgtcagttccggctgcattcgtctgcgcgataacgatatcaaggcgctgtacaacactatctcgccgggcacgaaggtgaacattatcaacacgccgatcaaggcgtcggttgagccggatggccgccgtctggttgaggtccatcagccgctgtctgagcatatcgatgacgacccgcagaccctgcccattacgcttaatgcggccatgactgcgttcaaacaggcgccgcagaccgacgggacggtgatggagcgcgcgatgaattatcgctcgggcatgccgattgacgtcacccgtcatgctgagcctggaccgcagtcgttgtag

SEQ ID NO: 138538 - DNA, 267 bp, Enterobacter cloacae
atgaaacgcgcaatgatcatcgcatcccttggcctggcttcccttctctctttcggtgccagcgcggctgtccagcaagtgaacgcagagcaagcccaaaatctgcaatccatgggcaccatctccgtatcccaggtaggtagtgcgccaatggacatgcgtcaggaactggcggctaaagccgagaaagaaggcgccagcagctaccgtattattgaagcacgtaccggcgatagctggcacgccaccgctgagctgtacaaataa

SEQ ID NO: 138539 - DNA, 276 bp, Enterobacter cloacae
atgaccacctatacgtttgattttgacgaaatcgccgaacaacaggatttctaccgggagttttcccgaaccttcgagctggctcaggataaggtcaacaacctggattcgctatgggacgcagtgaccggtggcctgctaccgctgccgctggatattgagttcatccatttaaatgacaagcagcgccggcgctttggcgcattgattttattgtttgatgaagcagaggaagagctggagggggagttgcgttttaatgcccgacaagcataa

SEQ ID NO: 138540 - DNA, 1968 bp, Enterobacter cloacae
atggggacatataccattgctccccggcatctccgctttgccattaagcttgcatgcgcggtggtgctggcgctgtttgtcggtttccattttcagctcgaaacgccgcgctgggcggtactgacggcagcgatcgtcgccgccgggccggcctttgctgctggcggcgaaccgtactccggcgcgatccgctatcgcggtatgttgcgtattgccgggacctttattggctgtattgcggcgctggttatcatcatcctgatgatccgcgcgcctctgctgatgatgctggtctgctgtctgtgggccgggttttgtacctgggtttcgtcgctggtcaaggtcgaaaactcctatgcctgggggctggccgggtacaccgcgctgattatcattattaccatccataccaatccgatgctggcgccgcagtttgctgtcgaacgctgcagcgaaattgtcatcggtattgtcagcgccatcgtcgccgatctcctgttttcgccgcgttcgattaaaaaagagatcgacctcgagctcgataatctgctaattgcccagtataagctgatgcagttatgcgtcgcgcacggtgaaaaagaggaagtggatcaagcctggggagcgctggtacgccgcactacggcgctggaaggtatgcgtagtaacctgattatggaatcctcacgctgggcaaaggccaatcagcgcctgaaggcgatcaacaccctttcgctaacccttatcacccaggcttgcgaaacctatctgattcagaactcacgcccggaaatggtcacggacgactatcgcgagctgttcgccgagccggttgagacggtgcaggatgttcaccagcagctgaagcgcatgcgccgcttcctgacctggaaaggcgagcataataccccggtcacgatttatagctgggtgggcgccgccacgcgttacctgctgcttaagcgcggcgtggtggggaatactaaaatcagccgtatcgaggatggcgtgttgcgcggcgaaacggtggttaaagtggagtccgccgaacgtcatcacgcgatggtgaacttctggcgcacctctgtctcctgtattctcggaacgctattctggctgtggacgggctggacctcaggcagcggcgcgatggtaatgatcgccgtggttaccgcgctggcgatgcgcctgcctaacccgcgtatggtggcgatagacttcctctatggcaccctggcggcgttaccgttgggcaccttgtacttcctggtgatcatgccggcgacgcagcagagcatgctgttgctttgcatcagcctggcggcgatggcgttctttatcgggatcgaagtgcagaaaaggcgtctcggatcgctgggggcgctggcgagcaccatcaacattctggtgctggataatccgatgcagttccagttcagccagttcctcgatagcgcgctggggcagatcgtcggctgtttcctcgctctgatggttattcttattgtcagggataactcccgggccagaaccggtcgggtgctgctgaaccagtttgtctccgcggcggtctcttcgctgaccaccaactcggcgcgtcgcaaagagaatcatctgcccgcgctctatcagcagctgtttttattactcaataaattcccaggtgacgtcgcccgtttccgtctggccttgacgttaatcatcgcccatcagcgcttgcgcgatgcgcccgtgccggtgaacgacgatctctccgccttccatcgtcagctgcgacgtaccgcggaccatgtgatctccgccggcagcgatgataagcgtcggcgctattttacccagctgctggcggagcttgatgtctatcaggagaagctgcgggtctgggaggcctcgccgcaggtcaccgagccggtacggcgactggttgagatgttgcataagtaccagcatgtgctgaccagcagctaa

SEQ ID NO: 138541 - DNA, 933 bp, Enterobacter cloacae
gtgaaaacactaacaagaaatatcctccgtactgccattaccgtgatactggtcattctggccttcgtggcgattttccgcgcctgggtttattacaccgcctcgccgtggacgcgtgatgcgcgctttagcgccgacattgtggcgattgcccccgacgtctccgggctgatttctcaggtaaacgtcaaggataaccaactggttaagaaagaccaggtattgttcgttattgaccaacctcgttaccaaaaagcgctggcgcaggcggaagctgatgtcgcctattatcagacgttagctcaggaaaaacgcgtcgaagccggtcggcgtaataagcttggcgtacaggcgatgtcgcgggaagagattgatcaggcgaacaacgtactgcaaaccgttgaacatcagctggcgaaagcggtggctagtcgcgacctggccaggctagatctggagcggacggtcattcgcgcccctgcggatggctgggtgactaaccttaacgtctacactggggaatttatcacccgtggctccacggcggtggcgctggtgaaagagaatacgttttacgtcatggcctatctggaagagaccaaactggagggcgtccgtccaggctatcgtgcggagattaccccgctgggcagcagcaaaaccattaaagggacggtggacagtatcgctgcgggggtgaccaacgccagcagcagcagcgactcgaaagggatggcctcggtcgactccaaccttgagtgggtgcgtctggcgcagcgtgtgccggtgcgtattcgcctcgatcaccagcaggggaatctgtggccatcgggcaccacggcgacggtagtgatcaccggtcaagaagatcgtgataccagccaggccaacttcttccagaaactggctatgcgcctgcgcgaattcggttaa

SEQ ID NO: 138542 - DNA, 204 bp, Enterobacter cloacae
atgagtctgtttcctgtcatcgtgattttcggcttatcgtttccgccgatcttcttcgagttgcttttgtcgctggctatcttttggctggtgcaccgactgctggttccgaccggcatttacgattttgtctggcacccagcactgtttaatacggcgctctattgctgccttttttatttgatatcgcgcttgttcgtttga

SEQ ID NO: 138543 - DNA, 930 bp, Enterobacter cloacae
atggaacgattaaaacgcatgtccgttttcgccaaagtggtcgaattaggttcattcaccgcagcggcccgccagcttcagatgagcgtttcctcgatcagtcagaccgtcgccaaactggaagatgagctgcaggtaaagctgctcaaccgcagcacccgcagccttggcttaactgaagcaggtaaaatctattaccagggctgccgtaggatgctgtttgaagcgcaggatgtccatgagcaattatacgcatttaacaatacccccatcgggacgctgcgcatcggctgctcttcaactatggcacagaatgttctggcgcgcataacggcgaaaatgctcaaagaataccccgggctctctgttaatctggtcaccggcatacctgcgccagacctgatcgccgacggccttgacgtggtgatccgcgtgggcgccctgcaggattccagccttttttcccgccgcctgggctcaatgccgatggtattatgcgccgctaaaagctatctggcgcaggctggcaatccagagaaaccggccgaccttgccggacatgcctggctggaatatagcgtgcggccggacaatgagtttgtcattatcgcgccggaagggatctcgacccgcctgaccccgcaggggcgcttcgtgaccaacgaccctatgacgctggtgcgctggctgaccgccggggtgggtatcgcctatgtaccgttaatgtgggcgatcgaagagatcaaccgcggtgaacttgagatcctgctgcccagctatcagtccgatccgcgaccggtctacgccctgtatacggaaaaggataaactgccgctgaaagtgcaggtctgtatcaactatctgacggaatattttgtcgacgtggcgaagatctatcagggcatgcacgggcgcgggatcgcccggtga

SEQ ID NO: 138544 - DNA, 1446 bp, Enterobacter cloacae
atgagtctgaacctggtaagtgaacaattactgtcggcaaatggcctgaatcatcaggacctgtttgccattcttggtcaactgaccgagcgccgcctcgattacggcgatctctattttcagtcgagctatcacgaatcctgggttctggaagacagcatcattaaagatgggtcgtacaatatcgaccagggcgtaggcgtgcgcgccgtcagcggcgaaaaaacgggctttgcctacgccgatcagatcagcaaactggcgctggagcagagcgcccaggcggcgcggaccattgtgcgcgacaccggcaatggcaaagtgcagaccctcggcgccgtagagcatcgtgccctgtacaccagcatcgacccgctgcagagtatgacccgggaagagaagctggatattctgcgccgggtagacaaagtcgcccgggcggcggaccagcgggtgcaggaggtttcagccagcctgagcggggtgtatgagctgatcctggtcgccgccaccgatggcactctggccgccgacgttcgtccgctggttcgtctttccgtcagcgtgctggtggaagaggatggcaagcgtgagcgcggcagcagcggcggtggcgggcgttttggttatgactatttcctcgcctcccaggagggcgacgtgcgggccgatacctgggcgaaagaagcggtgcgcatggcgctggtcaacctctcggcggtcgccgcccctgcggggatgctgccggtggtgctcggcgccggctggcctggcgtcctgctgcatgaagcggtcggccatgggctggaaggcgatttcaaccggcgtggcacctcggtctttagcggccatatgggggaattagtcgcctctgagctgtgcaccgtagtggatgacggcaccatcgccgatcgccgtggctcggtggccattgatgacgaagggacgccggggcaatacaacgtgctaatcgaaaacggcattctgaaaggctatatgcaggataaactcaacgcgcgcctgatgggcgtcgcaccgaccggcaatggccgacgtgagtcgtatgcccatctgccgatgccgcgtatgaccaacacctatatgctggcgggccagtcgacgccacaggagattatcgaatcggtcgactacggtatctttgcgcctaacttcggcggcgggcaggtggatatcacctccggtaaattcgtcttttccacttccgaggcctatctgatcgaaaaagggaaggtcacgaaggcggtgaaaggggccacgctgattggctccggcattgagaccatgcagcagatttcgatggtgggcaacgacctgcgcctggataacggcgtcggcgtctgtggcaaagagggccagagcgtgccggtgggcgtcggccagccgaccctgaaggtcgataaccttaccgtcggcggcaccgcctga

SEQ ID NO: 138545 - DNA, 1407 bp, Enterobacter cloacae
gtgagcagtcgcttaccttcgccagtcagtaagcccgccggcgaaccccttccggtcaaaattaacgtcgccggcggcctgagcagcttcgacctgatcggctccatcggggcgaagaatcatattaacagccgctggttgctcaatcataagctgacgctggatagagcgatccttaccactgacagcaaagggcactctccgctgcccgatcagcccggtatcgagctcaacctgccgccgatggatggcgcgcagtggctggcgctcttcgagaacggcgcggcaaatgaagtgagcagcaacgtgctctttccaccgcgcattgtgctgcgtacaccgtcgctggccctcgcgggtcaacagtggaacaacgtcagtctgatgtcccagccggtcgccggcggctcgcaggttgaggcgcaggggcgtgagatcaatgccacattgacgatgcgcgacaatgctccgtggctggcaaatgtgcgttatctctatttcaatccggccagcgccagcggccagaacgcaacagagaatgtggccccccagacggcgacgcggctggatttccatggctggcccgatctgcagctacgctgcgcggaatgctggctgtggggacaaaaatatggccgcatcgatggggatgtggcgatcaaaggggataccttaacgctctccaacggcctggtggataccgggtttggccggctgacgaccaacggcgtgtgggtgaacgccccttcaggggttcgaacctcgctgaaaggcagactgcacggcaataagacggatgcatttgcggatttctttggcgtctccacgccggtgaaggattcgccgtttgatatcgactacgatctgcactggcgcgcgccgccctggtcacccgatgtcgcgtcgctcaatggcatcattaaaagccacctgggcaaggggcagtttaccgacctgagtaccgggcacgctggccagctgctgcgtctgctgagtgtggatgccctgctgcgtaaactgcgtttcgatttcagcgataccttcagcgaaggcttttactttgattcgattaacagtacggcatggattaaggatggcgtactgcataccgatgatacgctggtggatggccttgaagcggatattgctatgaaagggtcggtcgatctggtgcgtcgccagctggatctgcaggcggtggtggcgccggagatctccgcgaccgtcggcgtggcggcggcctttgccgtcaaccccatcgtcggcgcggcggtatttgccgccagcaaagtgctgggtccgctgtggaataaagtttcgattctgcgctatcgcatcaccggcccgattgaccagccgcagatcaatgaagtgctgcgccaggcgcgcagcaataaaaagcaatga

SEQ ID NO: 138546 - DNA, 1098 bp, Enterobacter cloacae
gtgatcgccaacgtctcctatctggttatcgtcttttcggcgctcagttttttcaccgatacccctgagctgcgcctgtttggcgatggtaatacctggcagtctatcgttggcgcgtcggttctgctgtggatcgtccactttctggtcctgcgcggtgtccagacggcagcggggattaacctggtggccaccctcgccaagcttctgccgctgggcgccttcgtcgcgctcgccgccctggcctttcagctggatacgttccgcctcgattttagcggcctggcgctgggcgtgccggtatgggagcaggtcaaaaacaccatgctgatcaccctgtgggtgtttatcggcgtggagggggcggtagtcgtgtccgcgcgggcgcgacacaagcgcgacgttggccgcgcgacgctgctggcggtgctgtcggccctcgcggtgtatctgctggtcaccctgctgtcgctgggcgttgtgccgcgcagcgaactggccgaaatgcgtaacccgtcgatggcgggactgatggtcaggctgatggggtcgtggggggagatcgtcattgccgccgggctgatcgtgtcggtgtgcggcgcttatctcagctggaccatcatggccgcggaggtgcctttcctcgccgccactcataaagccttcccgcgcctgtttgcccgtcagaatagcaacaacgccccctccgcctcattgtggttgaccaatatcagcgttcaggtatcgctggtgctgatctggctgaccggatcggactacggcacgctgctgaccattgcctctgagatgattctcgtgccctatctgctggtcggcgcctttctgctgaaaatcgccactcgcccgctgcataaagcggtggctatcggcgcctgtatttatggcatatggttattatacgcgtcggggcctgtgcatttgctgttgtcggtggtactttacgctccgggtcttctggtctttttgtacgcccgacgtacgcaccagcacgatcgttcgctcaaacgccgcgaagtggcgctaattggtttattgctggttgccgctgtgccggcaacgtggatgctggtggggtaa

SEQ ID NO: 138547 - DNA, 723 bp, Enterobacter cloacae
atggctgaacaacagccccgcccgattctgatcacaggagcaggccgccgcatcggcctcgctctggcacaccattttctgcagcagcgccagccggtcatcgtcagctatcgtacgccctatccggcgattgacggcctgcgcgaagcgggcgcgctctgcctgcaggccgattttagcagcgatgacggcattctgaccttcgctgaagcggtcaaatcacacaccaacggtctgcgcgccatcatccataacgccagcgactggatggcggaaaagccgggcgtcccgctgagcaccgtcatcaaccgcatgatgcagatccacgtcaacgccccctatctgctcaaccatgcgctggaggcgttgctgcgcggccacggccatgccgccagcgacattatccatatcaccgattacgtggtggagcgcgggagcgacaaacatatcgcctatgccgccagcaaagccgccctggataacatgacccgctccttcgctcgcaagctggcgccagaggttaaggtcaacgccatcgcgccgtcgctaatcatgtttaatgagggtgacgacgaggcctatcgtcagcaggcgctggataaatcgctgatgaaaatcgcccctggcgaaaaagagattagcgatctcatcgattacctgtttaccagccgctacgttaccggccgctcattcgctgtcgacggcggccgcccgctgcgctag

SEQ ID NO: 138548 - DNA, 336 bp, Enterobacter cloacae
atggggctgttaatcaaagggctgttgggagcgctggtggtggtgctgattggcgtgctggcgaaaaccaaaaactacgctatcgctggcctggtcccgctgtttcccacctttgcgctcatcgcccattatattgtcgccagcgagcgggggatcgaagccctgcgcgcgaccatcgtattcggcatgtggtcgattattccctattttatctatctgctgtcactgtggtatttcaccgggatcatgcgcctgccgttggcgctggcaggcgcagtgggatgctgggggctgtgcgcctggctgttaatcctcggctggagccgtttccactag

SEQ ID NO: 138549 - DNA, 720 bp, Enterobacter cloacae
atgaataaaatcgtttttgttgaggatgaccctgaggtaggcacgctgatcgccgcctatctcggcaagcatgatatggatgtggtggtcgagcctcgcggcgaccgcgctgaggaggtgatcgcgcgggagaaaccggatctggtgctgctggacattatgctgcccggcaaggacggaatgacgctctgtcgcgatctgcgcgggcaatggcaagggccgattgtcctgctgacttcgctcgacagcgatatgaaccatatcctctccctggagatgggcgccagcgattatattctgaaaaccacgccgccagcggtcctgctggcgcgactgcgtctgcatttgcgccagcatattgctccggcaggcgccggatccgcctcctcaacgctcacgccacataaaaccatctccttcggctcgctgaccattgacccggtcaaccgccaggtgctgcttggcggagaaaacgtcgccctgtcgaccgccgatttcgatctgctgtgggagttggccacccacgccgggcagattatggaccgcgacgcactgctgaaaaatttacgcggcgttacctatgacgggatggatcgcagcgtcgacgtggctatctcccgcctgcgcaaaaaactgctcgacaacgccacggagccctatcgtattaagaccgttcgcaacaaaggctacctgttcgcccctcacgcctgggataactaa

SEQ ID NO: 138550 - DNA, 363 bp, Enterobacter cloacae
atgatgaaatacgttgtacttttggcactctcactgttcacttctctctctggctgggctttttccctcgacaacgccgatattcgactcctctgtccgcagcgcgggcaaatcgaggtgatccttcatcgctatgaacatacccagcaatcctgggggcagcatcactttgaaaccggcggcggccacgttcgccaggggccgctgctggtgatcccgtttgccaacctcgatcagatgatttaccaccagaccaccggcgagtttgcttactggtatgccgaaacggaaaagctggtgcgctgtcggctgctgagtctgacgaccacctatccggtagacattccttattatcgtgagtag

SEQ ID NO: 138551 - DNA, 1257 bp, Enterobacter cloacae
atgaaaaagctgttcgtgcagttctatcttctgctcttcgtctgctttctggtgatgaccatgctggtcggtctggtctataaatttaccgcggagcgcgccggacggcagtcgcttgacgatttgatgaaaagctcgctgtatctgatgcgcagcgagctgcgggagataccgccgcgcgactggagcaagacccttaaagagctggacctgaatttatcgtttgatctgcacatcgagccgatcagcaaatttaagctgtcggaaagctcgatgcagcacctgcgcgccggcgatatcgtcgccctcgacgatcagtacacctttattcagcgcattccccgcagccactatgtgctgtcggtgggtccggtgccctatctctattttctgcatgagatgcgcctgctggacgtggcgctgatggcgtttattgctatctcgctggcctttccggtgtttatctggatgcgcccgcactggcaggacatgctgcgcattgagacggccgcccagcgctttggcgaaggtcacctcagcgagcgcattcacttcgacagtatgtccagcttcgagcggctcggggtggcctttaaccaaatggccgataacattaatgcgcttattgccagcaaaaagcagctgattgacggcatcgcccatgaactcaggacaccgctggtacgcctgcgctaccgtctggagatgagcgagaatctcagcgaggcggaatcgcaggcgctgaaccgcgatatcggtcagctggaggcgctgattgaagagctcctgacctacgcccgcctcgaccgcccgcagacggagctcagcctgacgactcccgattttcccgcctggatcagcgatcacgtcgaggatatccagatggttaacccacagcgcgaggtcgccctggcgacgctgacccacggtaactacggcgcgctcgatatgcgactgatggagcgggtgctggataatttggtcaataacgccctgcgctacagcagccagcgggtggcggtcagcctgacgctgcagggttcgcgcgcatcgttgctggttgaggatgacggcccgggaatcgcccccgaggagcgcgagcgggtgtttgagccctttgtccgccttgaccccacagtatcgcccaggcgatgggcggcgaggtgcgctgcgaggccagccctctcggcggcgcccgcttctgctttagctggccggtctatcatcagctgcctgatttcacctctgcctgaataa

SEQ ID NO: 138552 - DNA, 933 bp, Enterobacter cloacae
  misc_feature (902)..(911): n is a, c, g, or t
atggccagctacgacctcgttgaacgtctgaataacacctttcgccagatcgagctggagctgcaggcgctccagcaggcgttaagtgactgccgtctgctggcgggccgggtatttgaactgccggcgatcggtaaggatgccgagcacgatccgctggccactattccggtggtgcagcacatcggcaagacggccctggcgcacgccctgcgccactacagccatctgtttatccagcagcaatcggaaaaccgcagcagcaaggccgccgtacgcctgccgggcgctatctgcctgcaggttaccgccgcggagcagcaggatctgctggcgcgtattcagcatatcaatgccctgaaggccaccttcgagaagatcgtcaccgtcgactccggcctgccccccaccgcccgttttgagtgggtacaccgtcatttgccggggttgatcacccttagcgcctaccgcacgctgacgcccctcgtcgacccgagcaccatccgcttcggctgggccaataagcacgtcatcaagaatctgacccgcgaccaggtgttgatgatgctggagaaaagcctgcaagcgccgcgggcggtgccgccgtggaccagggagcagtggcagagcaaactggaaagggagtatcaggatatcgccgccctgccgcagcgggcgcggctgaaaataaaacgaccggtgaaagtccagccgatcgcccgcgtctggtacgccggcgagcagaaacaggtacagtacgcctgccccagcccgctgatcgccctgatgtccggcagccggggggtcagcgtaccggatattggcgagctgctgaactatgatgccgacaatgtgcagtatcgctacaaaccggaggcgcagtcgctgagattgcttatccnnnnnnnnnncctctggctggctagcgaatag

SEQ ID NO: 138553 - DNA, 1401 bp, Enterobacter cloacae
atgacaacgcatcgcagtgaaaaagactcgatgggcgccatcgaggtcccggccgataaactctggggcgcccagacccagcgctcgctggagcatttccgcatctcgaccgaaaaaatgcccggggagctgatatacgccctggcgctgaccaagcgggcggcggcgaaggttaaccaggatctcggactgttgacggcggagaaagccggggcgatcgtcgccgccgctgacgaagtgctggccggaaagcacgcgcaggagttccccctggctatctggcagaccggctccggcacccaaagcaatatgaatatgaacgaggtgctggccaaccgcgccagtgaactgctcggcggagaacgggggatggcgcgaaaaattcatcccaatgacgatgtgaataagagccagagctcaaatgatgtattccccaccgccatgcacgtcgcggcgctgattgccctgcgggaaaaagtgatcccgtcgctgcaggcgctgcgggcgacgctcaatgaaaaagcggtggccttcagggatatcgtcaagatcggccgcacccatctgcaggacgccacgccgctcaccttaggccaggagatctccggctgggtggcgatgctggaccatagcctgaagcacattgaagccagtcagccgcatcttgccgagctggcgctgggcgggacggcggtaggaaccgggctgaatacccatccggaatatgccgtacgggtggcggccgagctggcgtcgctcagcggacagccatttgtcaccgcgccgaacaaattcgaagcgctggccactgtggatgccctggtccatgcccacggcgcgctgaaaggcctggcggcctcgctgatgaaaatcactaacgatgtccgctggctggcctccggcccccgctgcggcattggtgaaatcgccatcccggaaaacgagccagggtcatcgattatgccgggcaaggttaacccaacccagtgcgaagctctgaccatggtctgctgccaggtgatgggcaacgacgtggcggtgaatatcggcggtgcttccggcaactttgagcttaacgtctatcgcccgatggtcatccacaacttcctgcagtcggtgcgtctgctggcggacggtatggcgagctttaacgagcactgtgcggtgggtattgaaccgaatcgcgagcggatcagtcagttgctcaatgagtcgctaatgctggttactgcgctgaatacccatatcggctacgacaaggcggcggaaatcgctaaaaaagcgcaccatgaggggctgactctcaaagcctcggcgctggcgctgggctacctgacggaagccgaattcgacagctgggtgcgcccggaagagatggtcggcagcctggctattcgctag

SEQ ID NO: 138554 - DNA, 177 bp, Enterobacter cloacae
gtgctggcccagcagagcatcaagagcctcgagtgcgtggcctatccggagctgggtatggaggctatctggaaaattgaagtggaggatttcccggcctttatcctcgttgatgataaaggcaatgacttcttccagcagatccagacctcgcagtgcgcccgctgcgtgaagtaa

SEQ ID NO: 138555 - DNA, 879 bp, Enterobacter cloacae
gtggaagcttatatcgaacgcgtcagccgggccaaccgctttgaatatggcaaagtgcgggtcgcaggctgcgtcggctgggcgctatgcgcctcgataaccggcgtgctgttcggcatcgatcccaatatcaccttctggatcgcctccggctttgcgctggtgctcggtctgctgctctggctgtcgcggccggaaagcagcaacagcgcccaggttatcgaggcgctgggcgccaatcgccaggccttttcgctgcgtacggcggcagagctgctgcgtatgccgcgcttctggggctttatcgtctatgtggtgggtgtcgccagcgtctacgacgtgtttgaccagcagttcgccaactttttcaaaagctttttcgccagtccgcagcgcggtaccgaagtgtttggcttcgtcaccaccggcggcgagttgctcaacgcgctgatcatgttctgcgcgccggccatcgttaaccgcatcggcgccaaaaacgccctgctgaccgcggggatgatcatgtcggtgcgtattctcgggtcgtccttcgcctcatcggcagtcgaggtggtgatcctcaagatgctgcatatgtttgagatccccttcctgctggtgggaacttttaaatatatctcttccgcctttaacccgcgcctctcggccaccctgttcctgatcggttttaatctgtcaaaacagctgtccggggtggtgctttccgcctgggtgggccggatgtacgacaccgtcggcttccatcaggcctatctgatcctcggctgcataaccctgagcttcaccctgctctcgttcgtcaccctacgcggcggcaaccgtctgctgccgaccgcagagacgcagagccccgcctga

SEQ ID NO: 138556 - DNA, 1089 bp, Enterobacter cloacae; identical to SEQ ID NO: 16908

SEQ ID NO: 138557 - DNA, 261 bp, Enterobacter cloacae; identical to SEQ ID NO: 16909

SEQ ID NO: 138558 - DNA, 903 bp, Enterobacter cloacae
atggctgcacacactaacgtctgcgtgattggactgggttcaatgggcatgggcgccgcccgcgcctgcctgcaggcgggcctgaacacctggggcgttgacatcaatcccgacaactgtcgcgcactgctggcggcgggcgccaatggcgcgggccccagcgcggtgccgttcgccgcggaactggatgcagttgtgctgctggtggtcaatgccgcccaggtgcgggggatcctgttcggcgagagcggcctcgccgcccatctgaagccgggcaccgtcgtgatggtgtcgtccaccatcgcttccgccgatgctcaggccattgccgaggcgctggcggagtaccagctattgatgctcgacgcgccggtatcgggcggcgccgtgaaagcggccgccggcgacatgacggtgatggcctccgggagcgatgccgcctttgcccgcctcgcgccggtgctggacgccgtggccggcaaagtctaccgcatagggagcgacattggtcttggctcgacggtaaaaattatccatcagctgctggccggggtgcacatcgccgttgccgccgaagcgatggcgcttgccgcccgcgccgggatcccactcgaaacgatgtatgacgtggtcacccacgcggcgggtaattcatggatgtttgagaatcgcatgcagcacgtcctggatggcgattactcgccaaaatccgctgtcgatatttttgtcaaagatctcgggctggtgaatgacactgcccgggcgctgaccttcccgctgccgctcgctaccaccgcgctgaatatgttcacctccgccagtaatgccggattcggtcgggaagatgacagcgcggtgatcaagattttcaacggcatcaccctgccgggccataaacagtga

SEQ ID NO: 138559 - DNA, 1266 bp, Enterobacter cloacae
atgcagcttggtgtcattgccgatgacttcaccggcgccacggatattgccagcttcctcgtgcgcaacggcatgccgacggtgcaactgaatggcgtgccgacccgcgatcttccgctgaccagcgaggcggtggtcatcagcctgaaaactcgctcctgcccggcggaaatggccgtcagccagtcgctggcggccctgcgctggctgcaggcccagggctgtcagcagttttatttcaagtactgttccactttcgacagcaccgcgcagggcaacattggcccggtgctggatgccctgctggccgagctgggtgagacgcggacggtgatttccccggcgctgccggttaacggccgcacggtctatcagggatatctgttcgtcggcgagcaactgctgaatgagtccgggatgcgccaccatccggtgacgccgatggaggatgcgcacctgggccgcttaattgagcgccaggggcgcggaaaagccgcgctgattgcctggccgattgtcgcccgggggccggaggcggtcgccgccgcgctggcggcagtcaacgatccggcggtgcgctatgtggtgctcgacgccctcagcgaacaggatctgctcacccagggcgtggcgctgcgggagatgaagctggtctccggcggttccggcctcgccatcggcctcgcccgcgacttggcgcagcgccatggcgcccggggtgaaagcgctcaggccggcatgccgctggtcggcccggcggtggtgctctcgggctcctgctcggtgatgaccaacagccaggtggcggcctatcgtcaacaggcccccgcccgcgccgtcgacttaagcgcctgctttaccgatctggagagctacgtcaggacgctgactgactgggtggacgcgcagcgcgatgcgccgctggcgccgatgatctatgccaccaccgagccgcaaacgctgcagcggatccaggcgcagtatggcgacaaggccagcagcgaacgggtggaacagctgtttgccgctcttgccgccgccctgaaggcgaaaggatttacccgctttattgtggccggaggggaaacgtcgagcattgtggcgcagaccctgggggttgaggcgttccatattgggccgaccatctcccctggcgtgccctgggtgcgtgacacccgccagccgctctccctggcgctgaagtcaggtaacttcggcgatatccagttctttgcccgtgcccagcaggagtttcgtcatgactga

SEQ ID NO: 138560 - DNA, 621 bp, Enterobacter cloacae; identical to SEQ ID NO: 36226

SEQ ID NO: 138561 - DNA, 447 bp, Enterobacter cloacae
gtggtagagatagcccggtttggtctgcggattcagcgcttcgatgagtatccgcttgtcgtggcgggcaaagcactccgccgcgtagcgcagattatcgataagcacggcctcgcaggctgcgcgatccgctcccggcggcaccacgccggccatgatatgcacctgcgggcaaccgagctggcaggcatactccagcgccagctcaatatcgcgtcgggcctccgcgcttctcccggggatggcggcgagcccccattctccggcgttgacgtcgccgggtggggtattgaacagcaccagctgcagctggttctcctgcaggcgctgtctgatttccccggcggcatactcatagggaaacagaaactcaacggcttcaaatcccgcccgggcagcggcggcaaagcgttccaggaacggcagttcggtaaacagcatggataa

SEQ ID NO: 138562 - DNA, 1026 bp, Enterobacter cloacae
atgagcgtggccatcctgctttccgcgcggcgtcgcccccgcccccggctggcgctgcttctgctaacgctgctgcttatcgccgcctcgctggtgcatcttggcttaggcgcccgctggatcgccccgcagacggtgctgcaggcgctgctggagtacgatccgcgcaactttgagcagcggattatcatcgatctgcgtctggtgcggctggcggcggcgctgctgaccggcgcggcgctcggcgtcgccgggctgctgctgcagacggtgatccgtaacccgcttggcgagccgcatattctcggcctcaacgccggcgcctcgctggcggtggtggcgacctcggcgctgggcctgtccttcggcgctttccccgccgggcgcccgctgaccgccgcctgcggcgcggggctgctgtttggtggcgtgatggcgctggcctctgccgggagcggcggggcgacgccgctgcgcatcacgttgtgcggagtggcgctgtcagggtttgcgtcggcggtgacggcggcgatattaattctcgatgaacagacgctgctggcgatgcgcacctggctggccggcgacctggccggactgaactggagcacgctgcagacggcgctggtcccggcgctgatcggccttggcgtcgcgctgctcattgccccacgcctcaatgtgctggcgctgggggataaggtggcgctgggccttggcgttaatctcgtccagacccggctgctgggcctgctggcgattgcgctgctctgcggcgcggcggtggcggtggccgggccgatcggcttcgtcgggctggtggtgccgcacgtggtgcgccgtctggtgacggaagacatccgcctggcgctgcccctggctgcgccggtgggagcgctggtgctggtgctggcggatatcgccgcccggacgctggtcgcgccgcaggagctggccaccggagcgatgaccgccctggtgggcgcgccgttgtttatctttatcgccgcgaggttttttaaatga

SEQ ID NO: 138563 - DNA, 822 bp, Enterobacter cloacae
atgccacagcgggtgaaacctgcagagcaggggatcgtactggatgccctgtcggccggctacggccagaccctgatcgttgacgatatcaacctgaccattcccaccggcaaaatgacggtgctggccggggcgaacggatccggcaaatccacgctgctctcgaccatcgccagaatgctgaaaccgctcggcggctgcgtgcgtctggacgggcaagccattcaccagatgccgacgaagaccgtctcgcgccagctgggcatcctcccgcaatcgccgttgaccccggaaggattgaccgttttcgagctggtctcgcgcgggcgctacccgtggcaggggctgatgcgccagtggtccgaggccgatgagctggcggtagaggaggcgctgcgcttaaccggtaccgccgaattcgcccatctgccggtggacagcctctccggcggccagcgtcagcgctgctggatcgccatggcgctggcccagcaaacggccaccattctgctcgatgagccgaccacctggctcgatctgcgctatcaggtcgatatccttgagctgctccagaccctcacccgcgaacatggccgcacggtggtgacagtgctccatgaccttaactttgcggtgaactacgccgatctgctggtattccttaaacaggggcgcatcgccggcacgattagcgacaacgacgtctgtagccctgagctgattaaacgcgtgtttgacgttgacgtgcagatgtcgattaacccgcaaaccggcaaaccgttctttatgccgtttcgcgcccgccaggcagcggcacaatga

SEQ ID NO: 138564 - DNA, 2073 bp, Enterobacter cloacae
atggccgccgacaatcgcgcggcgaaaagtactaacgacgcggaagagaccatcaccgtagtggccgacggcgcgcagcagagcgccaccagcggctatcagccgctcagctccgccaccgcgacgctaacctcgatgccgctgctggatattccccaggtggtcaataccgtcagcgatcgggttctcgaagatcagcacgccacctcactcgatgaggcgctgtataacgtcgctaatgtggtgcagaccaacaccctcggcggtacccaggacgcctttacccgccgcggctttggcgccaaccgcgacggctcgatcatgaccaacggcctgcgcaccgtgctgccgcgcagctttaacgccgccaccgaacgggtggaagtcctgaaggggcccgcctcgacgctgtacggtatcctcgaccccggcgggctgatcaacgtcatcactaaacggccggagcggcagttctccggttcggtttccgggacctccaccagctttggcggcggcaccggcagcgtcgacatcaccggccccatcgaaggcacgaatctggcgtaccgactgattggggaatatcagaatgaggattactggcgcaatttcggtaaaaacaaaagcagctttatcgccccttccctgacctggtttggcgagcgggcaacggtgaccgcgtcctattcgcaccgcgactacagcgccccctttgatcgcggcactatcttcgatctgaataccggccatgcggttaacgtcgatcgcaaaacccgcttcgatgaagcgtttaatattaccgatggctattccgatctcgctcagctcaacgccgagtatcgccttaacgacgcctggaccgcgcgcttcgactacagctacagccaggatcattacaacgataaccaggcgcgggtaatggcctatgattcggcgaccggcaacctcacccgccgggtcgatggtacccacggttcaacgcagaagatgcactccacccgcgccgacctgcagggcaacgtggtagtgggcggcttttataacgagctgctgaccggcgtcgcctatgagaattacgatctgctgcgcaccgatatgctgcgctgtaagaacgttaaaggctttaacatctatcatccggtctacggcactctcgacacctgtaataccgtctccgcctccgacagcgaccagcggatccagcaggagagctatgccgcatacgtgcaggacgcgctgtacctgaccgacaactggatcgccgtcgccggcgtgcgctaccagtactacacccagtacgccggtaaaggccgaccgtttaacgtcaataccgacagccgcgatgagaaatggacgccgaaagccggcctggtctacaagatcacgccgaacgtctccctgttcgccaacgtcgcccagtcgtttatgccgcagtcgtcgatcgccagctatatcggcgagctgccgccggaagagtccacctcttacgaagtgggcgccaaatttgacctgttaaacggcattaccgccaatatcgcgctgtttgatattcataagcgtaacgtgctgtacaccgagagcattggcgatgagacggtggccaaaacggcgggcaaagtgcgttcccagggcgtggaagtggatctggccgggtccatcaccgataacctcagcgtgatcgccagctacggctacaccgacgccaaagtgctggaagatccggattacgccgggaaagcgctgccaaacgtaccgaaacataccggttcgctgttcctgacctatgatattcataacgtctataacagcaataccctgaccgtcggcggcggcggccatgcggtcagcaagcgttccggcaccaacggcgcggattattatctgcagggctatgcggtggcggatgtgtttgccgcctataagatgaagctgcagtatccggtgacgctgcaggtgaatgtgaagaacctgtttgataagacctattacacttcctcgatcggcaccaataacctcggcaaccagattggcgacccgcgcgaagtgcagttcacggtgaagatggatttttaa

SEQ ID NO: 138565 - DNA, 774 bp, Enterobacter cloacae
atggtaaccgagacgatagcgcgcggcgcggcggtatccatcagccatcttcatcatgcgtttacgcttggcaaacagacggtaccggtgctggagaatatcagcctgcagctgcgcccgggggaaagcgtggcgctgctgggcccttccggctgcggtaaatcaaccctgctgcggctgctggcggggctggaagcgccgcagagcggacagatgcagatcgacggcgcggcgctcggcgccccggggccggagcgaattctggtgtttcaggatccgacgctctatccgtggctgacggtgcggcagaacgtgctgctgggcccgcaggcgcagggcaaaaaggggctggaggcgaaggcagacgcgctgattgaccgcatcgggctgcaggccttcagcgaggcgtggccgcggcagctgtccgggggtatggcgcagcgtgcggcgctggcgcgcgccttgttgaacgaaccgcgtctgctgctgctcgacgagccgttgggcaaactcgattcgctgacccgcatcagtatgcagcgggagctgatcgccctctggcagcagcaggggtataccagcctgctggtgacccacgatatcgaagaggcgctgctgctgtgcgagcgggtgctggtgatgtcgccgcgtccggggcggattatcgccgagtttgcgctgccgctggcttttccccgtcatcgcgataacccgcagctgctgcagcatcgtcaggatatattgcgcatcctcggccaggaggcggactggtaa

SEQ ID NO: 138566 - DNA, 996 bp, Enterobacter cloacae
atgccaacgtattcgcctgagcaggctctggcgcgccccaccggccgcgcgccgctgtggggagaagggctgctggccgccacgctgtggctgctgggcggtctgtttactctgacctggcccgacgccgggcggcgctggccgtttagcgaaggctgggcgctggcgcaattcaccctcggcggcggcttgttgctgctggcgctgagctatcgctactggcgggcgcgcggcgcgcgtgtgctgcatgccggcaagtggctggcgctgctgccggtgctgtttgctgtctgggaagggctgaccgccaaaactgccgtgctgccggtaccattcttcgcgccgccgcaggcgctgatcgaggtgctgcacgacgactggccgcgcctgctcgacagcctgctgcactccctggggctgctggggcttggtgtgctgctgggtaccagcagcgggttcatcaccggtctggccatcggctggtcgcaacggattggctactgggtgcatccggtgttacgtctgctggggccggtgccgtccaccgcgctgctgccgctgtgcctgtttatttttccctcgagcttcggcgccagcgtgtttttgatcgcgctgagcacctggttcccggtcacggtgctgacctggtccggagtgatgggcattgataaggcgtggtacgacgtggcgcggaccctcggcgccagccagcgtttcctgatcctgcgggtggcgatccccgccgcgttgccgaacgtctttgtcggcctgtttatggggctcggcgcgtcgttttcggtgctgattgtcgccgaaatggtcggggtgaagtcggggatcggcttttacctccagtgggcccagggctgggcggcctatcctaatatgtatgccgcgctgctggtgatggccttgttatgctccggcctgataagcggattatttatgctgcgtgaccggctgctgagctggcagcgaggagggatgcaatggtaa

SEQ ID NO: 138567 - DNA, 1038 bp, Enterobacter cloacae
atgaccagaacccctttttcccgccgccgttttttacagctcagcggcggcctggcgctggccggggtctctctgccgctgtgggctcatgatatggcggacatggccggcggcgatgcccatccggcgctgcgcctgccagagccctacaagatcaagctggcgatcaacaaaagcgcggtatgcctcgcgccggtcgccgtcgccgagcagcagaagatattcagtaaatacaacctcgacgttgagtttgttaacttcggcagctccaccgatgtgctgctggaggcgatcgccaccggtaaggccgacgccggggtggggatggcgctgcgctggctgaaggcgctggagcagggctttgacgtcaagctcaccgccgggacccacggcggctgtctgaacctgctgacggctaaagactcgccgttcggcggcctcgagagcctgaagggtcaaaccatcggcgtcaccgacatggccggaccggataaaaacttcttcgccattctgcttaagcgccacggtatcgacccgatcagcgacgtgcagtggaaagtctacccggcggatctgctcagcgtggcgctggacaagcgcgaaatcgccgccatcagcggcagcgagccgttcagctatcgtctgctggagaccggcaagtatcagctgatcgccagcaatatgaccggggattatgccaacctcagctgctgcgtgctgggggtgagcgggagtctggcgcgggaccataaaccggccgccgcggcgctcacccaggcgatccttgaggcgcacagctatgccgctgcgcatccggaaagcgtggcgcaatccttcctcgcccatgccctgaataccagtgaagcggaggtgagcggcatcctccacgggcagggccacggccatcacgcggtgggcgaagcgttcgtgaaagagctgacgcagtatgcggtcgacctgcagcgggtgcaggtgatcaagccgggtaccgatccccatcagttcgcggagagtatctatgccaacgtattcgcctga

SEQ ID NO: 138568 - DNA, 921 bp, Enterobacter cloacae
atgagcagttcgctaaccgcgtcaatgcaggctcgtcgtcacccggagaccacccacatcgatcgcctcgccaccgccgatatgctggcgatgctgcatcaggatgataagcagatatcggaggcggtcggcgcctgtctgccggatatcgcccggctgattgatatcgccaccgcgacgataagccggggagggcgcctggtcattattggcgccggcgcttcaggccggacggccattgaggcggtcagcgactattcgccggaaggtaaacacgcgctggtggggctgattgccggtgggcagacggcggcgatggccgagcgggagactgaggcgaataattatgacctgggcgcctttgagctgcagtcgctggacttcagcaaccgcaatatgctgctggcgctgaccgtcagcggcaagacgccatgggtgtggggggcgatgcgccacgcctggtcgctgggcgccccgatagcggtcatcacccagcagccgaccagcgaggcggcgcagctggcggatatcattattgctccgcagaccgggccggaggcggtggcggggttagccaatccgaaggctcagttggcccagaggcagatcgtcaatatgctgacaaccggactcgccatccgtgacggtcgggtgtacagcaatttgcgggtggacgtgcaggctgacaattcgcactgggcggagcggcagatagcgattgtgatggcggccaccgattgcacgcgcagtgaagcaaaggctgccctggccagctgtcatcagcactgccgcaccgcgatcctgatgctgctcagcgggcttgacgcctggcacgcgcgggagctgctaaccaaacatcacgatcatctgcgtctcgccctgcgtgaagcccagcgtagcgctgtcactcccgcccagtaa

SEQ ID NO: 138569 - DNA, 357 bp, Enterobacter cloacae
atggaactggcttctctggtccgggatatcctccggcagcggcacgttgaacgtctggcgcagcatcgtgaacaggataatgaagcggaagcagagtgggagatcgcccgctggcggcatcgcagcggggtggtgatccagcgccgctatgagctcgagatcgcgcagcaggatagcgcatcctgcccggagtgctggattgactggcaggttatcgacgccgccggccaggagatcaacccgatgcgcaaacagttttataacctttgccagcaatccttctggctggctatgcaggcgggtggtgaagatgagacctcagacagaattgctcagataaccgacaatcacccgtaa

SEQ ID NO: 138570 - DNA, 1617 bp, Enterobacter cloacae
atgaaggcttcagagcacccgcctcgcgttcgccaacgcgccttaccgttaaagctgagcaccgccgtgtccttgatgatcggcagcgtcatcggcgccgtgctgctgctggtgtatgccttgtggtatatgcagatcagcaacgccacccgcgacggtctgaaagagaccgcgctggcggtggcgcgcaccatggccgatatgccgcaggtgaagcgcggactggaggcgcccccgcagcagcagatcattcagccgctggcgcaggccattacccgccgcaacgacctgttgtacgctatcgttaccgatatgcagggtattcgctattcgcatccggacagctcaatcatcggcaaaccgttcatcggccacgatattcagccgacgctgcagggaaaagagaatgtcgccatcaaccacggggtgctggccccggcgctacgggtgtttacgccggtgttcaacgaacggcatcagcaaatcggcgtggtggtggtcggcatttcactgagtaaagtggacgaacagatcgccaacagccgttgggacgtgctgctgaccatcctgttcagcgcgctggtctgcgcgctgggcacctggagcctggttcgcggcctgaagcgcgtgctgctggggctggagccgcacgaaatatccacccagtttcagcagcgtcaggccatgcttcacgccctcaaggagggggtggtagcggtcgatgcccatggcgaggtaaatctcatcaaccccgcggcggaagagatcctcttttccggcccggataagactctcgttcacagccccctgctcgacgatctgcagaccgtactgcagagcggcgagccaatgtacgaccgcgaactggggtgcaatggtctgctgctgatcggcaatacagtgcccattcgcagccagggtgcggtggtcggcgccatctgtaccttccgcgataaaacggaggtcagccaattgctgcagcgactggacggcatgatgagctatgtggatgccctgcgcaccacctcccatgagtttatgaataaactgcacgtgatcctcggtctgctgaatatgaaaagctacggcaaactcgaggaatacgtgctgcagaccgcccaccgctaccaggcggacatcggcgacattcaacatcgcattaaatccccggtggtggccggcttcctgataagtaaaattcagcgcgccacagagtgcggctttaccctgacgctggcggaggagagcctggtgccggattgtccgaacgagaaacaggtcacggtgctggtgacggtgctgggcaaccttattgagaacgcgctggacgccatgagcggccaggcggagggtgagatcggcctgctgctgcactaccaggacggctggctaagcggtgaagtgagcgacgatgggccggggatcccggagaacaacatcgacgctatctttaacaaaggcttctccaccaaaggcgagaatcgcggcgtcgggctgtttcttgccaaccagcagttgcgcgagctcggcggcaccctcgccgtcgaatcggaacccggcgtatttacccaattttttgttcatctcccctgggatagtaaaaggaaacctgcgtga

SEQ ID NO: 138571 - DNA, 720 bp, Enterobacter cloacae
gtgataaatgttttaattgttgacgatgatgccatggtggccgaactgaatcgcctgtacgtggcaagggttcccggctttcgttgcagcgggagcgcttcgacgctcagtcaggcccaggagatgattaacgatccgcagcaggagatcgatctggtgctgctggatgtctacatgcagcaggacagcgggctcgatctgctgccgaccatccgcgagtcgggtcgcgccatcgacgttatcatgattacctcggcggcggatgccgccacggtacagaccgcgatgcattacggggtggtcgattacctgatcaaacccttccagtttccgcgctttgaagaggcgctcaccacctggcgggagaagcgcaagctaataaccggccagccctattacgaacaggccgatgtcgaccgcctgctgcacggcggcgcgccggaggccagcgacgcgcgcaagctgcctaaagggttaaccgcgcaaacgctgcgcacactctgccagtggattgacgcccatccggatgtcgaattctctaccgatgagctggcggcggcggtgaatatctcccgcgtttcctgccgcaaatatctgatttggctggcgcagatcaatattctctataccactatccactacggcgctaccgggcggccggtctatcgctaccgcctggtcgccgaacagtacagtttgcttaagcagtacagtcaataa

SEQ ID NO: 138572 - DNA, 951 bp, Enterobacter cloacae
atgtccgataaccgcgtctatagctactccgccgtgttgatgggctcgcccatcctgctcaaactctgttcccacgatgaggcgatggcctcccgcgttttccagcttatcaagcgctacgaagacctgcttaccgttaaccgcgccgagtcgcaggtgatggatatcaaccatgccgccgggcgtcatccggtcaccgtcagccgaccggtctttcagctgatccagtgcgccaaagccgccagcatggtgcgcgacagcgcctttaacctcgccatcggcccgctggtgaagctgtggcgaattggttttcacgggcacagcgtgcctgacgcggctgagatcagagcccgactggcgctgacccgcccacaggaggtgatccttgatgaggcaacctgcagcgtgtttctccaacagccggggatggagctggatctcggggcgatcgccaaaggctatatcgctgaccgcgtgcgcgattttctccgtcagcagcaggtggagaaggcgctgatcaacctcggcggcaatgtgcataccctcggcgaatgggccattggcctgaaaaaaccatttgccgacgcgcaggcgctgatcggttccctgacggtcaacgggcaatcggtagtcacctccgggacctacgagcgctatttcgaacaggatggcaaacgctggcaccatattctcgacccgcgcagcggttatccgctggacaacgaactcgacagcgtgacggtcatttccgcggattctttagacggcgacatctggaccacgctgctgttcggcctcggcgtggagaagggctgcgcagcgctgcgtcagcggcaggatatcgacgcgattttcgttaccaaaaatcgcgacattattctctcatcgccgcagcggctgcgttttgcgccgctggacagcggctatcgggttattgactgtactgcttaa

SEQ ID NO: 138573 - DNA, 2778 bp, Enterobacter cloacae
atgaccagtaacgaacgtattttgcagccatttactttaccaaatggtaccgagctgaaaaaccgtttgctcatggcgccaatgaccacctgcaccggttatttcgatggtactgtcaccagcgagctggtggagtactaccgcgcgcgcgccggaagcatcggtaccattattgtcgagtgctgctttattgatgactacggtctggccttcccgggcgcgatcggcattgataatgatgaaaaaattgccggcctggcgaaaatcgctgaggcgatcaaagccgagggttcaaaagcgattctgcagatctaccacggcggccgtatggtcgacccgcagctgatcggggggcgccagccggtggcgccgagcgctattgccgcgccgcgtgagggcgccgccatgccgcgggcgctgagcggagaagaagtggaagggatgatcgccaagtttggcgacggcgttcgtcgcgccattctcgccggtttcgacggggtcgaaattcacggcgccaacacctatctcattcagcagttctattcgccgaactccaaccagcgcgatgacgagtggggcggcagccgcgacaaccgcgcccgtttcccactggcggtgctggatattacccacaaaatggcccgccagtatgctgacgatgcctttatcatcggctatcgcttctcgccggaggagatggaggtcccggggatccgctttgacgacaccatgtatctgctggaaaagctggccgcccgcggtgtcgattatctgcacttctcggtgggtgccaccctgcgtccgtctatcgtcgataccagcgacccgacgccgctgatcgagaaatactgcgcgatgcgctctgacaccctcgcccaggtgccggtgatgggcgtcggcggggtggtgaacgccgccgatgccgagcagggcctcgatcacggctatgacctgattgcggtaggccgcgcctgcatcgcctatccggactgggcgtcacgtatcgccgccggcgaagagctggagctgtttatcgacagcacccagcgtgaagcgctgcacattccggaaccgctatggcgtttctcgctggtggaagcgatgatccgcgacatgagcatgggcgacgccaaatttaaaccggggacgtttgttgagaccgtccacgatgacgccaatgagctggtgatcaacgtcagcctcgaaaatgaccatattgccgatatcgaactggcggcgagcccggtccagaccgtggaattcaccaccagcttcgaagagatccgcgaacgtattctcaccgccaataccccgcacgtcgatgccatttccggggccaccagccagagcgaggcggtgaaaaaagcggtcgccaaagcgatgctgaaatcgagtaaagcgctggcggcggaagagggcggcaatgacgccgcgccgaaaagctatgatgtggtggtggtcggcagcggcggcgccggtctggcggcagccattcaggcacacgacgaaggggccagcgtgctgatcgttgaaaaaatgccaaccatcggcgggaacaccatcaaggcttccgccgggatgaacgccgcggaaacccgcttccagcgcgtgaaaggtatcgaagacagtaaggagttgttctatcaggaaaccctgaagggcggccacaacaaaaacaacccgcagctgctgcgccgtttcgttgaaaacgcgccgcaagccattgagtggctggcggaccggggcattatgctcaacgacattaccaccaccggtgggatgagcattgaccgtacccaccgtccgcgcgacgggtcagcggttggcggctatctgattagcggcctggtgcgcaacatcaccaaacgcggtattgacgtcctgctggatacctcggtggaagagatcctgatgcgcggggatgaggttagcggtgtacgtctgatcaacgacgaaaaagaggtcattgaagtacagaccaaaagcatcgtagtggccaccggcggcttcagcgctaacagcgcgatggtcgtgaagtatcgtcctgaccttgaaggcttcgtcaccactaaccacaaaggggctaccgggagcggtatcgcgttgctggaacgcatcggcgccggcaccgtggacatgggcgaaattcagattcacccgaccgtcgagcagcagacctcgtatctgatttccgaatcgattcgcggcggcggcgctattctcgtaaaccagcaggggaaccgcttcttcaacgagatggagacccgcgataaagtctcggcggcgattatcgctctgccggaacactatgcttacatcgtcttcgacgagcatgtgcgggcgaaaaacaaaactgccgacgagtacatcgccaaaggcttcgtcaccagcgccagctcaccgcgggaactggcggagaaactggggatggattaccatgccttcctcgccaccctcgagtgctataacggggcggtggaaaaacagcatgatgaacagtttggccggaccaccgcgctacgcgcgccgattaacgaaggcccgttccacgccattcgcatcgcccccggcgtgcaccacaccatgggcggcgtgaccattaataccgatggcgaagtgctgaatgtggcgcagcagccgattcgcggcgcctacgccgccggtgaagtggtgggcgggatccacggcggcaaccgtatcggcggtaacgcggtggcggatatcatcatcttcggtaccctcgcgggccatcaggcggcgaaacgtgccagaggataa

SEQ ID NO: 138574 - DNA, 1920 bp, Enterobacter cloacae
atgagtgctgtccatctctccccagacgatttagccgaattgacgacattagccaaagacctgaatttcaacgatgttgaacgtcgttctgccctacttgaaaacggatcgcgtgattttaatgcagtacctgggagtgggaagacatcgctgcttgctgcaaaacttttattgctggctaggaaatggcctcatgcacgaagaggcatatgtgttctaagtcatactaacgttgctcgtaatgagattgcacatcgcctagcgggaacggccgaaggatctcagcttctgaactatccccatttcatcggtacaatccatagcttcgtcaatcatttctttgcaatgcccttactgcgtagcttgggacagaaaattgatgtcattgatgatcaggtgtttgcggataaagctcgttctctattgctgacgagaaaattttcaggccttcgcacttatttggaaaaccaaaggaatggtgaaggtatcgccactacgcttttctatcgaacggcgacgcttagcgtgcatgttgaaagtggcagcctgcctgcatcgcatacaaagtcttacaactctttgattgagttaaagaacactctgtcttcccaaggtgttttccgtcatcgtgacatgtttgcatttgctgaccgagcgctccagacctgcccgaggctttttgatgttgttcatcgtcgcttcccgatggtgttcattgacgagatgcaagatacctcttgggatcaagagttattgttaaatagtattttcgatggtcgctcagtgatgcagcgttttggggacatagatcagaagattctttccgatgaagaacaagctgaattactcacattccctagggctggatatggatgcataagtaccagcaaacgttttggtaaagcaatttccgatgcagtaggatgtgtccgtgtcagtggtgaggctgttgttggagagggcgaagatatcaatgctcctgtcctgctcctgtacaaaacggatagtgccatcaaagtggtcgaacactttggtcgaatcgttattggccaattaagcgaagacaacattggtgctcgagaggttaaggcgatgagcgctcgcaaaaccggcgagggcaacgttgatgcaggtcgtcaccttcttgattactgtccaaaatatggcggagacaagcttactgcaggagtacgctccgaaagtttctggagtcttgtcggggacagtaatggggctttgaaagaaacatcgttgcgttcccgagtttctgacgttcgcagagcattattgcttgtactgcgtgaagctggggcatcgtttgcgcaagacattcgcgatgcacgaatgcttccacgagcagcaaaggctgctacgcccacagggacaattgataagttaacacggcagctcacattgtccggggaggaactttgttcagatggtcagcgagatgtaatgacagaactgctctacacgcaacttaaaccatatcttcccgaagcactaagcttagaaaaatttaaggggttgagcatcttcgaagatttaggcgaaaatgaaatactaaacatttctgctacaaccaactgtgaaattaacttcttgggaagaagcctcgatattggactcggtacagttgcaggaatgaagggtgaaactcatgccgcatctttaatccttgaatcctacggtgggaccagccgtaaatttgatgttgcactggggcttgagtatatttcaggaattgcgaccaaaaaaatttcaaagttacccaaaacccagcaggcgcaaatgcgtaacctttacgtagcaatgtcacgaccaacaaaattaatatgccttgcagcgaacgaaaaccgaatttcacagactttacgtgatgctcttatactaaagggatggcatatagaaaatgtgtaa

SEQ ID NO: 138575 - DNA, 2049 bp, Enterobacter cloacae
gtgtatttgaagcacatcagagcacgcaactatcgtgcctttggagatagtatatctgcacctgaacttgactgggagcttaatccgggactcaatatccttgtaggagaaaatgatgcaggaaagacctgtatcgttgatgctatccgtcagatattgctgacgaccagttatgaaaacattcggctcttcgagcaggattttcatattcacggtgcaattcgttctaataccctgtgtatcgaagcaactctatgtgggctaagtgccgaccaggaagcttcagtccttgaatggttgacacttggtgaagatggagcttgctcacttattctacatcttgaggcacgctttcatccgccccaggccactaagcgtccacgtgttgaaacaattgtccgaactggaataaatggcagtggtccagaagtgggttacgcggtaagagaactggtgcgggcaacctacttaaaacccttacgcgacgctgaagcagagttgagttcaggtcgccaatcacgtttgtcacagattcttagtgcacataaccagattgctggccaagaagtaaacgactttgatcagacaatgccaactaacatcccaacgagactggttggtttgatggcattcactcagcaccaccttggtcagcatcaagtcatcaaaagcgtggaaaaggacattaatgacaactacttgagccagtttgcgttttccggagatgtaattcaatctcgcatccgtatcgcacccaatctagcgctagcacctattctggagaagttcgagctgtcgctgcttcccggagcacacattgatcctgataatcggtgtgctcgcggtcttgggtacaacaatgcattgtttatggccactgaactggtgcttctgcgagatggcgaagaactgggccttcttctagttgaagaaccggaggcgcaccttcaccctcagttgcaagagcgcgtgatggatctcctgaaagagcactctaacgatgatcaggaacataagcgtgttcaggtcattatgacgacacacagcccatctttggtatcaactgctcgtattgaagacatgacactagtgcacagggcacatacctttcccttggctgtcggtaagacgaaacttaaacgaacagattattcttttcttcgccggtttatcgatgcaaccaaagcgaacctcttttttgcacgaggggtcatgatggtggaaggtcctgctgaggcaatcttgctaccagcgattgcagagatgtgtggtcgctcactatctaagcatggtgtatcacttgttaatgtgggaaatacagggctttaccattacgcccgtattctccaacgggaaggaaccggcccagatatcccaattccggtcgtttgcctgacagatcgggatattgtaccagacgttgcgaaaagctatgtctcaaaaccggctcagggtaagcgcttcgattctgattatgacgccgatgaaatgaagcgagtagttcaaagcaagaagggccgcgcagaaggcggaaatacgatcgtatgcgtatctgatcgttggacactagaatatgatcttgcacactatggttgcgccaagctgatgtacctcgccattgctcttgccgtaaaagcaaagtctcgcaatgaaagattagaagaaaacgacgaagttgagacacttgcggcggaagaaaaaaactggctggcactggaggctgcgggtcactccgatgaagctctcgctgcaattatttatcagcctcttcaagagaaaaaagcttcgaaagccatagcagctcagtatgcagcttatctggtttgtacaggcgcctatggcacggatgacgaactgttcaataaactacctccgtacctgcaaactgcactatcacatctgacgatagatccaaaatttaaaacctcagagaggacgggggctgtttccggagctaccatatcgactgatgcaactgtagcggcagtaaccacaaccatacagacaagctctaccgttcaggctaacgcgactacaaacggtatttag

SEQ ID NO: 138576 - DNA, 183 bp, Enterobacter cloacae
atgcaaatcgaagacagaacaaagcctgtccggcgggaaaattatcttgttgtgctggagcaccgggacgacctgccagataaatccgtgcgtggcaaccaagctgcgcgtaggaagttgttaaatgctggttggtgcgaggatgagtttgacgagatggagcgcaatataaaagcgagttag

SEQ ID NO: 138577 - DNA, 591 bp, Enterobacter cloacae
atgcatacttcagacaaatatactcccggctattcttcaggctggttcctgacatcacttctcaggaatcacaccagtgaaatgataaacaggtacgcctgcctgcgggctttacgtgttgatttattttataagcgtaattccttccgttttcggcattccgatcatcgacagctggaacatgaagtacggatcctgatgcaggaaatgatgaaacaaaaaggaattgtcgggtatttctgggtaattgaatggacaacagaccatggctggcatgcgcatgtagcattctggttagatgaccacatcacacagaccacctggccagccgctgaaaaagcctctgtcatctggaaatcgataaccgaacaggaaggcggcttttaccgctgtgaatacaaagaaaactaccaggccaatatcaatatcccagtttactataacgatccatccagtattgagaatattcttcaggtccttggttatctggcaaaagaagaacagaaagacggattttacctttatgggtgcaatgatgttcctcctcgccctgcttccgggcgtccccgggtacatcaactaaatctttag

SEQ ID NO: 138578 - DNA, 240 bp, Enterobacter cloacae
atgacaaacaaaactcatccggtatcatccagcacccagacaaccacatctttactgaatgaccaactggtggacatggcgttcatcacacactttaccggcatgacggataagtggttctaccggttgatttccgaaaatgcgtttccggcccccattaagttgggccgtagctcgcgttggcgtaaaagtcaggttgaggcgtggctgctggaacgaatgaaactctctgaggattaa

SEQ ID NO: 138579 - DNA, 168 bp, Enterobacter cloacae
atgattaccttcatgatgcttgagttggatttggattcttattctgaattagtagggttttacaactctttctttagtacggatgtaatcaagatcaaagataatatattgctatgggcgtcaggcaagaaagaaatactcccttttgaataccgacctggaatttaa

SEQ ID NO: 138580 - DNA, 972 bp, Enterobacter cloacae
  misc_feature (916)..(925): n is a, c, g, or t
gtgcggcacgcggatgttaagcaactggatggcgtcatcggaaatggtttgcgccttccggcggttgagcatcccccaggtcgcgtcgcgctccagcgtcgccatggtgatgttttcctgggctgccagttcgagaaacaacccctgttctttgcggttttcggtcagaaagccgatcccgaggtcgatggcttcccgcggcgagtggatcaccaccggctcgccgtcaatctcaatcaccccggcggtggctttgcgcaccccgaagatcagctgcgccagttcggaacgcccggcgccgaccagcccggcgaggccgacgatttcgccggcatgcaccaccaggctgctgggcttaaccttgccgccatcggtcagatcctcgacccgcaggcgcggctggccgcggggaatgtcccgttctttattgaacagatcgctgagcggccgaccgaccatcatgcgcaccagctccggcgcgttgagcttgtcgcgcaccaggctgccgacatactgcccatcgcgcagaacgctgacccggtcggagagctcatatacttccgccatgcggtggctgatatagatgatcgccatcccctcatcgcgcaggcgcaggatgagctcgaacaggcgctgggtttcccgcgaggagagggcggcggtgggttcatccatcaccagaatgcggctttgacggtgcagggcgcgggcgatctccacctgctgctgttcggcgatggtcagggtcatcacccggtcgctggctttgaactgggccccgagacggtcgatcaccgcctgcgcctggctgagcatggctttgcgctgcaccagaccaccgcgcgccagctcgctgccgaggaaaatgttttccgcgacggtcaggttcggcgccagctgcatctcctggtagatnnnnnnnnnntttgcggttttccgtcgatcaggatctcgccgctggtggcggtatag

SEQ ID NO: 138581 - DNA, 255 bp, Enterobacter cloacae
  misc_feature (212)..(221): n is a, c, g, or t
atgaccgccaccccggtactggaaatgcgccatatcgccaaagcttttggcaaattctacgcgctgaagggcgtcgacctgacggtctggcccggcgagatccatgccctgatgggggagaacggcgccggaaaaagcacgctgatgaagatcctcgccggcgcctataccgccaccagcggcgagatcctgatcgacggaaaaccgcaaannnnnnnnnnatctaccaggagatgcagctggcgccgaacctga

SEQ ID NO: 138582 - DNA, 2181 bp, Enterobacter cloacae
atgaccgctcgccgacacccgtttttcaccagcgcccgtggccgcctgctctcctttaatctgctgatgggcgtggtcaccctgttggtcagcggcgtggcggtgttcggctttcaccacgccagccagctgcaggagcaggtgcagcgccagactctcaacgacatgcgcggcagtatggatctggcgcgggacacggcgaatgtcgccacggcggcggtgcgcctgtcgcaggtggtgggggcgctggagtacaaaagcgaagcggaacggctgctggcgcagcagagcgtggcggagatgctggagcgcggccagcgccgccatctgcagcgcaatgcgctgctgagttcgctttaccagaatcagagtaacctgcgccatctcgccgatcttaacgatcgcggcggggataaggcgatcgatccgcgccggctggccgagatggaccggctgatcgtggctgcgatccataccgtcacgccgcggtcgatcgtcctgcaactcgaccagctgcgcggcgccctgccgacacgcagcgccgatcccgcgctggcgtttgtcctccctgatgtgacccgcgagctggcgacgctggccccgctgtcggcccagctggaggagagcgacctgacgatcagctggtacatgtatcacatcaaagcgctggtcgcgttgcttaacgaagatatcaatcagtacgtgacccgggtggcggaagcctcagagcagcgggcggcgcagagccatcgggagctgcgctccatcagtatgtttattctgctttccgcgctgctggcgctggcgatcaccggctgcgccgggtggtacatctaccgtaatctcggctcgaacctgaccgccatctcgcgggcgatgtcgcggctggctcagggagagccgaacgtctcggtgccggccctgcagcggcgcgacgagctgggggagctggcgcgggcctttaacgttttcgcccgcaatatggcgtcgctggagcacaccacccggctgctgaaagagaagaccaaccagatggagatcgatcggattaagcgccaggagctggaggaggcgctgctgcatagtcagaagatgaaggccgtcggccagctgaccggaggtctggcgcatgactttaacaacctgctggcggtgattatcggcagccttgagctggtggagccggatgcgcgcgatgcgccgcgcctctccagggcgctgaaggcggcggagcgtggggcgcttctgacccagcggctgctggccttttcacgcaagcaggcgctgcatccccaggcggcggcgatggcgccgctactggagaacctcagcgagctgatgcgtcactccctgccggcgaccttaagcctggagattgaggcgcagtcgccggcgtggccggcatggatagacgttggccagctggaaaacgccctgatcaatctggtgatgaacgcccgcgacgccatggcggggcgcgacggggtcatcaaaatacgcacctggaatcagcgggtcacccgcagcagcggccagcggcaggatatggtggccctggaggtgatcgatcatggcagcgggatgtcgcaggcggtgaaagcccgggtgtttgaaccttttttcaccaccaaagccaccggcagcggcagcggcctggggctgtcgatggtgtatggctttgtgcgccagtctggcggccgggtggcgctggagagcgcgccggggcaggggacgacggtgcggctgcagctgccgcgagcgttgaccgaggttgagaaggaggtggcgccagcggtggacgagccgcccccggcgggcgagcggctggcgctggtgctggaagatgaagaggatgtccgccagacgctatgtgaacagctgcatcagctgggctggctgacgctggaaaccgccagcggtgaagaggcgctgcagctgctggaggcctcgccggatattgccctgctgattagcgatctgatgctgcccggcgccctgagcggcgccgatgtgatccataccgcccgacgccgctttccggcgctgccggtgctactgatcagcggccaggatttgcgtccggcgcagaacccggccctgccggaggttgagtggctgcgtaagccgtttacccgcgcccagctggcgcaggcgctgagcgcggcgtacgcgaggatttga

SEQ ID NO: 138583 - DNA, 369 bp, Enterobacter cloacae
atgagattggccccgatgaaacgttacgcaaccgcactgctcttttgcactctgtcgctgaccagcctggccgctcgcgccgatattatcgatgacgcgatcggcaatattcagcaagccattaacgacgcctataacccgggcagcagtcgctccgatgacgacgacagatacgatgacgatggccggtatgatgacgggcgctatcaggggagccgtcagcagagccgtgacagtcagcgccagtatgacgagcggcaacgccagctggacgagcgccgccgccagctggatgaacgccagcgtcagctcgaccgcgatcgtcgtcagttagaaagcgaccagcgtcggctggatgatagctactga

SEQ ID NO: 138584 - DNA, 759 bp, Enterobacter cloacae
atgagcctgaccctccgcttaaccggcaccggcggcgctcagctggtgccggtcttcggctgcgactgcgcggcctgccgccgcgcccgccgcgaggagagccaccgacgccgcccctgtagcggagtggtcacgttcaacagcgccgtgacgctgcttgatgccggacgaccggatctgatggagcatcatcccgccggcagctttcaacaggtgctgctgacccactaccatctggatcatgtgcaggggctgtttccgctgcgctggggagtcggcgcgtcgattccggtctatggcccgccggatgacgccggctgcgacgatctgctcaaacaccccggtctgcttgactttagccataccgtcacgccgtttgtgatgtttaacctgcaggggctgcgggtgacgcccctaccccttaatcactcgaagctgacctttggttatctgctggagtcggcccacagccggctggcctggctctcggataccgccgggctgccggacaagtcgctgaagtttttgctcaataaccgcccgcaggcgatgatcatcgactgcagtcatgagccgcgcgcgcagaccccgcgtaaccataacgatctaaacaccgtccgcagccttaaccaggtcattggctgtccgcgggtgatcctcacccatatcagccaccagtttgacgtctggatgatggataacccgctgccgacaggtttcgaagcgggctatgacgggatggaaatagcgctggattaa

SEQ ID NO: 138585 - DNA, 564 bp, Enterobacter cloacae
atgccaggaaaactgatttggctggtgggcccctccggctccggtaaagatagcctgctggcggcgctgcgccagcgcgagcacccgcagctgctggtggcccatcgttacataacccgcccgtttaacgcgggcagcgagaatcatatcgccctcagcgaacatgagttttttacccgcgccgagcagcatctttttgctctcagctggcacgccaacaatacttactatggcattggcgtggagatcgacctctggctgcacgccggctttgacgtggtggccaacggctcccgcgcccatctggcgctggcccgggaacgctacggcgaggtgctggtgccgatctgtctcgccgtctcgccgccggtgctgcgccagcggctggagcagcgcggccgggaaaatgcgctggaaatcgcccagcgtctggaccgcgccgcgcgctataagccggacaactgcctgacattgaataacgacggcagtctccgacaatcggtcgatgaatttttccgcctgctgcgcagccacgcggcgcgcgaagcggatcaactggtataa

SEQ ID NO: 138586 - DNA, 1137 bp, Enterobacter cloacae
atgattatcaataacgtaaaactggttctcgacgacgaggtggtccacggttcgctggaagtccatgacggtcgcatcctcgccttcgccgaaagccagagccggctgccgcaggcgctggatggggaagacggctggctgctgccgggccttatcgagctgcataccgataacctcgacaagttctttaccccgcggccgaaggtagactggccggcccactcggcgatgagcagccatgacgccatgatggtcgccagcggcatcaccaccgtgctggacgccgtggcgattggcgacgtgcgcgatggcggcgatcgtcttgagaatctggagaagatggtcaatgccgtggaggagacgcaaaagcgcggtctcaaccgcgccgaacaccgcctgcacctgcgctgcgagctgccgcatcacaccacgctgccgctgtttgaaaagctgatcgatcgcgagtcggtgagcatggtctctctgatggaccactcgccgggccagcgtcagtacgccgatcgcagcaagtaccgcgattattatcagggcaaatatcatctgacgcatgacgaaatggaccgttttgaagccgagcagatggctctggccgccacctggtcgcagcccaatcgccagaccatcgccgccatgtgccgcgcccgccgtatcgccctcgccagccacgacgacgccaccgaagcgcatgtggccgaatctcaccagctagggagcgtgatcgccgagtttcccaccacgctggccgcggcgcaggcttcacgtcagcacgggatgcacgtcctgatgggggcgccgaatatcgtgcgcggcggttcccactccggcaacgtcgccgcccaccagctggcgagccacggtttgctggacatcctctcatctgactattaccccgccagcctgctggatgccgctttccgcatcgccgacgccgaggacaatgccttcaccctgccacaggcgatccgtctggtcagtcagcatccggcgcaggcgctgggccttgacgatcgcggcgtcatcgccgaggggaaacgcgccgacctggtgctggcgcaccgtcgcggcgaacatatccagatcgaccatgtctggcgccagggaaagagggtcttttaa

SEQ ID NO: 138587 - DNA, 681 bp, Enterobacter cloacae
atgatccgcgttgaaaacgtccataaaacctttgttctgcaccagcagcacggcgtgcgtctgccggtgctggccgacgcctcgctgaccgttaacgtcggggagtgcgtggtgctccacggtcactccggcagcggcaaatcgaccctgctgcgttcgctgtacgccaattatctgccggacagcggccatatccatatccgccacggcgacgaatgggtggacctggtcaccgccaccccacgcaaggtgctggaagtgcgcaaaaccaccatcggctgggtcagccagtttctacgggtgatcccgcgcatttcggcgctggaggtggtgatgcagccgctgctcgatcttgggacgccgcgcgaagcgagcgccgccaaagccgcccagctcctgacccgcctcaacgttccggaacgcctgtggcaccttgcgccgtccaccttttccggcggcgagcagcagcgggtcaacatcgcccgcggttttgcggtcgactatccgatcctgctccttgatgaacccaccgcctcactggatggcaaaaacagtgctgccgtggtcaacctgatccacgatgccaaagcgcgcggcgcggccatcgtggggattttccatgacgaaggggtacgccgtcaggtcgccgaccgactgcactctatgggaatgacagcatga

SEQ ID NO: 138588 - DNA, 576 bp, Enterobacter cloacae
gtgctgtaccagcagcgctcgctgtacgccatgagcgaagccgaacgccgacgcctgttgcgcaccgaatggggcgtagtgcatcagcacccgatggacggtctgcgtcgccaggtctccgccgggggcaacatcggcgaacggctaatggccaccggcgcccgccactacggcaacattcgcgccaccgccgaaaagtggctgcaggaggtggagatcccgccctcgcgcatcgacgacctgcccaccaccttctccggcggcatgcagcagcgtctgcagatcgcccgcaatctggtcacccagccgaagctggtgtttatggatgaacccaccggcgggctggatgtgtccgtgcaggcgcggctgctagacctgctgcgtggcctggcggtggagctgaatctggcggtggtgattgttacccacgatctcggcgtcgctcgcctgctggcgaaccgtctgctggtgatgaagcagggccaggtggtggagagtggcttaaccgaccgggtgctcgacgatccgcaccatccttacacccagctgctggtgtcgtcggtgttgcagaattga

SEQ ID NO: 138589 - DNA, 648 bp, Enterobacter cloacae
gtgggctttcaggtgctcacggatctcgacgacgtcggaacgtttacggatgaaggaggccgcgacgaagtccacgccctgttcgcaaccgaagatcagatcctgtttgtctttctcagccagcgccggcagggcgatggagacgcccggcaggttaacgcctttgttctcgccaagatcgccattgttcagcactttacaaataactttgttgccttcgatagccgtgacttccatgccgatcaggccatcgtccaccaggacggtgttgccgacggcgaggtcggaggtgaagccttcataggttaccgcaacgatttcgttgttgccgatgacggatttatcggtagtgaaggtgaaggtctggcctgctttcagggagacgtcgttgccgccttccagcttgatggtacgaatttccggccctttagtgtccagcagaatagcggctttcttaccggttttgctcatcacattgcgcaggttctggatgcgctgaccgtgttccgcatagtcaccgtgggagaagttcagacgcatcacattcatgccggcttccagcattttggtcagcatctcttcagattcggttttcggaccgatggtgcaaacaattttggtctttttcatgacagttttagtctttaa

SEQ ID NO: 138590 - DNA, 213 bp, Enterobacter cloacae
atgggaaataaagcgaaagacgacgacctgtaccaggaaatgtgccgcgtggtgggtaaagtcgtgctggaaatgcgtgacctgggtcaggagccgaaacacattgtcattgccggtgtgctgcgcacctcgctggcgaaccgcaaaatccagcgttcgccgctcaccgtggaggctatggagaaagtcattcatgcgctttccgggcactga

SEQ ID NO: 138591 - DNA, 639 bp, Enterobacter cloacae
atgaccgtcgttgcccatgatgaagcacaatccctgaaggcgcggatcttcagcgccgctatcgctgtctttgctgaacacgggctgtcaggcgcccgcatggagcagatcgccaccgaggcgcagaccaccaaacgcatggtggtttactacttcaaaagcaaagaacagctctatcaggaggtgctgcagcatgtgtatgcgcggatccgcgaaaccgagcagcagctggggctggagaatgtgccgccggtggaggcgctggtgcggctggtgcgctggagcgtgcgctatcacgccacccatgcggactatatgcgcgtcatttgcatggagaatatgcagcgcggcaagtggttaaaaagctcgggtgaactgaagccgctgaatcgtaccgccctgtcgattctggaagacattttactgcgcggccagcagcagggcgtctttcaggcggggctcgacgcgcgcgatgtccaccggttaatcagcagcttcagcttttatcaggtgtcgaacttctacaccttcagcagcctgtatcttgacgatccgctacccgccatcgacgatgaagcgatggtggctcaccattgtgacattgccgtcagggcggtgatccgcttcgtgatttcctga

SEQ ID NO: 138592 - DNA, 1638 bp, Enterobacter cloacae
  misc_feature (1416)..(1425): n is a, c, g, or t
atgctgcgctctatcgccaccgtttcgatttccggcaccctgcctgagaagctgcacgctattgcggcggcggggtatcagggggtggaaattttcgagaacgatctgctctattatacggggacgccggcggaaatccgccagcttgccgccgatttagggttaaaaatcacgctttttcaaccctttcgcgattttgaaggcgccagtcgggcgcagtttgcggcgaatatggcccgcgctcggcgcaagtttgctctgatgcacgagctgggctgcgagacgctgctgctgtgcagcaatgtgcagccggactgctcggcagatagcgaattgcaggtcgcggacctgcgggcgctggccacgctggcggaagaggaggggatcgctatcggctatgaggccctggcctggggaacccatgtgaaccgctggcagcaggcctgggagcgggtgcggcgggtggacagcccggcgttgggcctggtgctcgacagcttccatattctggcccgcggcgacacgctggacgcgctaccgtcggtgccggtggagaaaatcacctttgtacagctcgccgatgcgccgtatatgaaaatggatttgctggagtggagccgccacttccgctgctttcccggacagggggagctgccgctggaggcgtttgccgagcagatcacccgctgtggctaccgcggcccctggtcgctggagatcttcaatgacggttttcgcgcctcgccgaacggcgcgacggccaaagatggttatcgttcgctgctgtggctggaggagcaaacccgccgtcggctcccgacgtgcgatgccgatctgttttcaccgccgccgctgccggtctaccagggactggagtttatcgaattcgccgccagcgccgccgaggcgcagcgcctggggcaacatctgcaggcgctgggttttcagcacgagggaagccaccgctccagacaggtgacgctgtggcgcaacggcggggcgcggatcgtcatcaaccatcagccgcacagctgggccgaccatttttatcaacgccacggggtatcgctctgcgcgatggcgctgcgggtcgagcacagcgcgtcgcttgtcgcccgcgcccgcgcgctggggtatgccacctggcagggcgacgccgggccgaacgaaacgccgatcccggcgatctgcgcccccgacggcagccttatctatctcatcgacgccggggaggctatctacgagcgcgattttcatctgcgtgatggcgtgacggtgcgcgaggattatctcggtatcgatcatctggcgctgggaatggaggccgacagccgcgataactgggtgatgttcttccgtacggtgtttggtttttcccttgagcatgagcagacgctgccggacccgtatggactnnnnnnnnnngcgcagcctggcggtgcggagcccgcagggcgatatccgtctggcgctgaatatttcgcagagccgggcgacgcagatcgcccgctccgtcgcctgctaccagggggcggggctgcagcatgccgcctttgcctgccgcgatctgccggccgcctgcgaccagcttgccgaggttgcccgccatacgctgccgatcccggccaattattatga

SEQ ID NO: 138593 - DNA, 1284 bp, Enterobacter cloacae
atgagctcatatagccctaacccgacggctgccgcccagccagccgtcaccgtgcgccgctcccggcggcgtatcggcattcttgcgctgttggccattggcaccatgatcaactatctcgatcgcaccgtgctggggatcgccgccccaaagctcaccgctgagctggggatcgacccggcgatcatgggaatcctcttctccgccttcgcctggacctatgctctggcgcagatccccggcggattgtttctcgaccgctttggcaacaaagtgacctactttttgtcactgaccctgtggtcgctgtttaccctgttccatggcatggcggtggggctgaagacgctgctgctgtgccgcttcgggctcggcattagcgaagcgccgtgctttccggtcaacagccgggtggtcagcgcctggttcccacagcaggagcgggcgaaggccacggcggtgtacaccgtgggggagtatctcgggctggcctgctttgcgccgctgctgttctggatcatggacggtttcggctggcgggtgctgttcgtcagcgttggcgccgtcggcattctgtttgccctggtgtggtggcgctgctaccgcgaaccgcatgaagatccgcgccttagccagcaggagcgcgagcatatcgaaaacggcggcggcctcagcgccccgaccgaccagcaggtggcgttcagctggccgctggtccgccagctgctgagcaaacggcagatcatcggcgccagtatcggccagtttgccggcaataccgtgctggtgttctttctcacctggttccccacctggctggccaccgagcggcatatgccctggctgaaggttggcttcttctccatcctgccgtttgtcgccgccgccggcggggtgatgtttggcggctggctctccgacaagctgctgaaagctaccgggtcgctgatggccagctgcatcatcaccgccaactggctggagagcgacctggcggtgatcctggtgatgtcgtttgccttttttggccaggggatggtgggtctcggctggacgctgatctccgatatcgccccgaaggggctgggcggtctgaccggcggcctgtttaacttctgcgccaacctcgcggggatcctcaccccgctggtgatcggctttatcgttgccgggttcggcaatttcttctacgccttgatctacatcggcggcgccgcgctgctgggcgtggtggcctatctgtttatcctcggcgacgtcaaacgtatcgagttatcgcagtaa

SEQ ID NO: 138594 - DNA, 837 bp, Enterobacter cloacae
atggtgattagtgggaatacgcggctgatagcgcaccttggctatccgaccgccagttttaaggcgccgatgatctacaacccgtggttcgttgaccagcaggtggacgtgaaggtggtgccgatgggggtcaggccggaggactacgccgcgtttattccgccgctgtttacgatgaccaacatcatcggcgcgctggtgacgatgccgcataaaatcgccacctgcgatctggtgcagcgcctgagcccgacggcggccatcgctggcgcctgcaatgccatccgccgcgaggctgacggtagcctgagcggagacatgttcgatggcgagggatttgtgctgggcctgcgtcgtaaagggtttaacccgcaggggacgcgggcgctggtggttggcagcggcggggggggatcggctatcgccgcctccctcgcggcggcgggggtcagcgccctgaccctgtacgatacccggcccgaggtggcgcacgccctcgccgggcggctgcatcagcactatccgcagctcgatatcaccctgatgcagcccgatcctgccggacacgagctggtggtcaatgccaccccgctggggatgaaggccagcgatccgctgccgctggacgttgaccgtctggcgccaggcgcctgggtgggggaagtcgtcatgactcaggagtacaccccgctgctgagggccgctcaggcacgacagtgccacatccagcgcgggaccgacatgctgtttgaaatgatccctgcctatctgcgcttttttgacctaccggtagccacccccgagcagctgcgggcgctggcagaaattcgctactga

SEQ ID NO: 138595 - DNA, 744 bp, Enterobacter cloacae
atggcaaataccactctcacgctgctggcggcgggaagcctgagaagcgccttcctgccgctggtggcgcactttcggcagcacactggcctggcggtcgatgcgcagtttggccctgccggcctgctgcgcgagcggatcgaagccgggtcgccgtgcgcggtttttgcttccgccaacgcggcgcacccgcaggcgctgctgcaggcgggtctggcgcaggaatgccagggatttgccagcaaccagctgatgctgaccgcccggcggtcgccggacaacgatggcctggactggctggcgctgctcagcacgccccgcctgcggttggcgacctccacgccgggctgcgatccgtcgggagattatacctggcagctgttcgcccgaattgaggcacgctatccagggttgggcaacgcgatggccgggcgggcgcagcagctggtcggcggcagagactcactgagcgtgccgccgggagagatagccggcgcgtggcttattcgccagaatctggcggatctgtttatcggctatgcgcactatggccccgcgctggccgcctgcgacgatctgcgtaccctgaccatcccggcgccgtggaatattcgctgcgattaccagctggcgcgtctcagggccgatcccgccgcgctggccctgtatcgctttatcctcggcgacgttggtcaggggtatctccggcaggcgggttttatgccgttcagcgacgcagcgtaa

SEQ ID NO: 138596 - DNA, 1599 bp, Enterobacter cloacae
atgagcattttacaaaatttggttgccgccagtcagttggatgaaagcgtactgcgccagcaggcccggtcacgtcaggcgcagtggcagtcctggcttgcgccaatcagtgacgcccaaccaaccggggacgatccgggctatgacgatgattttcagcgtatccgcgaggaggtcaataagatctccggtgtcgataccgtactgatttgccagttggctggacagttactggcaacaacaaaagatatccggattgttacctattactgctgggcccgtttgcaccaggacggggaagctggcttggccgatgggctggagctgctggcaggcttgctgcaacgatatggtatgcagctttatccgcagcgcgaccgtagccgcaaagcagccctcgagtggctggcgggtactcgtatcttagacagtctttcactttttccagaagttgtgcgggaggacgcaaggcgtaccgtcggcgcgctgcttctcattgatgattgtctgacgacagaaccagaaacatcacggccagatctgcaagcactctggggtgctctggagtctcgtttgataaagggcgggggagtcgatgcggtggtgccgcagaacgtcggaaaccgggggctggctcaaaccgcttcacgcatggctgaatacgaagcgccggttctcagtaacatcacctccggtcaggatctgctggcccaggcgcgaaccctgacagcatatctgcgtgttcaacccgatggctggcttgccgcacatcggctaatgaaaagccttcgtcatgacaccttgacaatcatccctgcgcctgatgctgaaggaaaaacacgtatcgagcctcccagagcagatcagcgtgccatgctcaagcggctgtacctgcaacagagctggtcggagatactggaacaggcggacagtaccttctcacgtggcgctaaccacctctggcttgacctgcaatggtatatccatcaggcgctggtgaggtcgggtcaggatgtgctggccgatattataattgccgatctgaaaggattgctgcgccgtctcaccgggcttgaaacattagcttttaacgacggcacaccctttgccgatgaggtcacgctgaactggataaatcagagtgtactcgacgatatgtccgtctggcaggatgagccagtatcggctgccagcggcgctgataacgacattctggcccttgaacctgaagcgctcgagaaggctgacactgacggtctcgatgctgcactccactggattcagacgcgcccgggcactgaatccactaaagaaaaatggctgttgcgcctgctgatggcccgcgtggccgaacaaaaggggaagaatgacctcgcgctctatcttctgcgagaactcgacgatgcggcgggatcaatcaccctcacgcagtggatcccagccctgttgttcgagattaaatcgcgacggctcaggctactgcgcatgaaagccacgcgcagcgagagtgaaaagttacgattgcaaccggagatggatcaattgctggcaggtctgattgcgctcgatccagccagtagcgcggtgctttgcggctaa

SEQ ID NO: 138597 - DNA, 819 bp, Enterobacter cloacae
gtgcagccgctgactcaggcctgggaaaccgtgcttctgccgtcggcggccagtctgaatgacaaatggcgccgatcggtggtcgccaactggcacaccgcctttgacggacgctttccgtttgccgccagcaaaagcgacgcctcgctgccgatgctggctgagtttgtgcgcaaggacagcgggcggatcgaacgttttctcacgacggagctgaacggtgtcctgcataaagaaggcagtcagtgggtgccggataaggtcaacagtcacggcctggtctttaatccggcctttctgcgcgccatcaaccagctaagccagctgtccgacattcttttcaccgacggaagccaggggatcagctttgagttacaggccaggcctgccccggaggttgtcgagacacagctgacgatagacggccaaaagttgcgctatttcaatcagatggccgactggcagactttccgctggccgggggagacgtataaacccggtactctgcttacctggaccaccgtcaatgcgggcacgcgcctgttcggtgactacagcggcacctggggttttattcgctggctggagcagggtaaacgccatccgctggatcgcagccagtggatgatgagcttctccgccccggatggccgcaccctgcagtgggtattgcgctcccagcttgggagcggcccgttggcgcttctggcgctgcgcggattgaccctgccggatcagattttcactgtcgatgcggctgagagcgcacaggccctgacgacgggggtagggaatagtgacatggatgagatggaataa

SEQ ID NO: 138598 - DNA, 1161 bp, Enterobacter cloacae
  misc_feature (1110)..(1119): n is a, c, g, or t
gtggcgaatcatcgcctgatacgtgacccggccaatgccgcgttgcagcaggcgctcagcgcgctggtcaactccgcccccaatagcgaccaacgagccaggctggcgaaaccgggctatgaccagctgaaagcctggctgatgatggctcgtccggataaagccgatggcgcatttttcgcgctgaccatgaaaacggtccagccgacgcgaatggggatctcgaccggtctgtggcaaagtctggcgccggatttgtgggccttttatctctccctgctgcccgagcggccagagtggaagatcatcccggatgcgcaacgggtgagtcagagccgtcaggttctgttgcagcagctaggtcgccgcaatgccgaaagcaccttatatgagaacatgctcaaatccgtgcgtcgtatttttgccgatgtgtcgctggaagacatgaccagtggcaccgacgcgcgccgcctgtttaccaccgatgaagtggtcccggggatgtttacccgccaggcatgggaaggcggcattcagcaggccattgataaggcagccagctcgcgccgggaggaaatcgactgggtgctgagcgattcgcgcaaaacggtgtcgacagacctgtcgccggaggcgctgaaagcgcgtctgacccgacgctacttcaccgatttcgccggcagctggctgaattttctcaacagtctgcgacttaatccggcgaccaatatcgccgatgttaccgaccagctcacgctgattagcgatgtccgccagtcgccgctgattgccctgatgaatacccttgcctggcaggggcaggcggggcaacaaagggaggggctgtcggacagccttattaaatcggccaaagatctggtgggcgggaaagacaagccggtcatcgaccagtcggcagccggcccgcaggggcctctggatgacacgttcggcccactgctccagctgatggggaaaaacacgggcagcaacgtcatgtcggccgatagcaccctgagcctgcaaacctatctgacccgtatcacccgcgtgcgcctgcgcctgcagcaggttgcgaatgccaccgatccgcaggagatgatgcagacnnnnnnnnnnccctggcgcagaccgtcttccaggggaaaagcgtcgacctga

SEQ ID NO: 138599 - DNA, 1404 bp, Enterobacter cloacae
gtgaagttacttttagcaccgaaaactacggaaggtcgctatctttcagtcgtattcattctctttttactcttggctgcaatgacatttatcgtctggaaacatcctgacatggccggacttgagggcgatagtcagcagcagaattactggcttattggtgggtgctgcattaccggatgtatctttatcatgttagttatgctcctgtggacagctcgcagtgccggtaaaaaggagtttgaggcgctcctggatgtcactcgtggtgatgacaataagagaaaagatgagagtgaaaacatctctgtttctccagcagtggtgatgtgtgccaggattcgtgaccatctgcgaacccgaattggaattcactggcggcgcaaagtccgcctgcttttagtcaccggcgacgaggcggcaatcgaacaactggtgcctggcctgcgtcagcagcactggcttgaaggcaaccgcaccgtgctgatttacggcggcagccttgcatcggagcctgaccgagaaaaatacatcgcgctgcgcaagctgcgccgcggtcgtcctctggatgggattgtgcgggtgatgccgtcgtctctcaccctgacgccgcagataagcgagagcgacctgcgcgggctggaaaaaatcagcgaactgctgggctatgccgccccggtctggttatggaaactgtgcgacagtgagtggccgcaggctgaccgcgcggtgcaggcggtaggggttagcttcccgttgcgcgccactgaggaagatgtcgcccgtcagcttgcgcagatgttgcccacgctacgggagcaggggatgcaccagatcgcagcggatacccgccacgacttcctgctgcgtctggggcagcagcttatcgacggggagatcgcacaatggcgccggcagctggcgccgtggctgaccgcctcgcggcagcggcttgcgctgcgaggcctgatgtttagcctgccagagcctcgtaccgtagatccgtatcaggagacggatacctcgcctgcgggccagcctcatctcctgacgctgcccgtcacctggcaggggatcgtcgatgactgccgccgtttacgcgggcatcacgtgggaatggcgtgggagcggggcctggcgtgcggtctgctggccatcctcggcctgtgggcggcgggactgctgctctcctttgccctcaattacagtcatattgcttcggtagcgggaaaagcccgcgacctgatggcccacccctccgtttctgactatcaactgacggccctccatgccctgcgcaatgaggccggccgtctcgtgcacgatgggcagaagggagcaccctggtatcggcgctttggtctggaccatcatcagcaactattaaacgccgtcctaccttga

SEQ ID NO: 138600 - DNA, 1209 bp, Enterobacter cloacae
atgccatatacacttaaacatttgccagaacgctaccccagacctaagcctctgaaattttctcgttggcttgttgctctggttgtcatgctttcagtcagtattatcataatgcgtatatttgggcattatgttgaaaatctgtacttctggagattagctttaggttttcctgttgctttgtggagtgtcttgctttcttctcgtctgcttgtttggtctttacaggatagcaaagcaaacgcttttgacaaacagcgagaacagtggattcttcgagaaacccgtaaggcacggcgtgcattacaagtgctgagtgcaacatttattaccggccactcatcagttgctcagaaagataccgctattgctatgcaaaataacgacagcattattgtttcacaggtcggccgggatggtaatgaaagcgccagaatgagccaaatttcttccagcccgcaggattctatggaattcgtgataatgaatattttttcgcagatgattgcagacattccttttacacaaatccctgataaatgcccactagtagtagtttttgatgtaacaacatcgctgcctttggagaacattcgccattactgggatgaggcatggcaaaagaacaatatcacttttcctgttgaacacgttgaagggcgtggtcttagtgtaattgaccgctggttaaatgaacgtattaaagataaagcaatgttattgatcgttggcctccagattgatccggttgttacaaacaatactgctgaagcggctgttgctctacttcttggcaaccgcctaacgcaagaggcgcttgaccccctcgcattactacaccggccagatgctgctccctcaggtgaacttagcgaagggatgaggatggccgcctggaacgtcccgctaaaagaaagtatggtgaaaaatttatggctcgctggaatgacaggtgagcaacgtgcagaagcgattggatgtcagaatgcacatcctgcgcagtgcgtaaaagatgaggctgtcatttcactcgatatatccatggggaatgctggagccgctgcaccctggctggctattgctgccgccactgaaatcgcccgacaaacacaatccccgcagatgattatctgcggggataccactcagaaagtgctatggagcacgcttattaccccgatagcttcaagacaggagatggatctgtga

SEQ ID NO: 138601 - DNA, 162 bp, Enterobacter cloacae
atgcactacgaggggaagagaatatcatggttgaaaacggtaggtggggtggagaaaaccctccgattcctgattataattaaaaaagacaagtctctgttaaattacatgctgaaaaaaatggaaggccacttcaacgacaaaagtaaactagcacgttga

SEQ ID NO: 138602 - DNA, 636 bp, Enterobacter cloacae
atgagagggtgtaactgtgagattaaatgtatcgcctgtggattaaactgccggattgaagcgaaaaataaaatagagcgcactctctgcggagagaagaaattttctgtgtggccagacaggaactatttttttaaacgggcagtaaatgatctggttttccgtgaactcacctgttttgtacctgaaggtatagtggtggtggatttttcattgggaaatatattgtactttctgaatgagtgctggaccaggaaattgcgggatagtggtctgaaaatcattctgatagcagataaaaacatgctgccaatggctaatttttggaggctgcgttccgggttttcctgggcagtagtggaagtgaatagtgacttaagcaacttaattaataaaataaaacgcgttatgctggggcggaaccttctgtgcaggcgcacaccgtcgctgacggagcatgaaatgaagacgctgtgcctgcttgcagaggggcattccagccaggatatcgcccgtatcatggcgtgcgatacccgcagcgtctaccgctttcaatactctttatgcaagaagttcggcgggctcaatcgcctgcgcaatctgcgcttcaggcataccatccccgcgctggattag

SEQ ID NO: 138603 - DNA, 684 bp, Enterobacter cloacae
atgatgaagaaaatgcttttcatcggattgtgcgggctgtgtattcagcccgcttccgcggtgtactttgattccatcatttatgatatggatgccagtaaagattttatctcccggccgttagtcaatgatacaagcagcaataacttatataccatctcggcttacaaaatcgccaggccgggcaacggtaatgaacggccggtgcccggtcaggacaaagacctggtctggtcgccgctgcagttcaccgtacaggccaatggccaggagtattttaaactctattaccgtgggcctggagatgacattgagcgatattatcgggtgatctttaaagaaacgcccgtcacggtttttccctggcgcatggagcagaaaaaactgaatattgtcccttcggtatcgatgagcaccattctcattgttcgccctcgaaaaacgcgtttccagtatgagatcaacgaagccacgggcaccattaaaaataccggcaatacctatttcagagtcattctccagaaaggttgtaatggggatgatgaaagctctacacagttttatatgctgccaggggatagctggacaggccctgaggcgaagaatggcaacaggaaatatatcgtcgcattaggccgttatcataaattaggtgatggctgtttcatggatacgccggattaa

SEQ ID NO: 138604 - DNA, 1620 bp, Enterobacter cloacae
atgtctattaaaccccaggccatcatgctgctggccggctggctgctagccgcgccggctatggcacttaccgctactaacgacgggagcggcagcaacacctatatgtttatcgacaacgatgtcgatgatgaatatttcatcaccaccagctccctgtccccgcgcttcactggagccaatatctggacgaaatataaaacgaaccagcgtagtctgggatacatgggcaactcaggctggagttacagcaaccgctattttgacctctggatagacaactccccgattaaccaaccgtttctcgggctccgctgcatgtcaacgggcgcaaactgcccggcttcgggctatatccccgccgatgtactcgacaaagacggcttctatcacgcgatgtccggcaacagcgtggccaatggttactacggcgccggggtgctgagtcagtcggcatatgagtattttcgtaatcggccggtgggaaccatcgatagtttgcagttgaatctttgctacatggactccaaagctgattatgactttgcttccggcgttcgctgtaaagatctccccagcggaggaaagtgggtttactacacgatgaacctcgaaaaggtctcgcatctgaccttgaacagtaccggcgcgatggcggaagtgtggattgccagcgacggtacgccaagcgtcaacctcggctctgaattgtgccagatgggggtggtagggagcgcttcggggatcatttgtaaaatggtgtcttaccgctttcaggaaaccaaaaccctcaccacttcgcttgatttccggatggttatcgatacgacgctgctgggattttccccttcttcgtctgacgtcaagtacagcggtgatggcgccagctggaccaatttcggctcgatcagcacctataacaaggtcttcaaaccgtcaggggagtacatctatgtctttctgtccaacgcctttttcaaaaaagctctcaaggcgggcacagatttaaccaacaaagatgagctgttcaccttctattttgataactccgtgactcctcaatcaggttattatcagtttacgccatcaacactaattaacatcatcccgcgtgaatacggcatcagcattatcgccagcgacgggagtgctcatccaaaagcatctggcaagatcggtagcgaaacgcccatcacctttgagtataaagttactacctccgcgtcgcgtcaggcggacagcatcaccgcccaggtgactggcgacgccatcaacatatatggtcagccatactgtctgtttacctcagcagacgagacgctaaaagtgccggtcccggccttcctcgaatggacttccgctgccggtaacgcggtaagagtgcgcaacagctgcggtgaaaaccccgttgatatgaccaacgccgcctgggttcagacggcctggaacgccaacgtcaacgatggtttcttttttaccaccacgctgaaactgctgtttccgatggatgactcgcattcacagttcactactgatggtcatgactggatgggaaccgtcagcgccaccggggatgtaaaagtgaccgccacctgggttggcgtcgatcggggggtatga

SEQ ID NO: 138605 - DNA, 2538 bp, Enterobacter cloacae
atggataatcttggttatgtcaaagggacgttgttcgctgggttattgattacagtaaaccagggttgggcagctaatgctacagcgccagtcaaagtcagtaactatattattccttcggtatttgctaacgcgttatatcagggcatgtcggtccctgtttttattcgttatgaaggcgataatagtacccaacgcagtcagcaaaaaatcgctgatgccatcctgaccatcaaggataatgagtttcgcctgaatcagatcgcgctcagcgatctgccggagcgaaccgaactatcacctcagattaaatcattgctcaacgagatgcaggataaaagcatcggcgacggtcagcgcgtttatatcaacaaagacgcctcactttcacttgatacgcgttccttttatctcgagctgacggttaaccgggcagccatgcaggccgctattttgccgcgtaccaatatgcatggagaatctaccgcccagaatctctcgagcgtgctgaattactcgatggggagctattacaacaaatatgagaataccgataacgccagcagctatctgacgctggataatacctggtcgctgcgggaacaccatctgaactttaacggttctctttacgggataggtaccggcaaccaggagagtaaactgtatcgctcgatgtacgaacgtgactatcagggacgccgcctggcaatgggcatggtggatacatggaatctgcaatcgattgccagcatgagcgccctgaattccagccgtatttacggcgtcagctatggcaataaaagcagttcacaaacgcaggacaatacgcttgctctggtgcccgtcacggtgtttctcccggccgctggtgaagtacacgtctatcgtgacggcaaactgctcagcattcaaaacttctcgatgggtagctacgagctcgatacgtcgcgtctgccatttggcatctacaacgttgatatccaggtggtagttaacgggcgcgtagtcagcagccggacggcgaacatcaataaaacgttcgcccgtaaatcgagcgtgaccggcgatctctcgtggcaaaccttcggcggcagcctcgaatacaacaagatggactatcgccacaaatacaacatcaattatggcacaaagaatacatggatagccgggatcgccgcggcaaccagccaaccctggctttccggcatcaatctgaaaaccacgctctacggttttgacactaacggcgtcaatgaaacggaagcgaacgttattttcaacgacgcgttcagctttaaccagcaggggctgctcgctaccgacggcagctggcagagtacctccacctttaatatgagtttacccgacggttacggcaacctgtgggggtcgcgccagtacagttccatcggtaacgcgctcccgatgcagcagaatgactacgtgaccatcggcgccaatgccaatctgcgcaaaatcgcgccgttcctcggtacgctgagcgtcagccgaaccaataacaaatataccggcagcacctataccaacgtcgattacgaccaatcgctgttagccaatcgctatgcgaccgtgtcgctgcgcgccggtattcagaactatcaatacaacaaccatgaaaatctgcgtgataagtacgtcaatattgatgtctctatccccttctctacctggctcagcaccggcgtgtccagccagaatggaaacatgctggcgaacgccacgctgcgcaaaagctttgacgacagcgctattacccaggtgggagcatcggtttcgaagcagattaaacagaataaaaatgacgatagccgctatcgttccgacgattacgccgccaatggttacgtcagctatgacacaaaatataacgctggcaccgtctccgttagccgctcatcgcagcacagttcaaactacagcctgagctcgcagggcagcctggcctggacggaaaaaaatgtttatgtcggcaaaggcactcaaaccgcaggcctggtggtgaataccaatttcagcggcaaggggaggatgatggcgcagatcaacggccagaactacccgctgaccggcaaaagcaacttcatcagtcttccgccctacgccgaatacaaggtggagctgatgaatgacaaaaattcggaagacagcgtcgacatcgttaacggccggcggaacaaagtcgtgctctatcccggcaacgtcagcgtgattaacccggaagtcaaacagctcgtcaccgtatttggccgggtgaaagatcgccgcggtggttactacgccaacgccgatatacataaccacattggtaaaacacgcaccgacgaactcggcgagttcgccatggacgttgataagcgctatccggtgattaccctggtcgataaattcggcggtatttgcgaagtggatttggatctgcgagaagcgaaaggtgccgtatgggtcggtgagatcccttgtgagatccaacaacaaacggcatcagtgactggagatattaagaatgtctattaa

SEQ ID NO: 138606 - DNA, 678 bp, Enterobacter cloacae
atgaaactgaatccattattcctctctctctttttattcaccgtgacgccctcctcccatgcgattaatgtcggagacgtcacctcaataatggggccggatgcctcgactctggcaaaagaaatcattaataccaccgatacggcgcgttacgttagcgtcagcgtggagcgtatctcatcgcctatggccggtggcacggttatcccgatggcgaacagatcggaattattatcaacacccgccagcctgatattacccggcaatgctaaagagaactttcgttttttttacaaaggacctcaggataaccaggaacgttactaccgaatatcctggaccgatgagccggtaaccgagtttgaagccagtaaaaagaaaaaacagggcgaggcaacgacttcagccattattggtaccattctggtggtcgcgccgcgagaagaaagatttgactatcgtcgcgataatgacacggtaaccaatactggtaacgcttcattccgtgtgatctcctacggtccctgtcgtgataaagcgaaggatgagggacaaggctgccgtgagcgatattatgtcatgcctggtgtcagcgtaaaaataaagcataccgatctcaccaacaaaaaaacgcgaattggaatatggcacggtgagcaatatataaatgtaaactga

SEQ ID NO: 138607 - DNA, 579 bp, Enterobacter cloacae
atgaaaaaaatcgtattagcgggtgttgcggctgcggctcttatctcttccaacgcaatggctgacgtaactgcttccgccactgcaagctgggatgcaagcgcaacgaaagacaccaccagcgcgctagttgtcactccgctgaaatccctgaatttccagtacgcggaagggattaaagcgtttaactctcagaaaggcgcttttgacatcaccatccagggccagtctggcgcgactgactttacgctgacctctcagatcgtgagcaacaccctgagccgtaccactgacgcctctactctggccgtcggtgtgaactggaacggcaacgcgctgaacaaatccaccccggtaacgatgattgatacttccaacaacatttccgcgggtctggatgcgctggctgtcgcgaccgccttcgcaggcgccgatcgcgtcagcactcagggtaacttcgatttcactatcgactccgcgacttctgacggcagcactgccgctgagttcaaagatttaaccgacggttactggagcggcgacgttcgcgttcagtttaatgcggtctggactatctaa

SEQ ID NO: 138608 - DNA, 618 bp, Enterobacter cloacae
atggttccacagaaatatgagaaggcatactgtattagctgccagtatcagtgcgaaatctatccacgacctacgataaaatcgattagatgtattgaaactcactattgcgtatggcctgataaaaacatctacttaaaaaatggcgtgcattgttttttaattaacaagcattacaacttctctaattctggatatgtttttgttgatttttctcgctacaacatcagattattcaccaatgataaatggattgaatatctgatcaaaacaggattgcggatagttttgattgccgacagattagcgcaaccactggcgttgtactggaaacaccgttgtcagcaaatagtttcaattatctataccagcgatacccgaaatgagattgaaaggaaaatacatctttcctttctcggccaaaaagatggacgcggctatcgtcagaaactaagcgctcaagaggtattggtactcgatcttttacttgcagagaagtcagttaaagagatagcacaagaattgcagatggcagaaaaaagaatctacgcaatcaagctcagcttgcagaataagatgggaggcagagggaagttaaacattattttatctggataa

SEQ ID NO: 138609 - DNA, 267 bp, Enterobacter cloacae
atgaaaacaaaaaagatacccctggtaatttatacggtaatcgttgcaggactcactattctgggaacgcgactctacgactccgtttcggacacaacagatcctgccattgcaaatggtcccttctgggctggattgtgtgtgaaaacggacagtaaagatggaatgaatgaattaatttgttcgaatatcaggattttcgtgaaagccgaagattatgatcgctctgttcgcaaacgtgagttgtccggcatcctgaatgattga

SEQ ID NO: 138610 - DNA, 621 bp, Enterobacter cloacae
atgttcgtttttgggtatctccgggcatccacttcagagcaggatgccagccgggcaaaaaatgtactgaaggcgtttgcaaaccaacatggccaccgtattgctggctggtatatcgataatgtctccggtacgacaatgaaccgccctgaactgatcaggcttcttggtgatgcggaacctggtgatgtgatcctcattgaacaggtcgacaggctcactcgcctggatgatgcaggctgggagacactcagaaagcaaattacagacaagcagctggccatcgtcagtcttgatctaccgaccagctatctggcgctatccagcacagtaagtgatgactttacccgaagcatgctgaaggccgtaaatggcatgatgctggatatgctggccgctattgcccgaaaagattacgaagaccgtcgacgtcgacagtcagagggtatcagtaaggcgaaagcagaaggaaaataccggggcagggtggccgatgcgcagaaacacgaactgattcgcactctgcgcctggtcaatggaaaatcgctgcgagaaacagctcgcctggctggcgtttctaaaatgactgtgatccgggtctgctccagcgctgataaataa

SEQ ID NO: 138611 - DNA, 642 bp, Enterobacter cloacae
atgcctgtgattgcaaatgctcatcctaaaggtggagtaggtaagaccactacatcggttaatttgattggtgaaatggagtccgatgctgttgaccttgatactcatacgggtctttcaatcatccttggtctgcgtccggacggtaagccgatttccgttaaggtacccaatacagttgatgagctaattgaaataatgacgccatataagaatagcgataagacgctgtttatagattgtggtggctttgactccgatctcactcgtacagccgttgcgtttgccgactgtgttatcgtcccttcaaaagactctctgaccgaacggattggtttgatgcactttgatggggttcttgaggagattagtaccatcatgggcacaaacatcactgctcatctttatctttgcaaggtaaatccaaacaaaaagaactttccaaagctggaggcgatcctcccttcattcaagcatctgaaattgatgaatagccgaatttcagcgcgagccgagtttgaagaagtcatcgagaatggaatgggggtcaccgaaacactgcatgggcgtaccacttcaggaggtaaggaaattatggccctggtcgatgaaattcagcaaatcatagccatgagcgcttaa

SEQ ID NO: 138612 - DNA, 324 bp, Enterobacter cloacae
atgagcaagaaaaattttaacgagcaggcagagaaacttaaaagtttagtgggatcagcccgactgcagacgtcttcaccggcgcttgtttcgacggccgaggcaacagagcagaatggagatatgccttcagaagctcatgctgctgaggttcgagttgaaccccctaagaccaaggcgaaaaacctgaaagcgattccactgtcgtactttgaggcccatgctgagttaaaattttcaagcaagacctctctagatttcagttcttatatcattgaggctatcagggaaaaactggagcgtgacggcgctatcggtaaatag

SEQ ID NO: 138613 - DNA, 1272 bp, Enterobacter cloacae
atgtttgccctggccgacgtcaactcattctatgccagctgcgagaaggtgtttcgccctgacctgcggggtaaaccggttgtcgtgctgagcaacaacgacggctgcgttatcgcccgctcaaaagaagcaaaacttcttggtatcaaaatgggcgtaccgtggttccggctgaaggacgcacagtttcccgagaagctgcacgtgttctccagcaactatgagctgtacgcctcgatgtccgcccgggtgatgacacatctggaagagctggcgccgcgcgtggaacagtattccattgacgagatgttccttgatatccggggcatcaacagctgcattgactttgaagacttcggtcggcaacttcgtgtccatgttggtaacggtacgggactcaccatcggtgtcggtatgggccccaccaaaacgctggcgaagtcagcccagtgggcttcaaaagaatggccacaatttggcggtgttctggctctgaccccgggcaatccccgccggacggagaaactgctctcactgcagccggtggaagaaatctggggagtgggccggagaatttcgaagacgctggggacaatgggtatcaccactgcgctgcagctggcgcgcgcgaatccgaccttcatcaggaaaaacttcaacgtggtactggagagaacggttcgtgaactgaacggagagccgtgcatctcgctggaggaagcccccccgcccaaacagcagattgtctgcagccgttctttcggagaacgcgtcacgacttacgaggcgatgcgtcaggccgtctgccagcatgcagaacgcgcagcggagaagctgcgcggcgagcatcagtactgcaggcatatctcggccttcattaaaacgtcgccgttcgccatcaacgagccctactatggcaatctggcaacagagaaactgatgactcccacgcgggacacccgggacattattactgctgcagtcagagcgctggacaggatttgggtctccggccatcgctatgccaaagccggcatcatgctgaacgatttctccccgaccggcatctctcagctgaatctttttgatgacgtacagcccagagcacacagtgatgagctgatgaaggtgctcgacggcatcaaccattccggcctggggaaagtatggtttgcggggcgaggcattgcgcctgagtggcaaatgaagagggaaatgctctctccagcctatacaacccgctggtcagacatccccgtagctcatatctaa

SEQ ID NO: 138614 - DNA, 426 bp, Enterobacter cloacae
atgaagtttattgctgcctcccccgaacccggggtcatgaccctccccctttttaccgagcgttgcgccgccggttttccttcaccggcggcagattacacggaagcggagctggacctgaacgagtactgcatccggcaccgggcctccacctattttgtccgggctatcggcaactcgatgaccgatattggcctgaattcaggcgacctgatggtcgtcgacaaggcagagaaaccggtgcacggggacattgtcatcgccgaaatggagggggaatttaccgtcaaacggcttctgctgacgccccgtcctgtactgcagcccatgaacccggcctaccctgcccttcaccctgacccggagacgctgcagatttttggtgtggtgaccgcgtttatccataagacgcgcggagcggactga

SEQ ID NO: 138615 - DNA, 603 bp, Enterobacter cloacae
atgtcaatacgatctctacgcgggaaccgggagatctcccctctgaccatctgccagtgtcggagatggcccgcaccgggaagacgaggagtcatagccggtgatgtacggagaggagaagtcggactcgctcatagtagcggcgaagcaggcgaacaacccgaaaggagcggagtcagtggagcgaaggagcggggccaaggggaacgcggaacagccacacatgcgccggacacagagccgggaaagcatgtcacagaggctgtcacgcgtgcgggaagctgcgaagcagcggaagaaagaacggtttacagcattgttccacctgctgacagtcgaagcactggaagccgcattcctctccctgagcaggaaagcggccgccggagtggatggcatcaggtggatggactacgccggaaacatgaagaacaacataacagatctgcaccggaggctacatcagggcagctacagggcgcagcccggcaggcgtcactacatcccaaaagcggatggaaaacaacgcccgctcggcatcgcctcgctggaggacaagatcgtccagtatgcgctggtgaaaatcctgaacgcagtctatga

SEQ ID NO: 138616 - DNA, 1434 bp, Enterobacter cloacae
atgcgattttccagttttatcatcggattgactaccagtataacgttcaccgttcaggccgcgaatgttgatgagtacattaatcaactgcccgccggcgcgaaccttgccctgatggtgcagaaggttggcgcgcaggctcccgagattgactatcacagtcaacagatggcgctgcctgccagtacccagaaggtgatcactgccctcgccgccctgctccagctcgggcctgacttccgttttactaccacccttgaaaccagaggtaacgttgagggtggcgaactgaaaggcgatcttatcgcccgttttggtggcgatcccacctttaagcgccaggatgtccgcaacatggtggcggtcctgaaaaaatccggcgtaacaaaaattgatggcaacgtgctgatcgacacctccattttcgccagccacgataaagcgcctggctggccgtggaacgacatgacgcagtgctttagcgccccgccagccgccgccatcgttgaccgtaactgcttctccgtatcgctttacagcgcgccaaaaccaaatgacttagcttttatccgcgtggcctcatactacccggtcacgatgttcagccaggtgcggacgctggcgaaaggttccccggaggcgcagtattgcgagctggacgtggtaccgggcgatctcaaccgctatacgctcaccggctgcctgacccagcgggccgatcccctcccgctggccttcgccattcaggatggcgctggctatgccggtgccatttttaaagatgaactgaagcaggcgggcataacctacaccggaacgctgctgcgccagacgcaggtaaatgagccaggcacggtgattgccagcaaacagtccgcgccactgcatgatttgcttaagattatgctgaaaaagtcggataacatgattgccgacacggtgttccgcatgattgggcacgcgcgctttggtgtgccgggcacctggcgggccggttctgatgccgtacgacagatcctgcgccagcaggcgggtatcgatctgggcaatacgatcgccgttgatggttccggtttatcgcgtcataacctgatctcgccggccaccatgatgcaggtgttgcagtacattgctcagcatgacgctgagctaaactttattacgatgctgccgcttgccggacacgacggctctcttcagtaccgcgcgggccttcacgctgcgggcgtggatggcaaagtgtcagccaaaacgggttccctgcaaggcgtttacaaccttgccggttttatcaccaccgccagcggacaacgcatggcatttgtgcagtatctttccggctatgccgtcgaaccggctgaccagcgcaatcgccgtattccactggtgcgtttcgaaagcaggctctataaggacatctaccagaataactag

SEQ ID NO: 138617 - DNA, 171 bp, Enterobacter cloacae
atggcgcatcgcgccatcgagcagggaaatcgtttccttcaggctcagcttctccgcctgatccacgatgagtgttccgcccggaataaacgccgtcccgtcctgcagggcggatttaccggtcaccgtttccccggccagacgcacatcaccggcgagaaaatcacgtga

SEQ ID NO: 138618 - DNA, 888 bp, Enterobacter cloacae
atgccgcgacagcttctccgtcgtgcgcgccgcatcctgcgccgagtacagccggaggtgacttccgctctgtgccagctggttgagggtggcgttatccagctcacgctgcgtcaccgacgcaaagaccgttgccgtctcgctaaccgacctgccgggactttccacccagccgtggccgactttaataccgtcaaacacgcccgcacccacggccagggtctgcgtggttttctgccccggccgctgtaccgtcagctgcccgtcctccactttcatcactgtgacgctctccccgcccttaaggcgtgtgtccggtatcttcccgagcaccgccagacgttccccctctgccaccggcagtgtatctgcccggaacagcgtccactggctgtcgaccgcggaaaccttcagatcaagacggtccccttcccggtctttcagggtcagcatattgctgctcgcggtcacccggtcaatgacaaagcgatcgtgcgtccgggtctccggatcccagcgttccatcaccatcccctcccggtaataatcccgcacgccccggcttttactgtccagccacaccggcgtcagggctgtaatggtcgtgtctttctcacccagcaccccctcctgtctgagggagtcacggataaggccgttgagtacgctctgttcacgcgtcccgctgatttgggccacgctttcctgcccttcacgtacgctgacggcaaactcctgtgccagccggctgtagcgtgcgcctttatccggttcactgatgatgtcggctgtggtctgatggcccccctgccagcgatacgtattcacgccgctgtccttcagcaccgtcagcgcactgccggtcccgctgcgcttcccgctgtctga

SEQ ID NO: 138619 - DNA, 2292 bp, Enterobacter cloacae
gtggttcaggggtatgccggggtggggaaaaccacccagttccgggcagtcatgagtgccatcagtctgctgccggaagagacccgtccgcgcgtcatcggtctggcgccgacgcatcgcgcggtcggggaaatgcagagtgccggcgtggatgcgcgcacgacggcgtcgttcctccacgacacgcagctgctgcagcgcaatgggcagacacccgatttcagcaacaccctgttcctgctcgacgagagctcgatggtggggctggccgatatggcaaaagcccactccctcatcgccgccggcggtggacgggcggtgcccagcggggataccgaccagctgccgcccatcgcgtcgggccagccgttcaggctgacgcagcagcgcagcgccgccgacgttgccatcatgaaagagattgtgcgccaggtacctgagctgcgaccggcggtctacagcctgattgagcgggatgtgcaccgcgccctgaccaccatcgagcaggtcacgccggagcaggtgccgagaaaagaaggcgcatgggcgccgggcagttctgtggtggaattcacgccaaagcaggaaaaggagatagaaaaggcactgagcgaggggaaaaccctgccggaaggtcagcccgcgacgctctacgaggcgctggtgaaggactataccggacggaccccggaggcacagtcgcagacgctggtgatcacccatctgaataaggaccggcgggcgctgaacagtctgatccatgacgcacggcgggagaacggggaaaccggcaaagaggaaatcaccctgccggtgctggtcacgagtaacatccgtgacggtgaactgcgcaaactgtcgacctggacggctcacaaggaggcggtggcgctggttgataacgtataccaccgtatcagcaaagtggataaggataatcagctgatcaccctgacagacagtgaaggaaaggagcgatttatctcaccccgggaggcatcggcagaaggcgtcacgctctatcgtcaggaaaagatcaccgtgtctcagggggaccgaatgcgcttcagcaaaagtgacccggagcgcggctatgtggccaacagtatctgggaagtgcagtctgtttcgggtgacagtgtcacgctgtctgatggcaaaatcacccgtacgctgaccccgaaggcggagcaggcacagcagcatatcgacctcgcctatgccatcaccgcccacggcgcccagggggccagcgaaccgtatgccatcgcgctggaaggggtggccggtggccgggaacagatggccagctttgagtctgcctatgtggctttatcccgcatgaaacagcatgttcaggtctacaccgacaaccgtgagggctggataaaggccatcaggcattcacctgagaaagcgacggcgcacgatattctggaaccccgtaacgaccgggcggtgaaaacagccgatctgctgttcgggcgggcaaggccactggatgaaaccgccgcgggccgggcagccctgcagcagtccggtctggcacagggaagttcaccaggaaaattcatttctccggggaaaaagtaccctcagccgcatgtggcgctgccggcatttgataaaaacgggaaagccgccggtatctggctcagcccgctgaccgatcgggacggacggctggaggctatcggcggagagggacgaattatgggcaatgaagacgcccggttcgtggcgctgcagaacagccgcaacggagaaagcctgctggccgggaatatgggggagggcgtcagaatggcccgcgacaatcccgatacgggggtggtggtgcggctggccggtgatgaccgcccctggaaccccggggccatgaccggtgggcgggtatgggctgaaccggcgccggtggctccggtaccgcaggccggggctgacattatcctcccgccagaggtactggcacagcgggcggcagaagaacagcagcgccgggaaatggaaaaacaggcggaacagactgcccgggaagtggccggggaggcgcgtaaagccggcgagccggcggaccgggtgaaagaggttatcggggacgtcattcgcggactggagcgtgaccggccgggtacggagaaaacgacgctaccggatgatcctcagttccggcgccaggaggaggcgattcagcaggtggcctcagaacgtctgcagcgtgagcgtctgcaggctgtggagcgggacatggttcgtgaccttaaccgcgagaaaacactcgggggcgactga

SEQ ID NO: 138620 - DNA, 480 bp, Enterobacter cloacae
gtggtctcgtccccgccagcctggaaggcaaaaaaagagaaacttgagaaggttaaacaagcggccgaagccgccgcgcgcaacgctgcgccggtgccggttaaagcagtaaagacgccacctccggtgcgttatcttcgcctgctgccgccggaacaggccattatgacgctgaaggcattctggccacagctgttcgacggaaactcaccccgtctgctggcgacgggcatgcgcgagcagctgtttgccgacattgtgaaccgcgacctgccgctgtcgcataaacaggtcattaagtgcctgaagagtctgacccggtctgcgggctatctgtcccggatgaaggtgggggcctcccgctatgacctgcagggaaatgctgtggccaccgtcactgctgaagaagctcagtacgccagtgagcgcatgatgaaggagctgctgcgagctgaacgaaagatgagtcagaccctttaa

SEQ ID NO: 138621 - DNA, 222 bp, Enterobacter cloacae
atggtaatcagtaacgatgaagtgctgcacctgaccgataaagtccagtcattaagtaaaaaatctgcagggaaccgcccggcgaatacttcatccctgatgaactatattaaatccctgtccggtaatacaaaaggcatggcgctttatggtcgcgttaaagaggaattaatcaggcgaggtgtgatagcggtgtatgagaaaactgtggtctggcgataa

SEQ ID NO: 138622 - DNA, 645 bp, Enterobacter cloacae
atgtttaaatattttattctgcgccctgagcagcagttattctgttatttatacggctgcgcgctggcactggttcagatggttttattttctcctgtatcccgggcaagcggattttatctggttgcgttatctgtcgcgctgttctgggcaggtcttgccctttatacccgtcacatcgaccggatgagaaagccagaggtctcaccgctggtcagtattcgcgacggtattcaggtggtggccgaggtgccgcgccatgaaaaggcccggctggaatgggaaatcctccgggatgatgaggtgtttcgccagcaaaggtgtgagcttacaggcctgaccggacgggttatcagccgggggctgttgtatacgccggcggtgatgctggtcggtatcggtattctcgcctggggttccccacaggatgccatccggctgattaatgctcttcgtaatatgcctgctgcggaactggtgcatcagattggttttgtcctgcgccacttcctgcagattagcgtcatatcagttctgattgctgatgttgtagccgggagaggactgccgaatgtatttcgccgcgcgttgctcgacaggctgccggcagagttctgccttatcagaagagggacagaaagatga

SEQ ID NO: 138623 - DNA, 1146 bp, Enterobacter cloacae
atgagcaaaaaaattgcccgttgcagcctttatgtgctgggtatggcttgtttgaccgttcaggcggcagagccgctcacctcgctggataaaccggaagggcggctcgatattattgcctggccgggatatatcgaacgcggtcagaccgacaaacagtacgactgggtgagtcagttcgaaaaggacaccggttgccaggttaatgtcaaaaccgctgccacctctgacgagatggtcagtctgatggccaaaggcggctacgatctggtcaccgcctcgggtgatgcttcgctgcgcctgatcatgggcaaacgcgtgcagccgatcaacacggcgctgattgccggctggggctcccttgatccgcgtattgcgaagggggcgtggtttaacgtcggcggtaaagtctatggcacgccgtatcagtgggggccgaacctgctgatgtacaacacccgcgtattcccgacgccgccggacagctggcgcgtggtgttcgtcaagcaggatctaccggatggtaaaaccaaccaggggcgggtgcaggcctatgatggcccgatctatatcgccgacgccgcgctgtttgtcaaagccacccagccgcagctggggatcgaagacccctatcaactgaccgaaacccagtacaacgcggtgctgaaagtcctgcgcgaccagcaaccgctgatccatcgctactggcatgacgccaccgtacagatgaacgacttcaaaaacgaaggggtagccgcctccagttcgtggccctatcaagccaacggcctgaaggcggaaggccagccggtcgccaccgtgttcccgaaggagggggtaaccggctgggcggataccaccatgctgcacagcgaggcgaagcacccggtctgcgcctataaatggatgaactggtcgctcacgccgaaggtgcagggcgatgtggcggcctggttcggttcgctgccggtggtgcctgagggctgtaaagccagcgcgctgctcggtgataaaggctgtgagaccaacggctatgagcagtttaaccgcattcacttctggaaaacgccggttgcggaaggcgggaaatacgtgccctatagccgctggactcaggactatattgcgataatgggcggccgctaa

SEQ ID NO: 138624 - DNA, 1014 bp, Enterobacter cloacae
atgacgtacgcggtcgagttccagaatgtatcgcgcctgtatggcgatgtgcgggcggtggatggggttagcattggcatacgcgatggagagtttttctcgatgctgggtccgtccggctcgggtaaaaccacctgcctgcggctgattgccggttttgagcagctctccggcggaaccatccatatctttggtcagccggccagcgaactgccgccctggcagcgggatgtgaataccgtgttccaggactacgcgctatttccccacatgtcgatccttgacaacgtcgcctacggcctgatggtcaaaggcatggcgaagaaagcgcgccatgcccgcgcccaggaggcgctggagaaggtggcccttggctttgctcatcatcgcaagccctcccagctctccggcggccagcggcagcgggtcgcgattgcccgggcgctggtgaaccagccgcgggtgctgctgctcgatgagccgctgggcgccctggatttgaaactacgcgagcagatgcaggtggagctgaaaaagctgcagcagtcgctggggatcaccttcatcttcgtgacccacgaccagagcgaagcgctgtcgatgtcggatcgtgtggcggtgtttaacaacgggcgcattgagcaggtggatgccccgcaggatctctatctgcaccccaggaccgcgtttgtggccggttttgtcggcaccgccaacgtttttgcagccgaggcggcccgacgattgtgcgggatggcgggcagctggtcgctgcgtccggagcatgttcgcctgcagggcggcggcgaggtgcaggtgcagggtgtggtgcaggcggtgcagtatcagggggcggcgacgcggatcgagctccgcctcgcggatggcgacaaactgctggtcagccaggccaacatcgatggcgcggcggcggccagcgttccgcgaaccgggcaaatagtacaggcgtcatggtcgcgctcggcgatgaccccgctggaaagcggaggctga

SEQ ID NO: 138625 - DNA, 942 bp, Enterobacter cloacae
  misc_feature (825)..(834): n is a, c, g, or t
atgaccatggcaataattcctgcgcagaccgggcgcatatcggggatcttctggcgccgaccggcgctgggcctgtttttactgctgctcgggccgctgatgtggtttggcatcgtctatctgggatcgctgctgaccctgctgtggcagagcatttatacctttgacgacttcaccatgtcagtgaccagcgacttcacgctggctaacctgcgggcgctgttcaaccctgccaactacgacattattgtgcggaccctggtgatggcgctgtgcgtcacgctggccagcgcgctgctggcgctgccgatggcctggtatatggcgcgctacaccagcggcaaaatgaaggccttcttttatatcgcggtcatgctgccaatgtgggccagctatatcgtcaaagcctatgcgtgggtgctgctgctggcgaaagatggcgtggcgcagtggttcctcggtcatcttggactggagggggcgctgaacgcgctgttgagcgtcccggcggttggcggcaataccttgtccacctccggccttggacgctttctggtgttcgtctacatctggctgccgtttatgatcctgccggtgcaggcggcgctggagcgtattccgggatcgttgctacaggcctcggccgatctcggcgcggccccgcggcagacctttcgctacgtggtgctgccgctggccattcccggcatcgccgctgggtcgatcttcaccttttcgctgacgctaggcgactttatcgtgccgcagctggtgggcccgccgggatactttatcggcaatatggtttactcgcagcagggggcnnnnnnnnnngcgatcggcaatatgccgatggcggcggcgtttaccctggtgcctatcgtcttgattgccctctatctggcgttcgtgaaacgtctgggagccttcgatgcactctga

SEQ ID NO: 138626 - DNA, 807 bp, Enterobacter cloacae
atgcactctgaacgcgcgccctggtatctgcgactggcgacctggggcggggtgatattcctccactttccgctgctgattatcgccatctatgcttttaatacggaagatgcagcctttagctttccgccgcaggggctgacgctgcgctggttcagcgaggcggccgggcgcagcgacattctgcaggcagtgacactgtcacttaagatcgccgccctgtcgaccgccattgccttagtgcttggcacgctggctgcaggagccctgtggcgcagcgccttttttggcaaaaatgcggtgtcgctactgctgctgctgcctatcgccctgccggggatcattaccggcctggcgctcctgacggcgttcaaagcggtcggccttgagcctggcctgctgacgatcgtggtggggcacgcgaccttctgcgtggtggtggtgtttaacaacgtcatcgcccgcttccgccggacttcgtggagtctggtggaagcctcgatggatttaggcgctaccggttggcagacctttcgttacgtagtgctgcccaatctggggtcggcgctgctggcggggggaatgctggcattcgctctgtcgtttgatgaaattatcgttaccacttttaccgcggggcatgaacgcaccttgccgctgtggttgctgaatcagctggggcggccgcgagatgtgcccgtcaccaacgttgtcgcgctgttggtgatgctggtaacgacgataccaatcttaggggcctggtggctcacccgcgacggcgataacgacgccggaaacgggaaataa

SEQ ID NO: 138627 - DNA, 1428 bp, Enterobacter cloacae
atgcaacacaacctattgataaacggtaagttagtggcaggtgaaggcgagaaggttccggtatataaccctgcaaccggcgaagtgatcctggagattgccgaagcgacagcagcccaggtcgatgccgccgttgaggcggcggaccgggcattcgatgcctggagtcagacgacgccgaagacgcgtgcggaatgtctcctgaagctggcggacgccatctcggcgcaggctgaaaccctggcgcagctggagtcgctgaactgcggcaagccgctgcactgcgtgattaatgatgaaatgccggccatcgccgacgtcttccgcttcttcgccggcgccgctcgctgcctgccggggatggcggccggagagtatctcgaagggcatacctcaatgatccgccgcgatccggtgggcgtggtggcctccatcgcgccgtggaactatccgctgatgatggcggcctggaagctggccccggcgctggcggcgggcaactgcgtagtgataaaaccctcggagatcaccccgctgacggcgctgaagctggcggagctggcaaaagatatcttcccggagggggttatcaacgtgctgtttggccgcggtaaaacggtgggcgaccccttgaccgcccacgttaaagtgcgaatggtctccctgaccggatcgattgccaccggagcccatatcattggccataccgcctcgtcgattaaacgcacccacatggagctgggcggtaaggcgccagtgatcgtttttgacgatgcggacatcgatgcggtggtggatggggtgcggaccttcggtttttacaacgccggccaggactgcacggccgcctgccggatctacgcccagcagggtatctatgaccagctggtggagaaactcggggcggcggtggccagcctgaaaatgggggcgccggaggacgctgccaccgaactgggtccgctgagctcgctggcccatcttgagcgcgttagcgcggcggtggaagccgccagggcgctgccgcacattaaagtggtcaccggcggcagtcgggctgacggcgcgggctattacttccagccgacgctgctcgccggcgcccggcaggaagacgctattgtccagcgcgaagtgtttggtccggtagtcagcgtgacgcctttcagcgatgaagcgcaggccctgagctgggcgaatgactctcagtatggcctggcctcctcggtatggacgaaagatgtcggtcgcgcccatcgtcttagcgccaggctgcagtacggctgcacctgggtcaatacccactttatgctggtcagcgaaatgccgcacggtggccagaagctgtcaggctacggcaaggacatgtcgatgtatggccttgaggattataccgtggtccgccatgtgatggttaagcatagctaa

SEQ ID NO: 138628 - DNA, 123 bp, Enterobacter cloacae
atgtccggaatcatcacgctggtcatcgcgctaatcctgctggtcgcggcggtgtataatcttatttcctacattcgtgaccggcgcagcgccagcctgcccagcaaaaaaaccaagcgctga

SEQ ID NO: 138629 - DNA, 174 bp, Enterobacter cloacae
atgacgttatatcaaaaaatgttggtgttttacgccattatgggcgtgatatgcgccgtgattagctggtttttaaccaaagagagccggatgatccgcctgctggcggccctgctgatcggcgccacctggccgttcagcttcccgatggcgctgctcgtctcgctgttttaa

SEQ ID NO: 138630 - DNA, 1053 bp, Enterobacter cloacae
atggttttcagaatcgcaagctccccctatacccataaccagcggcagacctcgcgtattatgctgctggtgctgctcgccgctgtgcctggcattgtggtccagacctggtttttcggctggggcaccgtactgcagattgtcctcgccgccctgacggcctgggcgaccgaagccgctattctcaaactgcgtaaacagcctgttgctgccacgctgaaagataattccgccctgctcaccggcctgctgctggcggtgagtattccgccactggccccgtggtggatggtggtgctcggcactgcctttgccgtagtcattgccaagcagttgtacggaggcctgggccataaccccttcaacccggcaatgatcggctatgtcgtgctgctgatttcgttcccggtgcagatgacctcctggctgccttcctatgagatagccgcccatatcccggcattcagcgacgcgctgcagatgatcttcaccggtcataccgccgccggaggcgacatggccagtctgcggctgggtatcgacggcgtcagccaggccaccccgctggatacctttaaaacctccctgcatgccggacatagcgttccgcaggtgctccaattgccggtctacggcggcgtgctggcaggtctgggctggcagtgggtgaatatcgcctggctggcaggcggccttttcctgctgtggcagaaggcgatccgctggcatatcccggtcagcttccttgttagcctcggcctgtgcgccaccctcggctggattttttcgccgcagagcctggcctcaccgcagatgcatttgctctccggggcgaccatgcttggcgccttctttatcctgaccgatccggtgacggcctcaacaaccaaccgcggccgtctgatctttggcgccctcgctggcctgctggtctggctcatccgcagcttcggtggttatccggacggcgtggcgtttgccgttctgctggcgaatattaccgtgccgctgatcgattactacacgcgcccgcgcgtatatggccaccgttga

SEQ ID NO: 138631 - DNA, 624 bp, Enterobacter cloacae
atgatgttaaaaacgatgcgtaaacacggcgtcacgctggcgctgtttgccgccggttccaccgggctgacggcggcgatcaatgagctgaccaaaagcaccatcgaccagcaggcggccctgcagcaaaaggcgttattcgaccaggttttacctgccgaccgctataataacgatctgcttaagagctgctatctggtcagcgccccggcgctgggcaaaggccagcataaagtgtggatcgccaaaaataacgatcgaccgatcggcgcggtgatggaagccaccgcgccggacggctactccggagcaatacagctgctggttgccgccgattttagcggcacggtcctcggcacccgcgtaactgagcatcatgaaacgccgggcctgggggataaaatcgaacttcgcctgtcggactggattacccattttgccgggaaagtcatccacggccagggcgatagccactgggcggtcaaaaaggatggcggcgattttgaccagttcaccggcgccaccatcaccccccgggcggtggtcaatgccgttaagcgcgcaggcttatatgcacaaacgctgcctgcgcaacttcctgaattcaccgcctgtggagaataa

SEQ ID NO: 138632 - DNA, 699 bp, Enterobacter cloacae
atgagcgaagttaaagacgtcatcgtccagggcctgtggaaaaataactccgccctggttcagctgttaggtatgtgtcctctgctggcggtcacctcgaccgccaccaacgccctcgggctgggtttggccaccaccctggtgttaaccctgaccaatctgaccatctccagcctgcgccgctggacgccggcggagatccggatccccatctacgtaatgattatcgcctcggtggtgagcgtcgtgcagatgctgatcaacgcctatgccttcggcctctatcagtcgctggggattttcatcccgcttatcgtgaccaactgcatcgtggtcggccgcgccgaagcctttgccgccaaaaaagggccggcgctgtcggcgctggacggtttctcgatcggcatgggcgctacctgcgcgatgtttgtgctgggctccctgcgcgagatccttggcaacggcaccctgtttgacggcgccgacagtctgcttggcagctgggcgaaggttctgcgcatcgaggttttccacaccgacacccctttcctgctggctatgctgccgccaggcgcctttattggcctcggcatgatgctggcgattaaataccttatcgatgaacgtagcaaacagcggaaggcgcaagcggcccgggccgtctctgtcgccccgtccgacgtgacagggaaagcataa

SEQ ID NO: 138633 - DNA, 636 bp, Enterobacter cloacae
atgaacaaagccaaacgcctggcgatccttaccaggctgcgggaaaacgatccccaccccactaccgaactgcatttcagttcgccattcgagctgctgattgccgtcctgctttctgcacaggccaccgacgtaagcgtcaacaaagcgacagccaaactctatccggtggccaatacgcccgcagcgatgctggccctgggggtggatggggtaaaatcgtatatcaagactatcggcctgtttaacagcaaagcggaaaatgtcatcaaaacctgccgcatcctgttggagcagcacaatggcgaggtgccggaagacagagcggcgctggaggcgctgcccggcgtgggccgtaaaaccgccaacgtggtgctgaataccgcctttggctggccgaccatcgccgtggacacgcacatcttccgcgtctgcaatcggacgcaattcgcccctggcaagaacgttgagcaggtggaagagaagcttctgaaggtggtccccgccgagtttaaggtcgactgtcatcactggctgatcctgcatggacgttatacctgcattgcccgcaagccgcgctgcggctcctgcctgattgaagatctttgcgaatacaaagataaagtctacgcctga

SEQ ID NO: 138634 - DNA, 258 bp, Enterobacter cloacae
atgttatacagcgttaaattttaccgtttcgatatcgttggtatttttatcttttgggttcgtcggtttttcgggaaaaggcgatatattctactgatctggcgtaagcatagtgatatggtccattatcttaaaaaatcatgggtcattatcctgacaatctttactcatccgttgtattgcctgacatttatttccattccagtaacattcaatcaacataaagttgcgagcatgatctggatcacaaatgcatag

SEQ ID NO: 138635 - DNA, 1506 bp, Enterobacter cloacae
gtgtctactgcaaacaataaaccagcagaaagcgtgagtctgaacgctttcaaacaaccacgcgcgttctatctcattttctcgatcgagttgtgggagcgttttggttactacggcctgcaagggatcatggccgtttacctggtaaaacagctgggtatgtcggaagcggattccattactctgttctcctcctttagcgcgctggtttatggcctcgtcgccattggcggctggctgggtgataaagtgctgggtaccaagcgtgtcatcatgctgggcgctatcgtgctggcgattggctatgcgctggtggcctggtccggccatgacgccgctatcgtctatatgggtatggcgaccatcgccgtcggtaacggcctgtttaaagccaacccgtcctccctgctttctacctgctatgacaaaaacgacccacgtctggacggtgcatttaccatgtactacatgtccatcaacatcggttcgttcttctctatgctggcaaccccgtggctggccgcacgttttggctggagcgtagcgtttgccctcagcgtggtggggatggtgatcaccattattaacttcgccttctgtcagaaatgggttaaacagtacggctctaaaccggactttgccccggtacacatgggtaaactgctggcgaccatcgctggcgtggtggtgctggtcgctatcgccacctggctgctgcacaaccagggtatcgcacgtatggtgctgggcgtcgtcgcactgggtatcgtcgtgattttcgccaaagaaaccataggcctgaaaggcgctccgcgtcgtaaaatgatcgtcgctttcctgctgatggtagaagcgattgtcttcttcgtgttgtacagccagatgccgacctcgctgaacttcttcgccatccgtaacgtggagcactcgatcctcggtctcgcctttgagccggaacagtatcaggcgctgaacccgttctggatcatgattggtagcccgattctggccgccatctacaacaagatgggcgaccgcctgccgatgccgcacaaatttgctatcggtatggtactgtgctctggcgcattcctcgtcctgcctttaggggcgaagttcgccagcgacgccggtatcgtctcggtcaactggctgattctgagctacgcgctgcagtctatcggtgaactgatgatttccggcctcggcctggcgatggtcgctcagctggttcctcagcgtctgatgggcttcattatgggcagctggttcctcaccacggcaggcgcggcgatcatcgccgggaaaatcgctaacctgatggcagtcccggagaatgtcaccgatccgctggtgtcgctggaagtgtacggtcacgtattcctgcagattggtatcgtcaccgcggttatcgccgccctgatgctgctgaccgcgccgaaactgaatcgtatgactcaggacgacagcgcggacattaaagcacgcgaaaccgcggctgcctga

SEQ ID NO: 138636 - DNA, 606 bp, Enterobacter cloacae
atgaaactgttctacaaacccggcgcctgttcccttgcctcgcatattgccctgcgcgaaagcggtctggattttaccctgcagagcgtggatctggcccagaaacggctggaaaacggggaagactatctgctgatcaacccgaaaggtcaggtgccggcgctgctgctggatgatgatatcctgctcactgagggcgtagccatcatgcagtacatcgcagaccaggtgccggatcgtcatctgctggcgccggtgggctcgattgcgcgctatcagactctcgaatggctgaactatgtggccaccgagctgcataaaagctttaccccgctgttccgcccggataccccggaggactataagcctgtcgcgcgggggctgcttgagaaaaagctgcaatacgttgatgcagcgctggcagacaaacagtggctgaccggccatcgcttcaccattgccgatggttatctgtttacggtgctgcgctgggcctatgctataaaactggatatggctgcctatggtcatatcggcaactggatgacgcaggtggcagcgcgtccggcggtggcggccgcactggcggctgaaggcttaaaataa

SEQ ID NO: 138637 - DNA, 861 bp, Enterobacter cloacae
atgaagaacatcctcgccattcagtctcacgttgtgtttggccatgccggcaacagtgccgccgaatttccgatgcgccgtctgggcgccaatgtctggcccctgaataccgtacagttctctaaccatacgcagtacggcaaatggaccggctgcgtcatgccgccttcgcatttgacggagatcgttcaggggattgccgatatcgacaagctgcagacctgcgatgcggtactgagcggctatcttggctccgctgagcagggagagcatatcctcggtatcgtgcgtcaggttaaggcggccaatccggcggcgaaatatttttgcgatccggtgatgggtcacccggagaagggctgcatcgttgcgccgggcgtggcggagttccacgtgcgctatgcgctgccggccagcgatattattgccccgaatctggttgagctggagatcctgtgcggtcatccggtcgccagcgtcagcgaggcagtggccgccgcgcgggagctgattgcccaggggccggaagtggtattagttaagcatcttgcccgtgcgggtctgagtatggatcgttttgagatgctgctggtgacggccgaagaagcctggcatattagtcggccgctggtggatttcggcctgcgtcagccggtgggcgtcggcgatgtgaccagcggtctgctgttggtaaaattgctgcagggggcaagtctgcgcgatgcgctggaacacgtcaccgccgcggtgtacgagattatgctcgccaccaaaaatatgcaggaatacgaactgcaggtagtagcggcgcaggatcgcatcgccgtaccggagcactgcttcagcgccacccggctgtaa

SEQ ID NO: 138638 - DNA, 702 bp, Enterobacter cloacae
gtggcgctgcagatcggcggctctgaccagtggggcaacatcacctccggcatcgatctgacccgtcgtctgcatcagaaccaggtgtttggcctgaccgtaccgctgatcaccaaagcggacggcaccaaattcggtaaaaccgaaggcggcgccgtgtggctggatccgaagaaaaccagtccgtacaaattttaccagttctggattaacaccgcggatgctgatgtctatcgcttcctcaaattcttcacctttatggacattgcggagatcaatgccctggaagaagaagacaaaaacagcggtaaagcgccgcgcgcccagtacgtgctggcagagcaggtgacgcgccttgttcacggcgaagaaggcctggaagcggcgaagcgcattaccgaaagcctgttcaacggtaacctgagcgacctgagcgaagcagacttcgaacagctggcccaggatggcgtgccgatgatcgaaatggaaaaaggcgccgatctgctgcaggcgctggttgattccgagctgcagccgtcccgcggtcaggcgcgtaaaaccgttgcctctaacgcggtgaccatcaacggcgaaaaacaggccgacccggaatatgtattcagtgatagcgatcgcctgtttggccgctacaccttgctgcgtcgcggtaagaaaaattactgcctggtctgctggaaataa

SEQ ID NO: 138639 - DNA, 1185 bp, Enterobacter cloacae
atggccacctgctttccgtttctgccgatctggctgtcggacgtcatcggcctgaataaaaccgaaaccggcctcgttttctccagcctgtcgctgttcgccatctgtttccagccgatcctcggagtgatctctgacaagctggggctgaaaaaacacctgatgtggatcgtgaccgttctgctggtgctgattgctcccttcttcctttatgttttcgctccgctgctgaaaaccaatatctggctcggggcgctgagcggcggcgcctatatcggctttgcattctccgcaggcgccggcgcgatggaggcctatatcgaacgggtaagccgcaacagcgggtttgaatacggcaaggcgcgcacctttggctgcctgggatgggcgctgtgcgcgactaccgccggaatgctgttcagcattaatcccgaatgggtgttctggatggggtcggccgccgcgctgctgctggtggtgctggtggccatcgccaaaccgcaggccagtcagtccgcgcaggtaatggactcgctcggcgccaatcgcccggcgatcgatttaaaaacggcggtgcgcatgttccgccagcgtaagatgtggatgtttattctgtatgttatcggtgtggcctgcgtgtatgacgttttcgatcagcagttcgccactttcttcaaatcgttcttcgtgaccccggaagcgggcacccgcgcctttggtttcgccaccaccgcgggagaaatatgtaacgccatcattatgttcagctcgccgtggattattaaccgtatcggagcgaagaataccctgctgatcgccgggatggtgatggcggcaagaatgattggctcttccttcgccaccaccgccgcggaagtcgtagcgttgaaaatgctccatgcgctggaggtgccgttcctgctggtgggcgcctttaaatacatcaccggcgtgtttgacgtccggctgtcggcgaccatttatctggtgggcttccagttcgccaagcaggtggcggcgatctttctctccgctttcgccggcaatatgtacgatcggatcggctttcaggatacctatatgatcctcggcggtattgccctgaccgtcaccttaatctccgcgtttacgttagcgggtaagacgaaaaccgagccgctgcgcgataatgcaatgaccgtttaa

SEQ ID NO: 138640 - DNA, 315 bp, Enterobacter cloacae
atgatccgtaaagccttcgtcatgcaggtgaaccccgacgcgcacgaggagtaccagcgccgccataaccccatctggccggagctggaggcagtgttgaaggatcacggcgcgcaccactacgccatttatctcgataaagaacgccatctcctgttcgcgacggtggagattgaatcggaagcccgctgggaagcggtcgccagcacggaagtatgccagcgttggtggaaatacatgcgcgaggtgatgcccagcaacccggacaacagcccgctgagcgcggagctcaaagaagtgttttatctggcgtaa

SEQ ID NO: 138641 - DNA, 897 bp, Enterobacter cloacae
  misc_feature (789)..(798): n is a, c, g, or t
atgagttttatgttggcactacctaaaatcagcctccacggcgcaggcgcgatcggtgatatggtcaagctggtagcgggcaaacagtggggcaaggcgctgatcgtcaccgacggtcagctggtgaagctgggcctgctggacagcctgttcgccgcgctggatgaacagcagatggcttatcagctatttgacgaggtattccccaaccccaccgaagcgctggtgcagcaaggctatgcggcttaccaggcggcccgctgcgattacctgatcgccttcggcggcggtagcccgattgataccgccaaagcgataaaaatcctcaccgcaaacccaggcccctccaccgcctactccggcgtcggcaaagtgaaaaacgctggcgtgccgctggtggccatcaacaccaccgccggcacggcggcggagatgaccagcaacgcggtaattatcgatagcgagcggcaggtgaaagaggtgattatcgacccgaacctgatcccggatatcgccgtcgacgacgccagcgtgatgctcgacattccgccagccgttaccgccgccaccggcatggatgccctgacccacgccatcgaggcctttgtctccgttggcgcccatcccctgaccgacgccaacgccctcgaggccattcgtctgattaacctgtggctgccgaaagcggtagacgatgggcacgatctgcaggcccgcgagcagatggcctttggccagtatctggcgggcatggcgttcaacagcgccggtctcgggctggtacatgcnnnnnnnnnngcagatggcctttggccagtatctggcgggcatggcgttcaacagcgccggtctcgggctggtacatgccctggcccatcagcctggcgccacccataa

SEQ ID NO: 138642 - DNA, 1005 bp, Enterobacter cloacae
atgagcaaaatgatggtatctgaagagatgaaaaacgccccggccgcgccgtcgccgctgcgccgcctgctgtgctgggaagggtttttactggcggtcaccctggcggtatttatcggcaacgccgtggcttccccgtacttcctcaatatctggaacctgtcggacgccacctttacctttaccgagaaggcgatcgtcgtcctgccgatggcgatgctgattatcgcccgggaaatcgatctgtcggtagcctcgacgatggcgctcagctcaacggtgatgggcttctgcgcggcagcggggatggacactccgctgctggtggtcatcggcctgggcgtaggtctgctgtgcggcctgttcaacggcttgctggtgacccgctttaacctgtcgtccattgtgatcaccatcggcaccatgagcctgtatcgcggcatcacctatatcctgctgggcgatcaggcactcaatcactatccggagagctttgcctggttcggccaggggtacgtgtggggggcgctctcttttgagtttgcgctgtttatcctcctcgcggccgccttcaccttcctgctgcataaaaccaactttggtcgcaggacctacgccatcggcaataacccgaccggcgcctggttctccgggatcaacgttaagcgtcataacctggtgctgttcgcgctggttgggctgatggccgggctggcggcggtcctgctgacctcacggctcggcagtacccgccccaccctggcgatgggctgggagctggcggttgtcaccatggcggtgctcggcggcgtcaatattctcggcggctccggcagcatgcccggggtgatcatcgccgcctttctgatggggctggtgaccttcggcctgagcctgctgaacgtccccggcatcgtgatgtcggtgattatcggcgccatgctgatcgtggtgatctccctgccgattattacccggcggatgatgcagcgaagacgatgttaa

SEQ ID NO: 138643 - DNA, 1008 bp, Enterobacter cloacae
atgatgggacacgcatggctgaaacatcgcgaagcgctgctggcggtggtcattattttgatgatcggcgccatcggcagccgggcgccgtcgttcgtttcaccgggcaatctggtggagatgtttaacgataccgccatccttatcatcctcgccctcggccagatgatggtgttgctcaccaaaggcattgatctgtcgatggccgccaacctggcgctgaccgggatgatcgtcgccctgcttaacgcccactatccgggtattccggtggtagcgctgctggcgctggcgactctgctgggcctgctgatgggagtaattaacggcctgctggtctggcgcctcggcattcccgccattgtggtgaccttgggcaccatgagcatttatcgcggcattatcttcctgctgactgacggcggctgggttaactcacatcagatgagcgctgattttctcagtctgccgcgcagccccctccttgggctgccgctactgagctggtgcgccatcgccgcgctgctgctggtgggttatttcctgcgctacagccgcaccggccgggccttatacaccgcgggcggcaacgcgacggcggcatactacaccggcattaacgccgggaaaatgcagttcgtcagcttctgtctctccggcgcgctggccggcttctgcggctatctgtggatctcgcgcttcgccgtcgcctatgtcgacgtcgccaacggttttgaactgcaggtggtcgccgcctgcgtgatcggcggtatcagcaccatgggcggaagcggacgggtgctgggctgcctgtgcggcgcgctgttcctcggggtcattaataacgccctgccagtgatcggcatctcgcccttctggcagatggcgatttccggggcggtgatcgtcatggcggtgctgctcaacgagcgcggcaatcgtggtcacgggcggttaatcctgcgcaacgcggcgttagcccgacagaaacaggcggtgaaatcatga

SEQ ID NO: 138644 - DNA, 1512 bp, Enterobacter cloacae
atgtcagcatcaacgccactgctgtcgctgaaggggatcaccaagatttttcccggtgtgcgcgcccttgagaacgtgcagcttgatctctggcccggcaaagtgaccgccttaatcggcgaaaacggcgcggggaaatccacgctggtcaaagtgatgaccggtatttatcagcccgaagagggcgagatcctctataaagcgatccccattcatctgccaacgccggagtcggcgcataaggtagggatcaccgccattcaccaggaaaccgtgctgtttgacgaactctcggtcagcgaaaacattttcgtcggccagtatctgtataagggactgctgaaaacgctcgactggccggcgatgcaccgcagagccaacgagatcctcacccgtctggaagtccagatcgacccgcgagccacgctgaaaaccctcagcatcgcccagcgtcacatggtggcgattgcccgggcgctggctttcgacgcccaggtggtgatcctcgatgagccgaccgccgcgctttcccagcatgaaatcctggagttttatcacatcgttgagcgtctgaagcaggacggcaaagcgatcctgtttatctcgcataagttcgatgaaatcttcgagctggccgattattacaccatcctgcgcgatggggtgtacgtcagctccggggcgataagcgacatcaccgaagagcggatggtgtcgatgatggtgggccgggcgatcagccaaacctacccgaaagtcgactgcacccccggagaaacggtgctggaggtgaccgatctctgtcatcctaccgagtttgcccatatcagcttccgcctgcgcaagggagaaattctcggcttttacggcctggtgggcgccggacgcaccgagctgatgcaggcgctctccggtgtctcgcgcccctcctccggcgagatccgcctgaacggcagaaccatgcgctttcaccagcccgccgacgccatccgcgcgggcatcgtctgcgtgccggaagagcggcagaaacagggagcgatcatcgccctgcctatcgcccagaacatcagtttaccgcagctcagcaagctcaaccctaacggcgtcctgaacgacgcccgggaatggcggctggccgacgagtacgcctcgcgcctgcaggtaaaagccttcagctggcggcagccggtggagaccctctccggcggcaaccagcagaaagtggtgattggcaaatggctggcgacccagcccgaggtgatcattctcgatgagccgaccaaaggcatcgatatcggctcaaaggccgccgtgcatcagtttatgtccgagctggtcagccaggggctggcggtgattatggtgtcgtcagagctgccggaagtgatgggcatggccgaccggattatcgtaatgcacgaagggctgatggtcgccgagtaccgggccggggaagcgacagcggaaaccatcgttagcgccgccagcggcatcggccaggaggcggcatga

SEQ ID NO: 138645 - DNA, 987 bp, Enterobacter cloacae
atgaaaacaaagacaagcttgatcctcaccgttgccgccctggcgttgtccggttccgccttagccgaagttaaaatcgcccttgtggcgaaatcgctgggaaatggcttcttcgaagccgccaacgttggcgcccaacaggcagccaaggagttaggtgatgtcaaagtgatctacaccggcccgaccactaccaccgccgaggcgcagatcgacgtgctgaacgggttgatcgcccagggggtggatgcgatcgccatttccgccaacgatccggacgcggtggtgccggtgctgaaaaaagcgatgcagcgcggcatcaaggtggtctcatgggactccggcgtggcgccggcaggccgtcagatccatcttaacccctcaaataacgccttaattggcgaaaccaacgtcaagcttgccgccgatgcgctgcaggcgctgaacgttgagaaaggcgaggtggccgtgttaagcgccaccccaacctccacgaaccagaacatctggattgaggagatgaaaaaggtgctaccgcagtatccgtcggtgcagctggtcaccgtcgcctacggtgacgatctgtcggataaaagctaccgcgaagcggtgggtctgctgaaatcatatccggacctgaaagtcattgtctcgccgtcgtcggtggggattgttgccgccgcgcaggcggtgaaggaccagggcaaaatcggcaaagtgtatgtcaccgggctggggctgccgtcggaaatggccggcgcgatcaagtccggcgccagcaaaagcttcgccatctggaacccgattgacctgggctacgccgccacctatctggccgacgatttagtcaaaggcacggcgaccaaaaccgaagccagtatgggcaagctgggcaaagtgaagctggacgccgaggggaatggcgcgatggccaagccgtttgtctacgatgcgagcaacatcgataagttctcgaaaattttctaa

SEQ ID NO: 138646 - DNA, 804 bp, Enterobacter cloacae
atgaaaaacgtgattgccgcggcagccttgtcgcttgtgctgtctgattttacttatgcccacgaacaaagagatgaagctatgatgaaaattaccccttccacccttgcggacgctgatattcaagcggtctccccggcgctggcgcgcttcggccgcgaggccatcagcaacgacctctggcaacgtgacgccctctccgcccgcgaccgtagcatcgtgaccgtagcgatgctgattgcccgcaaccagccaggcgagctgaagcactatattgccgttgcgctcgatagcggcgtgacgccagcggaagtgtcagagatcattactcacctcgccttctacgctggctggcccaatgcgatgtcagccgtcagcgtcgctaaagccatctttgaagccaggggcgtgacggcagaggccctgcccgccgcctcgccaacgctgctgccactcaatgaacaggtagagaaacagcgtgcagacaccgtggaaaaaaatgtcggccccatttcgcctggcctggttaaatttaccgccgacccgctgtttctcgacctctggcaacggcccgcgcttacgccccgcgacagaagtctggtgacggtcagcgcgttaatcgccgccggacagagcgcgcagattggctaccacctaaacagagctatggataatgggctttcggctgaagaggccggagaagtggtcgcccaggcggcgttctacgcgggatggccaaatgcgtttaccgccgccccggtggtcggtgaggtattgcgagcgcgcgagagcaaagctgaataa

SEQ ID NO: 138647 - DNA, 309 bp, Enterobacter cloacae
atgcgaattttatgtctggatatccctgcccccggcgcgacgctggaacactatgcgccgcaccttaccgcagaagccctgcacgcctggggactgtacaagtcaggctttattcgcgacatctatttccgtcaggatcgacccggcgtcgctattttcctcgagtgcgacaccgtggaagaggcgaataatgtcatggccgaatttccgctggcaaaagcgggtctattaaccttcgagtgtattccactcggctcgtttattagctgggaaaatctcttctccgctgaatttaaacatcaggagtaa

SEQ ID NO: 138648 - DNA, 276 bp, Enterobacter cloacae
atgggcagacgcttcatagtctgtatattcgcgctggtggcgttttcggccagtgctgcgcatggtgttcacggtggccataacgggcagtcggtgagcgctggcgccgacggcggcaacggttcgaacggcggcgatatcgataattcctcgggtcgggcagggtgccctggcggcaccgatcccgataagcacggtcatttttatctccctggcaccagcgaaccctgcaatcctgggccccaggatgcagagaaagtcgggtcttcccgctag

SEQ ID NO: 138649 - DNA, 573 bp, Enterobacter cloacae
atgcagccgtactttcactggatcaatgaacctgccgagtggcgccgcgatgccgacggcctgacggtggtcactaataagcataccgacttctggcgccatacctggtatggcttcgagcgcttctctggccatctctatgccgcagaagtggcgggcgattttaccctgcaggcaaaaatctgtgcggatttcaccacgctttacgaccaggccgggctgatgatgatggccgacgagcagacctggctgaaggcgggaattgaattcaatgacgatgccccggccatcggcagcgtactgacgctaacccactccgactgggccaccgggcttttccccggcgacccgcgcaccttctggctgcggctgacccgcgagggcgacgcgttaaggctgcagtattcaaccgacggcgagcactggccgctgctgcggctcggctactttccgccaggcccggtgaaagcgggcgtcatgtgctgctcaccggagcgtggcggactggcggttgcgtttcaggatattcagctttccccgccgctggacaaagcgctgcacgatctgagctga

SEQ ID NO: 138650 - DNA, 294 bp, Enterobacter cloacae
atgagtacgatttatgtggttgttttaacgtatataaaaccgctcgaagaggttgaccgtgcgatccccgcccacatcgaatggctcaaaaaaggctatgccgacggcctctttctcgcctccggccgccgtattccccgcaccggcggcgtcattctggcaaaatgcgatagccgggaaactctgcaagcgcgtctgagccaggatcccttccagcagctgggtctcgcccgtacagagattattccctttgaggccagcatggcgtcacccgcgctgcagtcgctgttataa

SEQ ID NO: 138651 - DNA, 330 bp, Enterobacter cloacae
atgtctttattgcccctgcaactgttcaaaaacctcgccgatgaaactcggctggggatcgtattgctgctcaaggcgcgtggagagctgtgcgtgtgcgatctctgtacggcgctcgcccagtcccagcccaagatctcccgccatctggcgatgctccgtgagagcggattgctgctggatcgtaaacagggtaagtgggtccattaccgcctctctccgcagatgccggcctgggcggcgcaggtgattgagcaggcctggctcagtcagcaggaggatgtgcggctgatgatcagcagactggctggcggggcgggttgccggtaa

SEQ ID NO: 138652 - DNA, 1299 bp, Enterobacter cloacae
  misc_feature (701)..(710): n is a, c, g, or t
atgttgctggcaggtacgatttttatcctgaccctggtgctggtgatctggcagccgcgggggttagggatcggctggagcgcggcatttggcgcggcgctggcgctggccaccggtggcgtacaggtagccgatatcccggtggtatggcatatcgtctggaatgcgaccgccacctttatcgccgttatcattatcagcctgctgcttgatgagtctggctttttcgaatgggccgcgctgcacgtttcccgctggggaagaggccggggtcgtctgctgtttacctggattatcctgctcggcgcggctgtggcggcgctgtttgccaacgatggggcggcgctgatcctcacgccaatcgtgattgccatgctgcgagcgctggggttcagcaagggaacgatgctggcctttgtcatggccgccggatttattgccgataccgccagcctgccgctggtggtgtcgaatctggtgaatatcgtttcggcagatttctttgccatcggcttcagggagtacgcttcggtgatggtgccggtcgatctcgcggcgatcctcaccaccctggcgatgctgcacctgttctttcgcaaggatatcccgccggcctgggatatggcgttactaaaagcgccggccacggcgataaaagatccagcgacgttccgcaccggctggggcgtgctgctgctgtnnnnnnnnnnggctggctttttcgtccttgaaccgctggggatcccggtcagcgccatcgcggcgctcggcgccgggatcctgtttgctgtcgcgaagcgcgggcgggtaattaacaccggcaaggtgctgcgcggcgccccgtggcagatagtgatcttctcgctgggaatgtatctggtggtgtatggtctgcgaaacgccgggttaacggattatctgaccacggtgctgaacatgctggcggagcgcggcctctgggccgcgacgctgggcaccggtatcctgtcggccttcctctcttcaataatgaataatatgcccagcgtactggtcggcgccctgtcgattgatggcagcacggcaacagggacgatcaaagaggccatgatttatgccaacgtcatcggctgcgatctggggcccaagatcacgccaattggtagcctggccacgctgctgtggctgcatgtgctggcgcagaagcacatcaccatcggttgggggtattatttccgctgcggcatcaccatgaccctgccggtgctgcttgtgacgctggccgcgctggcgctgcgtctctccttcaaccagccatga

SEQ ID NO: 138653 - DNA, 804 bp, Enterobacter cloacae
atgaccgactccaacgttatcgataaagtatccctggtgtacggccagatgaacgagccgccgggaaaccgtctgcgcgttgcgctgaccggcctgaccatggctgagaaattccgtgacgaaggtcgtgacgtactgctgttcgtcgataacatctatcgttacaccctggccggtactgaagtatccgcgctgctgggtcgtatgccttcagcggtaggttatcagccgaccctggcggaagagatgggcgttctgcaggaacgtatcacctccaccaaaaccggttctatcacctccgtacaggcggtatacgtaccggcggatgacttaactgacccatccccagccactacctttgctcacttagatgcaaccgtagtactgagccgtcagatcgcatccctgggtatctacccggccgttgacccgctggattccaccagccgtcagctggatccgctggttgttggtcaggaacactacgacaccgcgcgtggcgttcagtccatcctgcagcgttatcaggaactgaaagacattatcgccatcctcggtatggacgaactgtctgaagaagacaaactggtggtagctcgcgcgcgtaagatccagcgcttcctgtcccagccgttcttcgtggcagaagtctttaccggttctccgggcaaatacgtggcgctgaaagacaccatccgtggctttaaaggcatcatggaaggcgaatacgatcacctgccagagcaggcgttctacatggtcggttccatcgacgaagccgtggaaaaagccaaaaaactttaa

SEQ ID NO: 138654 - DNA, 420 bp, Enterobacter cloacae
atggcaatgacttaccacctggacgtcgtcagcgcagagcaacaaatgttctctggtctggtcgaaaaaatccaggtaacgggtagcgaaggtgaactgggtatttacccgggccacgcgccgctgctcaccgccattaagcctggtatgattcgcatcgttaaacagcacggtcatgaagagtttatctatctgtccggcggcattcttgaagtgcagcctggcagcgtgaccgtcctggcggataccgcaattcgcggtcaggacctcgacgaagcgcgagcgctggaagcgaaacgcaaagcggaagagcacattaagagctctcacggcgatgtggattacgctcaggcgtctgcggaactggccaaagcgatcgctaaactgcgcgttatcgagttgaccaaaaaagcgatgtaa

SEQ ID NO: 138655 - DNA, 1371 bp, Enterobacter cloacae
atgtcaaatagtgcgatgagcgtggttatccttgctgcaggcaaagggacccgcatgtattccgatcttcctaaggtgcttcataccctggccgggaagccaatggtgcagcatgtcattgatgccgctaacgatttaggcgcatgtgcggtacacctggtatacggccacggcggcgatctgctgcgtcagactctgcatgaagacaacctgaactgggtgctgcaggccgagcagctcggaaccgggcacgctatgcagcaggcggcgccattcttcaatgatgatgaagacatcctgatgctctatggcgacgtgccgctgatctccgttgagacgctacagcgcctgcgcgccgcgaaaccacagggtgggattggtctgttaacggtgaagctggatgacccaaccggctatggccgcattacccgtgaaaatggccaggtgacgggcatcgttgagcacaaagatgccagcgaggcccagcgccagatccaggaaatcaacaccgggatcctgatcgccggcggagcggatctaaagcgctggctggcgaaactcaccaataacaacgctcagggcgaatactacatcaccgatatcatcgccatggcgcaccaggaaggacaccagatcgtcgcagtgcatccgcagcgcctgagcgaagtcgaaggcgtcaacaaccgcctgcagcttgcgcgcctggagcgcgtctaccaggcggagcaggcggaaaagctgttgctggcgggcgtgatgctgcgcgatccggcgcgtttcgatctgcgcggtacgctgcagcacgggcgcgatgtagagatcgatactaacgttattctggaaggcaacgtggtgctgggcgatcgagtgaaaatcggcgccggctgcgtgatcaaaaacagcaccatcggcgatgactgcgaaattagcccctacagcgtggtggaagatgcccagctgcaggcggcctgcaccatcggtccatttgcccgtctgcgcccgggcgccgaactgctggaaggcgcccacgttggtaacttcgtggaaatgaaaaaagcgcgtctcgggaaaggctccaaggcgggtcatctgacctatctgggcgatgcggagattggcgataacgtcaatatcggcgcgggcaccatcacctgcaactacgatggtgcgaacaagcataaaacgattattggcgatgatgtctttgtcggctcggatacccagctggtggccccggtcacggtaggcaacggcgtcacgatcgccgccggcaccaccgtcacgcgcaatatcgccgataacgaactggtgttgagccgcgtaccgcaggtccacaaacagggctggcagcgtccggtgaagaagaaataa

SEQ ID NO: 138656 - DNA, 1830 bp, Enterobacter cloacae
atgtgtggaattgttggcgcagtcgcgcagcgtgatattgctgaaatccttctcgaaggtttacgtcgtctggaataccgtggctatgactctgccggtctggcagtggtcgacagcgaaggtcatatgacccgcgtgcgtcgcctgggtaaagttcagatgctggctcaggcggtagaagagcaaccgttacacggtggtaccgggatcgcccatactcgttgggcgacgcacggcgaaccgtctgagagcaatgcgcatccgcatgtttctgaacacattgtggtggtccataacgggatcatcgaaaaccatgagccgctgcgcgccctgctgcagtctcgcggctatgtcttcgtcaccgagaccgataccgaagttattgcccatctggtgcactgggagctggaacaaggcggtaccttgcgtgaagccgtcctgcgcgctatcccgcagctgcgcggcgcttacggtacggtgatcatggatacccgtgacccgggaactctgctggcggcccgctccggtagcccgctggtaattggcctggggatgggtgaaaactttatcgcctccgaccagctggcattgctgccggttacccgccgcttcatcttcctcgaagaaggcgatatcgcggaagtgactcgccgttcggtggtgatttttgataagtccgctgcgcaagtgaagcgccaggagatcgaatccaatctgcagtatgacgctggcgataaaggtatctaccgccactatatgcagaaagagattttcgagcagccgaacgcgattaagaacaccctgaccgggcgcatcagccatggcgaagtggatctcagcgaactggggccgaacgccaatgaaatgctggctcaggttgaacatattcagatagttgcctgcgggacttcctataactccgggatggtctcccgctactggttcgaagcgttagccggcgtcccgtgcgatgtggaaatcgcctccgaattccgctatcgcaagtccgcagtgcgtcgcaatagcctgatgatcaccctctcccagtccggtgaaaccgccgataccctggcggcgctgcgtctgtcgaaagagctgggctatctcggctcgctggccatctgcaacgtgccgggctcgtcgctggtgcgcgagtccgatctggcgctgatgaccaaagccggaacggaaatcggcgtggcctcaaccaaagcctttaccactcagctaaccgtgctgttgatgctggtggcgaaactggcgcgactgaaaggtcaggatgcgtctatcgagcatgatatcgtgcacggccttcaggctctgccgaaccgtatcgagcagatgctctcccaggacaagcgtattgagcagctggcagagcgcttctctgataagcaccatgcgctgttccttggccgtggcgatcagtatccgatcgctatggaaggggcgctgaagctgaaagagatctcctacattcacgcggaagcctatgcggcgggcgagcttaagcacggcccactggcgctgattgatgcggaaatgccggtgatcgtggtggcgccgaacaacgaactgctggaaaaactgaaatccaacatcgaagaggttcgtgcccgcggcggtgaactatacgtcttcgccgacggtgaagccggcttcaacggtagcgataacatgcacatcattgagatgccgcatgtggaagagaccatcgcccctatcttctatacggttccgctgcagctgttggcttatcacgtcgcgctgatcaaaggcactgacgttgaccagccgcgtaacctggcgaaatcggtaacggttgagtaa

SEQ ID NO: 138657 - DNA, 162 bp, Enterobacter cloacae
atgccgtacacgatgctcgggattgccgccagcagctcaatcgcaatgcccagcggacgcttgagccaggcgggggacaattctgtcagaaacagcgcgatgccgaagctcaccggaacggcgatcagcagcgcgataaaagaggtgaccagggttccgtaa

SEQ ID NO: 138658 - DNA, 324 bp, Enterobacter cloacae
gtggaagccgccagcgccctcgaaaaaggcgacctgaagcggatgggtgagctgatggcagagtcccacgcctcgatgcgtgatgatttcgagatcaccgtcccgcagatcgacaccctggtggagatcgttaaggccgcgatcggcgataagggcggcgtgcgcatgaccggcggcggctttggcggctgcgtggtagcgttaatcccggaagatctggtcgataccgttcagcaggccgttgccaacgagtatgaagcgaaaaccggtattaaagagacattctatgtctgcaaaccgtcacagggggccgggcaatgctaa

SEQ ID NO: 138659 - DNA, 1044 bp, Enterobacter cloacae
atgctaacgcaaaccaccgcgctggccccggacggccggccatggcagcaggtgaccctgcgcaataagtcggggatgaccgtcaccgtggcggactggggcgcgacgctactcagcgccgaggtgccgctggccgatggcagcctgcgccgaccgctgctgggctgcgcaaagctggaagactatgctcgccaggccgcatttcttggcgcctcggtaggccgctacgccaaccgtatcggccacagccgcttcccgcttgacggccaggtcgtcaacgtcacgccgtcaaacgacgcgggccaccagctccacggcggcccggaagggtttgataagcgccgctggcgcattgtccgcgccgacgagcaggaagtgctgttcgccctgacctcgcccgatggcgatcaaggctttccgggcaccctgcaggccaccgcgcactatcgtctgagcgacgataaccgcatcgcgattacctatcgcgccaccgtggaccaaccctgcccggtgaatatgaccaatcacgtctatttcaacctcgacggtgagcagggcgatgtgcgccagcatcagctccagatcctcgcccagaggtatctgccggtggaaagcgacggtatcccgggtggcgaactgaaagatgttgctaacaccagctttgatttccgccagccgaaaaccatcgccgccgacttcctcgcggatgccgatcagcaaaaggtgaagggatacgatcatgccttcctgctggatgccaaaggcgacgccagccagcccgcggcacaggtctggtcgcaggatggcaagctgcagatgacggtctatacctccgctccggcgctgcagttttactccggcaactatctcggcggcaccccgtcgcagacgacggagccctacgccgactggcagggactggcgctggagagcgaattcctgccggattcgccgaaccatccgcaatggccgcagccggactgtgtattacgtccgggccaggagtacgtcagcctgacggaatatcagtttatcgcccgataa

SEQ ID NO: 138660 - DNA, 753 bp, Enterobacter cloacae
atggctgtaactaagctggtactggttcgtcatggcgaaagccagtggaacaacgaaaaccgcttcaccggttggtacgacgtggatctgtccgagaaaggcgttagcgaagcgaaagcagcgggtaaactgctgaaggctgaaggcttcagctttgattttgcttatacctccgtgctgaaacgtgccatccacaccctgtggaacgtgctggacgaactggatcaggcctggctgccggttgagaaatcctggaagctgaacgagcgtcattacggcgcgctgcagggcctgaacaaagcggaaaccgctgagaaatacggtgacgagcaggttaaacagtggcgtcgcggcttcgctgtcactccgccggagctgaccaaagacgacgagcgctacccgggccacgatccgcgctatgcaaaactgaccgacgccgaactgccgaccactgaaagcctggcgctgactatcgaccgcgtcgtgccttactggaacgaaaccattctgccgcgcctgaaaagcggtgagcgcgtgatcatcgccgctcacggtaactccctgcgcgcgctggtgaaatacctcgacaacatgggcgaagacgagatcctcgaactgaacatcccgaccggcgtaccgctggtatatgagttcgatgaaaacttcaagccgatcaaacattactatctgggcaacgcggaagagatcgcggcgaaagctgctgccgtcgccaaccagggtaaagcgaagtaa

SEQ ID NO: 138661 - DNA, 1053 bp, Enterobacter cloacae
atgaattatcagaacgacgatttacgcattaaagagatcaacgaattattacctcccgttgcgctcctggaaaaattccctgctaccgaaaatgctgcaaacaccgttgcacatgctcgcaaagcgatccatcagatcctcaaaggcgacgatgaccgtctgctggtggtgattgggccttgttctattcacgatccggcagcggcgaaagagtatgccgcccgcctgctgaccctgcgcgaggcgctgaagggcgagctcgagatcgtcatgcgggtctattttgaaaaaccgcgcaccaccgtcggctggaaagggctcatcaacgatccccatatggataacagcttccgcatcaacgacgggttgcgcatcgcgcgcaaactgctgctggacattaacgacagcggcctgccggcggcgggggaattcctcgatatgatcaccccgcagtatgtcgccgatctgatgagctggggcgccattggcgcgcgtaccaccgaatcccaggtgcaccgtgagctcgcctccggactctcctgcccggtgggctttaaaaacggtaccgatggcaccatcaaggtggctatcgatgcgattaacgccgccggcgcgccgcactgtttcctgtcggtcaccaagtggggccactccgccatcgtgaataccagcggtaacggcgactgccatattattttgcgcggcggcaaagagcctaactacagcgcgaagcacgtggcggaggtgaaaatcggtctggcgaaagcgggtcttccggcccaggtgatgatcgacttcagccatgccaactccagcaagcagtttaagaagcagatggaagtgggcgccgacgtatgccagcagatcgccggcggcgagcgcgccattatgggcgtgatgattgaaagccatctggtggaaggcaaccagagcctcgagagcggtgaaccgctgacctacggcaagagcgtcaccgacgcctgcatcggctgggaggataccgaaacgatcctgcgtcagctggcggaagcggtgaaaacccgccgcggctaa

SEQ ID NO: 138662 - DNA, 366 bp, Enterobacter cloacae
atgaatatgaaaaaactgacgacccttttgctcaccgccaccttaggtcttgccagcggcgcggccctggcggcagacaccggcgcccagtccaataatggccaggccaactcttccgcggatgccggtcaggtggcgccggatgcccgtgagaacgtggcgccgaacaacgtggacaatagtcagatcaactctggctctgggggcaccacgggctcgacgatgacccaggataatatgtcgagcgatgaggtacataaaaactcgatgtgtaaagacggccgctgtccggacaccggtaaaaaactggacaacggcggcaatacgacccaagacaacagcaaaaccgacggcaccacccagtaa

SEQ ID NO: 138663 - DNA, 945 bp, Enterobacter cloacae
atggcgcactcgcattcgcactcctctgtccaggctccggataacagcaacgcccgccggctgctatgggcgtttatcgtcaccgccggctttatgctgattgaagccgtcggcggcgcgatctccggctcgctggccctgctggcggatgccggccatatgctcaccgactccgccgctctgctgtttgcgctgctggcggttcgcttcgccagccgcccaccaaatgcccgccatacctttggctggttgcgtttaaccaccctggcggcgtttctcaatgctatttctctggtggtgatcaccatgctgattgtctgggaggcgattcagcgcttccagcatccgcagccggtagccggcgtgacgatgatggtcattgcagtcgccggtctgctggccaacgtgctggcgttttggatcctacatcggggtagcgaggagcggaatcttaacgtacgcgccgcagcgctacacgtgcttggcgacctgctgggctcggtcggcgcgatcgtggcggccgtggtgatcctcaccaccggctggacgcctgtcgacccgattctttccgtgctggtttcctgcctggtattacgtagtgcctggcgattactgaaagagagtctgaatgaattgctggaaggcgcgccgcgttcgctggatgtggcggccctgcagcgggatatccgtcgctctatcccggaggtacgcgatgttcaccacgtccacgtctggctggtgggggaaaaaccggtgatgacgctccatgtacaggtcgttccaccgcacgaccatgacgcgttactcaaccgcatcctgcatttcctggaacataaatatgaaattgcgcatgccacggtgcagatggagtaccagccctgcagcggcccggagtgccatctcaacacgatgcacgccgggcacgatcatcaccaccaccattag

SEQ ID NO: 138664 - DNA, 720 bp, Enterobacter cloacae
atggatttttttagcacgcagaatattttagtacatatacccatcggcgctggggggtacgatctctcctggatagaggccgtggggacgattgccgggctgttgtgtatctggctggcgagcctggagaagatcagtaactatgctttcgggctggtcaacgtcacgctgttcgccatcatcttctttcagatccagctgtacgccagcctgctgctgcagctgttcttttttgccgctaacgtttacggctggtatgcatggtcgcgacaaagcagcaaccatgaggctgagctgcagatccgctggctgccgcgcagcaaagcgctgggctggctggcggcctgcgtggtagcgatcggcttgctgaccctgtttatcaacccgttctttgctttcctgacgcggatcgcggtcagcctgatgcaagcgctcggtttgcaggtcactatgccggaactgcagccggatgctttcccgttctgggactcctgcatgacggtgctgtcggtggtggcgatgatcttaatgacccgcaagtatgttgaaaactggctgctgtgggtgatcgtcaacgtgataagcgtggtgatttttgcccgtcagggcgtctatgccatgtcgctggaatacctcttgctgacgttcattgcgttgaacggcagccggatgtggataaacagcgcgcgtgagcgaggttctcacgcgttttctggctaa

SEQ ID NO: 138665 - DNA, 1044 bp, Enterobacter cloacae
atgagcgtaatgtttgatcctgaaacggcgatttatcctttccctgctaaaccgcagccgctgaccgtcgacgaaaagcagttttactgcgaaaaaatcaagcgcctgctgcgcgagcgcgatgccgtgatggtggcgcattactacaccgatcctgaaattcaacagctggcggaagagaccggcggctgtatcgccgactcgctggagatggcgcgctttggcgcccgccattcggcctccacgctgctggtcgccggggtgcgttttatgggggaaaccgccaaaatcctcagcccggaaaagaccattttgatgccgactctgaacgccgagtgttcattggatctgggctgtccgattgaggaattcaacgccttttgcgacgcccatcctgaccgcaccgtagtggtctatgccaatacgtccgccgcggtgaaggcccgcgccgactgggtggtgacctccagcatcgccgtggaactcattgaccatctggatagtcttggtcaaaagatcctctgggcgccggaccgccaccttgggcgctacgttcagcgtcagaccggcgcagacgtgctgtgctggcagggggcgtgcatcgtgcacgacgagtttaaaacccaggcgttgatgcggatgaaggctctgcatcccgaagccgccgtgctggtccatcccgagtcgccgcaggcgatcgttgagatggccgatgccgtaggctccaccagccagctgattgcggcggcgaaaagcctgccccagcgccagctgatcgtggccaccgatcgcggtattttctataaaatgcagcaggcggtgccggagaaaacgctgctggaagcgcccaccgccggcgaaggggcgacctgccgcagctgcgcgcattgtccgtggatggcgatgaatggcctgaaagccattgccgagggtctcgagcagggcggcgctgaacatgaaatccatgtcgacgaagcgctgcgaaccggcgcattaattccccttaaccggatgctggattttgcggctacactacggggataa

SEQ ID NO: 138666 - DNA, 831 bp, Enterobacter cloacae
atgaaggtctatcagctgccggaagccagccgcggcgcgcgcggtcggccgatcgtcaacctgctgccgctggaagccgatgagcgcatcaccgccatcctgccggtccgcgagtacgaagagggcgtcaacgtctttatggcgaccgccagcggtaccgtgaagaaaaccgcgctgaccgagttcagccgtccgcgttccgccggtatcatcgcggtcaacctgaacgaaggcgatgagctgatcggcgtcgatctgacctctggtcaggatgaagtgatgctgttctctgcggccggtaaggttgtacgcttcaaggaagacgccgttcgcgccatgggccgtaccgccaccggcgtacgcggtattaagcttgcagaaaacgacagcgtcgtctcgctgattattccacgcggcgaaggcgcgatcctgacggtgacgcaaaacggttacggtaaacgtaccgcggcggcggagtatccgaccaagtcgcgtgccacccagggcgttatttcgatcaaagtcaccgagcgtaacggttccgtggtcggcgccgtgcaggtggatgactgcgatcagatcatgatgatcaccgacgccgggacgctggtgcgtacccgcgtttccgaagtgagcatcgtgggccgtaacacccagggcgtgatcctcatccgcaccgcggaagatgaaaacgtggtgggtctgcagcgcgtggctgagccggtggatgatgaagagctggatgccatcgacggtagcgcggcggaaggcgatgacgatatcgccccggaagcggataccgatgacgacatcgccgaagacgaagaataa

SEQ ID NO: 138667 - DNA, 426 bp, Enterobacter cloacae
  misc_feature (412)..(421): n is a, c, g, or t
ttgaaatatcttgcctcttttcatacaaccctgaaggtttcacgttatctgttcagagcgctggcggtattgctgtggctgcttattgcgtttgtctctgtgttttatatcgtcaacgcgctgcacgagcgggaagccgaaatccatcaggagcttaatctcaacgccgatcaggcccagcgctatatccagcgtaccgcggatgtaatgaaagagctgaagtatgtcgccggtaatcgcttgtcggcaggggacgcggtagcgcaagggcaaaacggcgatatggcggtgcccaactttgaacccctgtaccccgattccgactgcagcgcgatgagcgccacctggcgtaattcgctgcagtcgctggcatggtttatgcgctactggcgggataattttactgccgccnnnnnnnnnngataa

SEQ ID NO: 138668 - DNA, 2385 bp, Enterobacter cloacae
atggccaactttggcctgcgggacgtgccgattgagcgcgatcaggcgctgaaagtcctgcatcagcgcatagagcaatatcgcaacgcgccgcaaaatgagcgcggcaacaacctgttctggataagccagggcgttcgccctggggtgggctatttttacgccctgacgccggtctatatggccaatcgcctgcaggcgatgctgggcgtggagcagaccatccgcatggaaagcttctttacgccgggcagtttgccgatgagcgtgacgatctttgacgataacggccagccgctgatttcgctggccggtgcggaaggtaaaatccagagcgaagcgaagtggatgcaggagcggatgtggtttggctacagttcgggtttccgcgagctggtgctgaaaaaaagcctctcgccgtcctccctgagcatcgtctattccgtctcggtagatcaggtgctggagcggatccgtatgctgatcatcaatgctatcgttcttaatatcctcagcggcgcgatgctgttcgcgctggcgcggatgtatgagcggcgcatttttatccccgcggagaatgacgcccagcgcctggaagagcacgagcagttcaaccgcaaaattgtggcttctgccccggtagggatctgtattctgcgcactgccgacgggaccaatattctcagtaatgaactggcgcacaactacctgaacatgctgacccacgaggaccgccagcggctgacgcagatcatctgcggccagcaggtcaattttgtcgacgtgctgaccagcaaccataccaacctgcagattagctttgttcattcacgctatcgcaatgaaaacgtcgccatttgcgtgctggtggacgtttccgcccgcgtgaaaatggaggagtcgctgcaggagatggcccaggcggcggagcaggccagccagtcgaaatcgatgttcctggcgaccgttagccatgagctgcgtaccccgctgtatggcatcatcggtaacctcgatctgctgcagaccaaagcgttgccgaaaggcgtcgatcgccttgtgacggcgatgaacaactcctccagcctgctgctgaaaattatcagcgatattcttgatttctcgaaaatcgagtccgagcagttgaagatcgagccgcgggagttctctccgcgcgaagtcatgaaccatatctccgctaactatctgccgttggtggtgcgcaagcagctgggcctgtactgctttatcgagccggacgttccggaacaaatgtccggcgacccgatgcgcctgcagcaggtgatctcaaatctgctcagcaatgcgataaagttcaccgataccggctgtattgtcctgcacgtccagtgcgcgggggattatctgcagattagcgttcgcgacaccggagaagggatcccggcgaaagaggtattgcgcctcttcgatcctttctttcaggtggggaccggcgtgcagcgcaattttcagggcaccggccttggcctggcgatctgtgaaaaactgatcagcatgatggatggcgatattgctgtcgaaaccgagccggggatgggtagccgctttaccatccgtattcctctgtatggcgtgcagaatacctcaccggtgagcagagacggtttcgctggcaagacctgctggctggcgattcataacacttcgctggcgatgttcgtcacctcgctgctcagctaccacggcctgacggtccgccgccatgccggcgaaacgccggacgccgaggatgtcttactcactgacgatgaggcgctgagcggatggcagggaagggccatggtcatcttctgtcgccgtcatatcggtattccgcaggagcggtccgccggcgaatggctgcacagcgtgacgactccccacgaactgctgccgctgctggggcgtattttccatgttgcgctcgccagtgcggaaaatagcccggcgctgatggccccggaggcgcaggccggcaataacgacgacatgatgatcctcgtggtcgacgatcacccgatcaaccgccgcctgctggcggatcagctgggttcgctcggctaccagtgcgtgaccgcgaacgacgggatcgacgcgctcaacgtcctcagcaagcagcacatcgatatcgtgctcagcgacgtcaacatgcctaatatggatggctatcgcctgacgcagcgcattcgtcagcttggcctgacgctgccggtgattggcgtaacggccaatgccctggcggaagagaagcagcgctgtctggaatcggggatggacagttgtctgtccaagccggtcaccctcgacgtactgaagcaaacgctgacggtatatgcggcgcgggtgcgtaaagggcgggaataa

SEQ ID NO: 138669 - DNA, 651 bp, Enterobacter cloacae
atgaacactatgaacgtaattattgccgatgaccatccgatcgtactgttcggtattcgtaagtcacttgagcaaattgagtgggtgaacgtcgttggcgagtttgaagactccacggcccttatcaacaatcttccgaagctggacgcccatgtgctgatcaccgatctgtccatgcccggtgacaaatacggcgacgggatcacgctgattaaatacatcaagcgccacttcccggatctgtcgatcattgttctgaccatgaacaacaatccggcgatcctcagcgcggtgctggatctggatatcgaagggatcgtcctcaagcagggggcgccgaccgacctgccaaaagcgctggccgcgctgcagaaagggaagaaattcaccccggaaagcgtctctcgcctgctggaaaaaatcagcgccagcggctatggcgataaacgcctgtcgccgaaagagagcgaagtgctgcgcctgttcgccgaaggtttcctggtaaccgagatcgccaaaaagcttaatcgcagcattaaaaccatcagcagccagaagaaatcggcgatgatgaagctgggcgtcgaaaacgacatcgccttgctgaactacctctcttccgtctcgctgagcgcgacggacaaagagtaa

SEQ ID NO: 138670 - DNA, 2658 bp, Enterobacter cloacae
atgaccccgaaaaaattctccctgatccccggcaacatcagccgcttcttcattttgatggttattgtcctgctggcgacaatgggggtgatgattcaaagcgccgtcaatgcctggctgaaggagaaaagctatcaggtggttgatgtctcccacgctctgcaccagcgcattgacgcctggcgctatgccacctggcagatctacgacaatatcgccgccacctcagtcaacaccgcaagcggcggtctgcaggagacgcgtttaaaacaggacgtttactacctggagaaaccccggcgtaaaaccgaagccctgatctttggctcccatgacagctccaccctcgaaatgacgcagaaaatgtccgattatctcgatattttgtggggcgcggagaccattccgtggtcgatgtactatctcaacggcctggacaatagtctgatcctggtctccaccctgccgttgaaggacctctcttcgagcttcaaagagtcaacgatcagcagcgtcgtggagtcgcggcgcgcggaaatgctgctgcaggctaatacccttgatgagcgcgagacgttctcgccgctgcgccatctcgcctggcagaacgcgcactattttacgttacgcaccaccttcaaccagcccggacaccttgccacggtggtcgccttcgatctgccgattaacgatctgatcccgcccggcatgactatcgacagcttccgtatcgagcctgacccgtcgcaaaatctcgccaccacgccggataaagagagcgccgatcatattgggatcacctttaacggcatgcagattgacatcgccaccgacatcagcaccaccggtatgcagttgctgtggacggtaccaatgagcaccatgctgctggagtccatgcagaacattcttctgccgctgctgctcaacattggtctgctggcgctggcgctgtttggttttaccacctttcgccactataaaggacgcagccattcgtctggcgccgggctcccctccgccgccaacagcgaactgcgtctgctgcgcgccattaacgaagagattgtttctctgctgccgctggggctgctcgttcacgatcaggaagccaaccgaacggttatcagcaatccaattgccgaccatctgcttccgcacctgaatctgcagaacatcaccaatatggcggaccagcatcagggggtgatccaggccaccgtcaacaatgagcagtatgaaatccgccagtatcgcagccaggtagcgccgcgcacccagatcctgatcatccgtgatcaggaccgcgaagtgctggttaataaaaagctcaagcaggcccagcgcttgtatgagaaaaaccagcagggacgggccgcctttatgcagcacatcggcagcgccctgaagcagcccgcgctgacgctggcggcagaggcggcggcgctcagtagtacagagaatcggacgctggcccagcatgccgatgagctggtcaaactcatcgatgacattcagctcgccaatctgctggaaagcgatgcctggaaaaccaaccagacgttgttctcggtgcaggagcttattgacgacgtcgtgccggaagtgctgccggcgatgaaacgcaagggtctgcagctgctcatcaacaatgcgctcccggccggcgagcagcgctatggcgaccgtgaagctctgcggcgcacgctggtgctgttaatccaatattcagtgaccaccacgcctatcggcaagatcaccctagacgtctgtcaggatgagtcggccagcgatcgcctgaccttccgcattctggataccggcaacggcgtctcggcaaacgagatcgacaatatgcacttcccgtatctcaacgagacccagagcgacctgtacggcaaagcaaacgcccttaccttctggctatgcgaccgcatgacgcgcaagctgggcgggcaattgaccattaaagcccgggagtcgctggggacgcgctataccctgcatctgaaaatgccggccagcgaagaggcgccagaggcgggagagcatttgctggatgacgttatcgtcctgctggatgtgacttccagcgaagtgcggcggattgtcactcgccagctggagagctggggagcgtcctgcatcacaccggacgatcgggcgaccagtcaagcctttgatctttatttaacggataatccgtctaatcttactgcttcaggcttgcttttaagcgatgatgaggtcgggatacgcaagatcggcccgggccaactgcgggtcaactttaatattagcacggcgatgcaggaggctatcctgcagcttattgagcagcagctggcggaggaggcggttcagcccgtcacctcaggaaacgagagtaacgccgaactccatgccagcggctattacgcactgtttgccgatacggtaccggatgatgttcagagattgtatactgaaatcgaagcgggcgattttgctgctctggcgcaaaccgcccaccgcctcaaaggggcatttgctatgcttaatctgatacccggcaagcagttatgtgaaacgcttgagcatctgattcgcgaaaaggatgcgcaaggcatagaaaaatatatcagcgacattgacgcttacgtcaagagcttgctgtag

SEQ ID NO: 138671 - DNA, 1437 bp, Enterobacter cloacae
atgaacaacgcgcagacacatctgaaaatgggctacgtctggacgatttgtctggtcgccgcctgcggtggtttacggtttggctatgactgggtggtgattggcggcgctaagccattttatgaagcctggttttcaattacggacccggcgcagtccggctgggcgatgagctcagcgctgttgggctgtattttcggcgcattaatttcgggatggtgcgcagacaaactggggcgcaagctgccattaattctttccgctgtgctattcagcgcgtcggcctgggggacggcggtcgccagtcatttcgatatgtttgtggtttaccgcattgtgggcggcgtagggattggtctggcttccgctctcagcccgctttacattgccgaagtcagtccggcagagaaaagagggcgttttgtcgcggtcaatcagctcaccatcgtgattggcgtactggccgctcagttaatcaatctgatgattgctgaaccggtggagccgggggcgacgcagcagatgattgtggacagctggaatgggcagatgggctggcgctggatgttcggtgcggaactggtgccggcgctggcgtttctggtcctgatgttttttgtccccgagtcgccgcgctggctcatgaaggccggtaaaccggagcgcgcccgggctgcgctggaacgcattggttctgccgactatgccgacaggatcctgcgtgaaatcgcgcataccctggaaaaggataacaacaaagtctcctacggcgcgctgttggctccccaggtgaaaccgattgtgatcattggcatggtgctcgccatattccagcagtggtgtgggattaacgtcatctttaactacgcgcaggagatttttgcctcggcggggttcgatattaacagcacgctgaaatcgatcgtcgcgacgggcgtcgttaatctggtctttaccattgcggcgctgccgctggtggataaaatcggtcgccgtaaattaatgctgcttggcgcttcgggattgacgctgatctatgtgctgatcgccggcgcttacgccatgggcattatggggtggccggtactgttgctggtgctggcggcgattgctatttatgcgttgaccctggcgccggtgacctgggtgctgctggcggagatttttcccaaccgcgtacgtggactcgcgatgtctttaggtaccctggcgctgtggatcgcctgtttcctgttaacctatactttcccgctgcttaatgccggtctgggcgcggcaggaagcttcctgctgtatggtgtcatttgcgctgccggctacctctatatcctgcgcaacgtcccggaaacgaaaggtatcaccctcgaagcgctggaagagcagctggcgcagcgtcatacgggcgtgaatgcggcgaagcaggagcagatgcgctaa

SEQ ID NO: 138672 - DNA, 3276 bp, Enterobacter cloacae
atgtacggttcggttaaggtctggcaggaaatcatttcattaccaacgtggacgacgggagcggaagatccgaaccctatgtttctggaaaaacgtgtttatcaaggatcttccggcagcgtctatccctacggcgtgattgataccctgaccggcgaacgcgaaatgcgcgattatcaggcagtgtggatggagaatgatttccttcgggtcatgctgctaccggagcttggcggccgtattcaccgggcatatgacaaagtcaaacaacgtgatttcgtctattacaatgaggtggttaagccagccctggtagggctgctcgggccctggatctccggcggaatcgaatttaactggccgcaacatcaccggccgacgacctttaagccggtcgatttttctattcagcagggagaaaacggcgcgcagaccgtatggatgggggaagcggagcccatgcgcggtttgcaggttatggccgggtttacgctctatcctgaccgcgcgctgattgaaatcactggcaagatcttcaatggtaacgccacgccgcgccatttcctgtggtgggccaaccctgcagtaaaaggcggcgatgcccaccagagtgtattcccacccgatgtcaccgctgtattcgaccatggtaagcgtgatgtttccgctttcccgattgccaccggtacctactacaaagtggactattctgcgggggttgatatctcccgttataaaaacgtcccggtacccacttcgtatatggcggagaagtcggattacgattttgtcggcgcttatcatcatgacgagcgaggcgggttactgcatgttgccgatcaccatgtctctcctggcaagaaacagtggagctgggggtacggggattttggccaggcctgggatcgaaatctgactgatgaaaatggcccttatattgagctgatgaccggcgtcttcaccgataaccagcctgactttacgtggcttgcgccttatgaagagaaggtgtttgtacaaaatttccttccctacagcgagttagggatggtgcaaaatgccaatacacagctggcactgaagctggttcgcgagtctgggcaactgcagcttggcgtatatgccattgctccgctaaatcatatcgtggttgaactcagcgctgaccatcagccattgtacgaaactcagctgacgctgaagcccggtgagagctggcagcagacgctgccggaaaatggcgtcgggcgcttaaccctcaaagtgaaaaccgccgagaaccagccgctgctggattatcaggaacatattacccaacagacgccgctgcccgaaccagctatagcgcccgcgttaccggaagcgatccacaatggcgacgagctctattttatcggccagcaccttgaacaatacaaccacgcaagccgctacgccggggattactatcgtcgggcggttgagctcgatccgcaggattatcgcaataatgttgccctcggtaccctggcgttcaacagtgccgactgggcgctggcggaacagtgtgcccgtgctgcgctacagcgcgcgcatcgtttgaataagaacccgcgagatggcgaagccagtatgctgcttgccagcgtgctggaaaggatgggggatgatgcaggcgcctgggatcactattacaaagcctcctggagcggtaactgccgtgacgccgcctggtggtcgctggcacggctggcgatgaagcgcggtgatgttgccgatgcgctggaaaaagtaaacaccagtctgcggttcaacgccagcaatcctctggcgatggggttgaaagcgctggcattagccaacagtgggcagaagaaagcagcgctagagtttattttcgcctctcttgagcaatacccattgagctatccgctgcactgcgcgcgctggatgattgagcggagcgacgacgcgcgagaaaccctgctgcgcatcacggggcgcagaggggtcaacgccagcctgctggcgggttggctgctctctatcggacagacgtcggcggtgaaagaggttcttgcggttctggacagtcaggaagcgctgccgatgctctggcgtgcgtcgctaagtgatgatgccaatgaacgccaacagtttattgccgccgccgagcactgccatgcgcacaatgttcgtttccctaactcgctcgatgaagttcagatgctgcagtcgctgggcgacagcgcttttgcccgctatctactcggttgcttctggtacagcaaacgtcgctatgacgaggcggtgagctgctggcgcgagacgctcgaaaaatctcccgattatgcgcccgctcatcgtctgctgggcgtttactcctggaataaacagcaggatgcaacgcaggcgctggcttatctgcagcgcgccgtagcgctggagccggacaatgcgcgcttcctgtttgaactcgattttttgcaaaaattactggccaggccggtacatgagcgactgacgacgctggtggaacgtaaagccgtggtgctgaagcgggacgacctgaccgctgagctgctaagcctgtggaacgcgtccggtcattatgccgatgccgccgcgattctggatacgcgcgtattccatccctgggaaggaggagaagggaaaatcaccggccagtatttgctcaatcagctccatcgggcattacagttcatcgagcgtggggcgtttaaacaggccacggactgtctgaaagccgcattacgctatcccgacaatctgggggaggggcgactgcctgggcaaacggataacgatatctggtatttgctgggctactgcgcagaacaggctggggatgcgcagcaggcggcggaatattaccagcttgcccggcaagggggctcaacgctggacgccgggcggtactacaacgatcaacccgccgattaccttttctggcagggcattgcgctgcgtaagagcggtaacccagcgcaggccgagcagcacttccgccattttatcgactgggccgcgcagcatcgggatgacgttccgcaagtcgatttttttgccgtctctcttccggacctggtggttctcgatgtatcagcgcagcagagacatctgcagcactgcttgtttattgaagcgctgggccatctggggctgggcaacgtatccgcctgccagcagaggatgcagcagcttctgcaaataaatccggctcatgataaggcgcatctgattcgccatgccctgcaaagcggcattttttcctga

SEQ ID NO: 138673 - DNA, 1215 bp, Enterobacter cloacae
  misc_feature (784)..(793): n is a, c, g, or t
atgcagcgtactggctttaataacgcccgggtccggcaggccaataagtcgatttttctttcccatctgtggcgggaaaagcagctcagtaaatcacagctctctcaactcaccggtctctccattccggcggtgagcaatattctggccgagctgcttagcgagggattgatcggtcactcaacggaacacttgagcaaacggggcgtgaacagcggcagctaccagatccccaagcacggtgcctggacactgtgcatgaatatcaccccgaccagcattgaatatcagcttgccgacgcccgcctgctggcagtggatggccatcagcatttgccggtcaacgcgcccactcctcaggccctgcttgaggccatcgttgaatgctggcggcatatccaccgccgctacccacagcacagcatcaatctcgcccttggcgtgcatggacaggttgatccgattaccggcgtttcacaaaccatgccccaggcacgctggaaaacaccgatcgaaataaagtatctgcttgaggagcggcttggcgtgcaggttcgggtggataacgactgcgtgatgctggcgctggcggagaagtggcagcatcagggtacacagcaggatttttgcgtgatcaacgtcgactacggtatcggctcgtcatttgtgattaacgatcatatttatcgcggcagtctgtacggcagcgggcagattgggcatacgattgtcaatcctgacggcaacgcctgcgactgcggaagatacggttgcctcgaaaccnnnnnnnnnntcgaaaccgtcgcctctctcagcgcgctgaaaaaacaggcccgaatgtggctcaaaacgcagcctgaagcaacgctcgcccccgagcagttaaccacggcgtcgctcattgaggcctggaaagagggagatgtgcaaattcgcgcatgggttgataacgctgccaacgcgattggcttaagcctctataatttcctgaatatattaaatattaatcaaatctggctttacgggcgcagctgcgccttcggtgagcagtggctggaaagtatcgtcaaacaaacgggttttaacccctttgaccaccgggatacgccgcgagcgcacgccacccaaataggctttggccagctgacgcgcgcccagcagctgatggggataggttatctgtacgttgaggagcaattgcagacgctggtttag

SEQ ID NO: 138674 - DNA, 468 bp, Enterobacter cloacae
ttgtgtattacgtttaaatcacacgtctctcataacgagctgattatgaactcactccgctattttgattttggcgcttcccgctctctgttgctgcttatcgcccgcatcgccgtggtgattctgtttattctttttggctatcccaaactgctgggctttgacggtacggtgcagtacatggccgcctccggcgcgccgatgccgaccctggcggcgattatcgccgtcattatggaagtgcctgccgcgattctgattgtgctcggctttttcacccgcccgctggcggtcatctttattttctacaccctgggcacggcggtgattggccatcactactgggatatgactggcgatgcggtattgccgaacatgattaacttctggaaaaacgtcagcatcgccggcgctttcctgctgctggcggtaaccggccccggggcgatctccctcgaccgccgctaa

SEQ ID NO: 138675 - DNA, 435 bp, Enterobacter cloacae
gtggcgctgaaagaagcgatggagccagagtttaaagtttaccagcagcaggttgcgaaaaacgctaaagcgatggtggaagtgttcctgaaccgcggctacaaagtggtgtctggcggtactgagaaccacctgttcctgctggatctggtggataaaaacctgaccggtaaagaagctgacgccgctctgggccgcgccaacatcaccgtcaacaaaaacagcgtgccgaacgatccgaagagcccgttcgtaacctccggtatccgtatcggttctccggcagtgactcgccgcggctttaaagaagcggaagtcaaagagctggctggctggatgtgtgacgtgctggacaatatcaatgacgacgcggtcattgagcgcgtgaaaggtaaagtgctggatatctgcgcccgcttcccggtatatgcgtaa

SEQ ID NO: 138676 - DNA, 192 bp, Enterobacter cloacae
gtggagaattcggccaaagcgcgtaacgacgattacaacgcggcggaaaagatcattatggtcaaagcgccgatcgcgccgatctaccagtacactaacggccgattgattaagccgtggctgaaaggctacccgatcaccaacccggaagatgtggcctacagccgtaccatgtatatcgtgaagcactaa

SEQ ID NO: 138677 - DNA, 387 bp, Enterobacter cloacae
atgaaagtcctcaatatcctgatccgtcgatgcgtgctgattgcccgctttgaagagaccgtttcgttctacgaaaatctcatcgcgcagaaggcaaggttgtgtttcgactatcccgaatacgatctcaaactggcgcaggtgggttccgtgcttttaattggcggaaccgagcaaagcctggctccgtttcgcgccaccgaggccactttcctggtcaacgacattaccgcctgggagaaacatctgccttccaccggggcaacgattatcaacccggtgaaggccgtgcccaccggctggaacatgctggttcggcatccggatggcatgattgccgaatacgttgagcatcatgataaaaacccggcggatgagatcttctga

SEQ ID NO: 138678 - DNA, 870 bp, Enterobacter cloacae
gtggaatattcaatattaagtaacgctcgcaaaatgccgatgctgggtttcggcgttttcaaggtgaccgataaagcggagtgtaagcaggcggtgttgaacgccattcgcaccggttatcgcctcatcgataccgctgccgtctacgataatgaagatgcggtgggtgaggccgtgcgcgaagccatcgccgaaggtctgtgtacccgcgaggcgctgtttattacctccaaactgtgggtccaggacatggccaacaccgggatggcggaagccgggattgccgcgtcattaaaaaaatcgggcctggaatactttgatctttatttgctacatcaggcgatgggcgattatttcagcgcctggcgtgcgctggaagaggcctatgaggccggtaccctgaaagcgatcggcgtctccaatttttacccccatgtgttagctaacttctgcgaaactgtcagaattaaaccaatggtgaaccaggttgaactgcatccttatttcgcgcagcccgcggcgctggaagccatgaagcattatcacgttcagcctgaagcgtgggcgccgttaggcggtggcagacataatccgtatcaagatgcattgctgcaggggattgccgatgcgcaccagaaaaccattgcgcaggttgttctgcgctggaacgtgcagcgtggcgtcacggtgatccctaaatccacccgccaggagcgcattgaagaaaattttgctatctgggatttcgtattaacagataacgaaatggcgcaaatcagcgccctggatttaggctatgttggcgaagcggtaaaacacttcaaccctgagttcgttcgcggatgtctgggggtgaaaatccacgactga

SEQ ID NO: 138679 - DNA, 291 bp, Enterobacter cloacae
gtggcctttaaagcggcagtctcccgggaaattttcgctgccaatgaccgcgtgacgctgcgctttatcgatgcgggagagatctttcctgccgaacgcctggcgctggcgcgtaacgatgagcactttgatgtcgatccgttagcggaaggcggcaggggcttgcggcttattctgcgtgcggtggactattttaatgtggaaactggcgccggggagaacgtgactaccctgatagaagcgttgcctgatacccgcctaagccatgccaccgacgatcgctgcgggtga

SEQ ID NO: 138680 - DNA, 189 bp, Enterobacter cloacae
atgatcgaacatatccattttagatgcccatgctgccatggctcccagtacagaacgtcccagtttgacgtcactgaaaaaaacccttttggtgcgaaatgcattttctgcaaatcagccatgatgacattagataccatccgtcctcatcacctgggcgtgcactccgctgcccaggcacagcaataa

SEQ ID NO: 138681 - DNA, 915 bp, Enterobacter cloacae
atggataaactggatactctgaccttgtttgtgcgtatcgtcgaacggggctcattcagtgccgccgccgcggatctgggggtttcccggccagtagcgaccgcggctattaaagcgttggaggtcagtctcggggcgcggctgctacatcgtaccacccggcacgtacggccgacggcagaaggctcgctgtattatcagcgctgcgtgtccattctggcggcccttgaggaggccaaccgcagcgccggggggagcatctccggcaccattcgggtagacgtggcgggcaacctggcgcggaccctgctgctgcccgcgctgccgcagtttctcgcccgctacccggacattacgctgcagatcggcgaaagcgagcgtgacgtcgatctggttcgcgagggagtcgactgcgtcattcgcggcggccatctccccgacagcgagatgatctgccggccgctcgccgggttgcaggagatcacctgcgccagtccggcctatctcgcccggtacggcaccccgcatacgattgaaggactgacgggccacgtgatgatcgggtttgtttcatcgcgcacgcaacgtaccttgccgctgagctttacccaggatggccgtcagagcgaggtcagtttgccctgtcggctgctgacttccgatgccgacgtcggcgccgaagcggcaaggcttggctttggcctgtatcaggcccccttgccccgccttgaggccgatctggcgtcgggcgcgttaacggaagtgctggccgattttcgtcctgcgccgctgccgctctccctgctctatcccagtaatcggcagctctctgcccgggtacaggtatttatcgactgggtgacggcgctgatgaagcctcccctggcgcagcaggcatccggaaggctaaaataa

SEQ ID NO: 138682 - DNA, 762 bp, Enterobacter cloacae
atgaacaatagcgcaaaaatcgccctggtgacaggcggcagccgcggcctgggacgcgcgaccgtcgaagcgctggcacagcgcggcgtaaatgtagtactgacctacaaaacgcgtcttgccgaggcgaacgaggtggttacacgggttgaagcactgggcgcccgggcgatctcgttgcctttcagcgccggcgaaatcgacacctttgacgcatttgttagcgcttttcaggccgcgctgacggagctgggcgccgataaatttgattatctggtcaataatgccggcaacgccagcggcatgggatttcttaacgccacagaagcggaattcgatgcgctgtatcgcatccacgtgaagagcgtttttttcctcagtcaaaaactattgccgctgctggccgatggcgggcgaatagtgaatgtctcgtccggcctcacccgcatcgtgatggcgaaccgggcgccctatgcgatcatgaaatccgcggtggaaaccctgactcgctatatggcgtttgagctgggcagtcgcgggatcacggtgaactgcgtggcgcccggcgccatcgccaccgatttcagcgacggggtggtgcgggataacccgcaggtcgctcaggcggtagcgaacatgacggcgctgggccgacctggcctgccagaggatatcgggccgatgatcgcctcgctgttatccgatgatcatcgctgggtgaatgcccagcgcattgaggtttccgggggaatgcgcatctga

SEQ ID NO: 138683 - DNA, 1533 bp, Enterobacter cloacae
atggattttgaaaatgaattgaccagtaagatccttgatcccattcacggcactattcgtttgacgacactcgagattgcctttatcaatcacccccttttccagcgcttacgcaacattaaacagaactcttttttatataaggtgtttccctctgctgtgcacagccgcttcgaacactctctcggggtgctgcatttatcaagtgaaatactcaataatttacgcctgaatgcgatacggtatcaaaagaaatatgatgatggccatgtgtttggtcatatcgatcagataccaaaacacaacattcaggagttgagactcgctgccctgatgcatgacatcgggcacgggccggtatcccaccagtttgagagttttatgcctggtaagcacgaattctccgatgttctccccacagcctaccattcaatcattgatgtattaagcaagccagaacagaaagttgaacatgaacagctttcgctgttgttcagcctgatgatttatcatgatctgagaaaacaaggtaaggtcgatgacgaaataaatatcgaaaatgtgttaaaaattatcgaaaaaagatacggtgaccaacagatcattgaggaaattaatggaaaggcaacagatatcctgccgttaatgacctcgatcatctcttcctgtccgatcgatgccgaccggatggattacttgctcagagatggctatttctccggcgtcaagtgtggcatctacgattacaatcgcttgtttatgtcaattgtcccggtcgaggaacagggaaaattgtaccttgcttacaaagagagtgggattgattcgatcgctgagtttattggggcgcgctccagccttttctcgcaggtgtattaccataaaacaaaccgcgcctttgcgacgatgttgagcacattatgtgagattatgcaaagcaaggatccacaaaatgtcattatcgctgacgttaccgaccgtatcgttgaccatagcgatgaaagcttcatcgacgcgctgaaggagttttatttgtcgtgcagtgatgattattttttgaatgacaaggttggtgaatggatagatatcagcgataccgaggcggttaataaaaaaatacttgatgacattattaaccgacacccatggtcgaaggtctatgaggccaaacactctgtgtataaagctaacatcgctgacaaggaaaataaggcgtggaagagtcaactcaccgggttattgacttctgtattacagcctcatttcaaaccacatgaatttgccgttgatattgtctccgactgcgcctttaaagacctggataaaaccgaagttaagcttttggtgaaagatcttaagaaccgctacgaaataaaaccgttaattgaatgtggtgataagttaaatcagtatcaaatcatcaaatattgcattcgggtatttgttgaccgcgatatcaaagaacgcgtaactcctgaaataatctataaaatcaatgaaatagtggtcaagcagatcgcgttgctgaattga

SEQ ID NO: 138684 - DNA, 567 bp, Enterobacter cloacae
atgagcaagaaaatcctaatgctggtcggcgattatgccgaagattacgaaacgatggttccttttcaggcactgcagatgattggccaccaggtcgatgccgtctgcccggataaagccgctggcgactatgtcatgaccgcaatccatgactttgacggcgcccagacttatagcgaaaagccgggccatcgcttcacgctgaacgctgacttcgccgcagtaaaggccgagaactacgatgcgctagtgatccccggcggccgggcgccggagtatctgcgcctgaacgaggaggttattaaactggtacaggcattcgacgccgcgcgtaaacctatcgccgccgtctgccacggcccgcagctgctggccgccgccggtattctgcagggacggacctgcagcgcctatcccgcctgcgctccggaagtgcgcctgagcggtgggcactatgcggatattggtatcgaccaggcgcatgtggacggtaacctggttaccgcccccgcctggcctgctcatccacagtggctggcgaaattcgccgccctgctggcggaataa

SEQ ID NO: 138685 - DNA, 210 bp, Enterobacter cloacae
atgacgcgctgctttgtttttgtggatcagacctttagcagcctgacgatccacgattggttgcatttcgttaaatgcgttctgcgctgcagctttgtcgccagcttcgattgctgcgtatactttcttgatgaaagtacgcatcatagagcgacggcttgcattgtgcttacgagccttttcagactgaacggcacgtttcttagctga

SEQ ID NO: 138686 - DNA, 441 bp, Enterobacter cloacae
atgcgaccagtcgcccagcacgcccagacggataaagtcagcgcgctgaccgtcaacctgggtggcagcgtattcgcggcatttcgcgcggaactcagcggcggtgaacttctcacccggcttaccgtactcttgctccactttcagttcgattggcagaccatggcagtcccagcccggaacgtaaggcgagtcatatcccgcgagtcctttggacttcacgataatgtctttcagaatcttgtttacagagtgaccaatatgaatgctgccattcgcatatggagggccatcatgcagaatgaaggtttttttgccttttttggctgcacgaatgatgccgtacaggtcatcatcggtccaacgcgccagcattcccggttcacgcttggcgagatcgccgcgcatcgggaaccctgtttccggcaaattcagggttga

SEQ ID NO: 138687 - DNA, 1392 bp, Enterobacter cloacae
atgttaccctctcaatcccccgcaatttttaccgtaagccgcctcaatcagacggtgcgtctgctgcttgagcgcgaaatgggccaggtttggatcagcggcgagatctctaacttcagccagccctcctccggccactggtacttcaccttaaaagacgataacgcccaggtgcgctgcgcgatgttccgcaacagcaaccgccgggtcacgttccgcccgcagcacgggcagcaggtgctggttcgcgccaacatcacgctgtatgagccgcgcggcgactaccagattatcgtcgaaagcatgcagcccgccggcgaagggttgctgcagcagaagtatgagcagctgaaagcgcagttaacggcggaaggactgtttgagcaaaaacataagcaggcgctcccctctcccgcccactgcgtcggcgtcatcacctcgaaaaccggtgccgcgctgcacgatattctccatgtcctcaggcgccgcgatcccgggctgccggtgatcatctacccaaccgcggtccagggtgacgacgcccccgggcagattgtgcgcgccatcgcgctggccaacgcgcgccaagagtgtgacgtactgattgtcggacgcggcggcggttcgctggaggatctgtggagttttaacgatgagcgggtggcgcgggctattttcgccagccagatccctatcgtcagcgccgtcggccatgaaaccgacgtcacgatcgctgattttgttgccgacctgcgggcaccgactccctcagccgccgcggaaatcgtcagccgcaaccagcaggagctgctgcgccagctgcagtccggacagcagcggctggaaatggcgatggactatttcctcgccagtcgccagcgccgttttacccagctgttccatcgcctgcagcaacagcatccacagctgcgcttggcccgccagcagaccgccctggaacgcctgcgccagcggatgcgtatcgccgtggagtcacagcttaagcgcgcagaacagcggcaaaagcgcaccgttcagcgtctgaatcactacaacccgcagccgcggatccaccgcgcgcagtcgcggatccagcagctggaataccggctggcggaaattatgcgtggccgcctcagcgagcggcgtgaacggtttggcaacgcggtgacccatctggaggcggtgagccccttagccaccctggcgcggggctacagcgtcacctcggtgagcgacggtacggtgctgaagcagacaaaacaggtcaaaaccggcgatctgctcaccacccgcctgaaagacggctgggtcgaaagcgaagtgaagcagatcgcgacggtgaaaaaaacgcgggccagaaagccttcgcccactaaaccagcggaataa

SEQ ID NO: 138688 - DNA, 219 bp, Enterobacter cloacae
atggaacttgattgccctctgtgccacgcgccgttagatgtcaaaggcagtagcgcgcattgcgcccagtgcgaaagggtatttacccttgaggcccgctgcccggaatgccaccagccgctggaggtgctgaaggcgtgcggcgcggtggattacttttgccagcatgggcatggccttatctcgaaaaaacgggtggaatttattccgctggtttag

SEQ ID NO: 138689 - DNA, 1080 bp, Enterobacter cloacae
atgcagattggttttatcggtctcggcgcggtggtggaaaccgcctatttaccggcgctgcgtcgcctgggggacgtcatcgaccgctgccagggctatgacctggactgcagcagagcgctgccggggatccagcgctgtagttcgctgtcggcgctgctggccgaacccctggatacgctcttcattaccacctcatcacttcagcatctgcccgtactggagagggcgttagccagcggcatttcccgcatcgtggtggaaaagccgatcgtggccaaccttgagcaggccgcccggctgcgggcgctgctggcgccgactgagcaggccgcgcgggtgctggctcttgaccactggatggcgcgaggcgttgcgctgaacgctcctggcccgctgtggcgggcggaaggggagaccagcggcctgcctccgccgcacctgtcagcgcaggatatcgtctggatcgaaggttatttgcaggagccaagcggctttaacagcgctggtgagccggtcgcactcaattttgccaccggggagctggatacccggcagctgcgtcaccctgatggggtgatcctcgatatcggcacccatgtcctggcgatgctccgcgaaaccctgcacgccagcggaggcgatacggcgctgagcctttcccttcgggtggcgaaagaccgcctcggccatgacattgctcctggggatacgagcactgccgagggggaggcgcatctgcagggaaccctgggcactatcccgctcaatatctggctcaacaaatacgcgggtcccgcgggcgggcaaaagggaatgcggatagggctgcgggacgggcgaataatcaccctcgatcgcgcccctgagggcgaagtggtgacgctacaggacggcgagcgggtgcagcgctggacccggcccggggcgatctatacgcactgtcttgatgagcagatcctcggcgcggataatctgtttatccgggcgccggacagcgtggccgggctaacgcagcgtaggcttgaggaagtggaatggctgctcaggttgcagcagcaattacgcggcccgcattaa

SEQ ID NO: 138690 - DNA, 1479 bp, Enterobacter cloacae
atgatacctgtggtcgcgcttgtcgggcgccctaacgttggaaaatccacgctctttaaccgcctgacgcgcactcgtgatgcgctggttgcggatttcccggggctgactcgtgaccgtaagtacggtcgggccgaagtcgaaggccgcgaattcatctgtatcgataccggtggtattgatggtacggaagagggcgtggaaacccggatggcggagcagtcgctgctggcaatcgaagaggccgatgtggtgctgtttatggtcgatgcgcgcgcgggcctgatgccggcggacatcgcgatcgctaaacacctgcgctctcgtgaaaagcccaccttcctggtggctaacaaaaccgacggcatcgacgtcgaccaggcaatggcggacttctggtcgctcggcttgggcgatatctatccgattgccgcttcgcacggccgcggcgtgaccagcctgctggagcaggccctgctgccatgggtcgatgaggttaatccgcaggaagaagtggatgaagacgccgaatactgggcgaaattcgaagccgagcagaatggcgaagcggaagaagagccggaagacgacttcaatccgcaggatctgccgatcaagctggcgattgtcgggcgtcctaatgtcggtaaatcaaccctcaccaaccgcatcctcggtgaagaacgcgtggtggtttacgatatgccgggcaccacccgtgacagcatttatatcccgatgcagcgtgacgagcgcgaatacgtgctcatcgataccgccggggtgcgcaagcgcgggaaaatcaccgacgtcgtggaaaagttctcggtgataaaaacgctgcaggcgattgaagacgccaacgtcgtgctgctggtgatcgatgctcgcgaagggatctccgaccaggacctctcgctgctgggctttattcttaacagtggccgttcgctggtgatcgtcgttaacaagtgggatggcctgagtcaggaagtgaaggagcaggtgaaggagaccctcgactatcgtctgggctttatcgactttgcccgggtgcacttcatctccgccctgcacggcagcggcgtcggcaacctgtttgaatcggtacgcgaagcctacgacagcgctacgcgccgcgtaagcaccgcgatgctgacccggatcatgaacatggcggcggaagatcatcagccaccgctggtgcgtggccgtcgcgtgaagctgaaatacgcccacgccgggggctacaacccgcctatcgtggtgatccacggtaaccaggtcaaggatctgccggattcctacaagcgctacctgatgaactacttccgtaaatccctggacgtgatgggcacgccaatccggatccagttcaaggaaggggaaaacccgttcgctaacaagcgtaacaccctgacgccgaaccagatgcgtaaacgtaagcgcttgatcaagcacatcaagaaaagcaaataa

SEQ ID NO: 138691 - DNA, 1179 bp, Enterobacter cloacae
atgcaattgcgtaaattactgttgccagggctgctttccgttaccttgctgagcgggtgttcgctgtttaatagcgaagaagatgtggtgaaaatgtcaccgctgccgacggtagaaaaccagtttacgccgtccacgtcctggagcacctcggttggcgatggtatcggcgaattttactctaaccttcatccggcctttgccgacggcgtagtgtatgctgctgaccgtaaaggcaccgtcaaagcgctgaacgccgacgacggcaaagaggtgtggtcggtgaatctggcggagaaagatggttggttctcgcgcacgccagcgctgctttctggcggggtgaccgtctctggcggccatgtttatatcggcagcgagaaagcgcagctttatgcgctgaataccagcgatggtaccgtggcctggcaaacccgtgtcgccggcgaggcgctgtcgcgtccggtggtgagcgatggcatggtgctggtgcataccagcaacggccagctgcaggcgctaaacgagaccgatggggccgtgaagtggaccgttaacctcgatatgccggcgctctccctgcgcggcgagtctgcgcctgcgaccgcctacggcgcggcgatcgtcggcggcgacaacggccgcgtcagtgcagtattgatgcagcaggggcagatgatttggcagcagcgtatttctacggccaccggcccgacggaaattgaccgcctgaacgacgtcgacacgacgccgatcatcgttaacggtgtggtttatgcgctggcttataacggcaacctgaccgcgctggacctgcgtagcggccagattatgtggaaacgcgagctgggttcggtgaatgatttcatcgtcgatggtaaccgtatctacctggttgaccagaacgatcgcctgctggcgctgaccaccgacggcggtgtaaccctgtggacgcaaagcgatctgctgcaccgtttgctgaccgcgccggtgttgtataatggcaatctggtcgtcggcgatagcgaaggctacatgcactgggttaatccggaagatggccattttgtggcgcagcagaaagtcgatagttccggcttcctgaccgacccggtggttgccgatggtcgactgctgatccaggcgaaagacggtacgctgtacgcgattacgcgttaa

SEQ ID NO: 138692 - DNA, 621 bp, Enterobacter cloacae
gtggaaacttttaacaacgagaacgatcaggtcgatgcgctgaagcgcttctttgccgaaaacggcaaagcgctggcggtcggggtgattttagggattggcgcgctggtaggctggcgctactggacctcccatcagcaggataccgccagagacgcgtcgctggcttacgagaaggcgacttccgcgctgaaatcgaatacgccagaagtgctgtcaggggcagagaaattcgcggctgacaataaaaatacctacggtgccttcgcctctctcgagctggcacagcattttgttgaacagaacgatctgccgaacgctgaaaagcagctgcagcaggggctggcggccgcatctgatgataatctgaaatcggttatcagtatgcgtctggcccgcgttcagctgcaaatgaaacaggctgatgcggcgctgaaaaccctcgacagcatcaaaggtgagggctggaccgccattgtggccgatttgcgcggcgaaattctgttgagcaaaggcgataagcaaggggcccgtgcggcgtgggaagctggcgtgaaaagcgatgcttctcctgcgctcagcgaaatgatgcgtatgaaaatgaataatttgtccatctga

SEQ ID NO: 138693 - DNA, 945 bp, Enterobacter cloacae
atgttccgtcacgagcgcccgcagaaaggtcgctaccgccagttccatcagatcggcgccgaagtgtttggcctgcagggcccggacatcgacgcggagctgattatgctgaccgcgcgctggtggcgtgagctgggcatctcggagcacgtcagcctggagctgaactccatcggttcgctggaagcgcgcgccaactaccgcgacgcgctggtggcatacctggagcagtttaccgataaactggatgaagacagtaaacgccggatgtataccaacccgctgcgggtgctggactccaaaaacccggacgttcaggcgctgctcaacgacgcgccggcgctcggcgattatcttgacgaagagtcgaaagcccactttgccggcctgtgcgcgctgcttgacgatgccgggatccgctacaccgtcaaccagcgcctggtgcgcggccttgattactataaccgcaccgtgttcgagtgggtgaccaccagccttggttcccaaggcaccgtctgcgccggcggtcgttacgacggcctggttgagcagctgggcggtcgcgctaccccgggcgtgggttttgccatggggctggaacgtcttgttttactggtccaggcagtgaatccggaatttaaagccgatcctgttgtcgatatatacctggtagcctccgggaccgatactcagtctgctgcaatgcgtctggctgagcaggttcgcgatgcgctgcccggcgtgaagctgatgaccaaccacggcggcggcaactttaagaagcagttcgcccgcgctgacaagtggggggcgcgcgtcgcgctggtggtcggtgaatcagagattgctgacggaaacgtggtagtgaaggatttacgctcaggtgagcaaactaccgtaacgcaggagagcgttgccgcgcatttgcgcacacttctgggttaa

SEQ ID NO: 138694 - DNA, 321 bp, Enterobacter cloacae
gtggcggtcaacagcgatgcctccaccaaacgtctgaaaggcgaaacccgcccggtgaacccgctggaacagcggatgatcgtgctgggggcgctggaagccgtcgactgggtggtctccttcgaagaagatactccgcagcgcctgatcgctggcatcctgccggatctgctggtcaagggcggcgactacaaaccggagcagatcgccggcagcgaagaggtctgggcgaacggtggcgaagtgctggtgctcaactttgaagatggctgctcaactaccaatattattaagaaaatacaaaaagatagcgacaaataa

SEQ ID NO: 138695 - DNA, 198 bp, Enterobacter cloacae
atgaaccataacgatatgtattcaatgaagaattttgattttttggcgcggagtttcgccagaatgcacgcccagggccagccagttgatcttcaggccattgtcggcaatatggatgaagaacatcgtgaatggttttgccagcgctatgaactgtactgtcgccaggtgagtagtcaggcggaagccgcccattaa

SEQ ID NO: 138696 - DNA, 273 bp, Enterobacter cloacae
atgattgacccgaaaaaaattgaacaaatcgcccgccaggtccatgagtcgatgccaaaaggacttcgcgatctgggtgaggatgttgagaagaaaatccgccaggcgctgcagtcgcagctgacccgtctggatctggttagccgcgaagagtttgacgtgcagactcaggtgctgctgcggacccgggaaaaactggcgctgctggagcagcgcctgaatgacctcgaaaaccgcccggcgacgacgccgggcagcgaagagcagcagtaa

SEQ ID NO: 138697 - DNA, 654 bp, Enterobacter cloacae
atgaatcagacgctcctttcttcttttggtaccgcttttgaacgtgtggaacacgctttggacgccctgcgcgaaggccgcggcgtgatggtgcttgatgatgaagaccgtgaaaacgaaggcgatatgatcttcgccgctgaaaccatgaccgttgagcagatggcgctgaccattcgtcacggcagcggcattgtgtgcctgtgcctgaccgaagaacgccgcaaacagctggatctgccgatgatggtagagaacaacaccagcgcctacggcactggcttcaccgtgaccatcgaagcggccgaaggtgtgaccaccggcgtctccgctgccgaccgcgtgaccaccgtccgcgcggccatcgccgacggcgcgaaaccttccgatcttaaccgtccaggtcacgtcttcccgctgcgtgcgcagccgggcggcgtactgacccgcggcggtcacaccgaagccactatcgacctcgtgaccctggctggctttaaaccggcaggcgtgctgtgcgagctgaccaatgacgatggcaccatggcccgcgcgccggagtgcatcaagttcgctcagcagcacaatatggcggtagtcacgattgaagatctggtggcctatcgtcgcgaacatgagcgtaaagccagctaa

SEQ ID NO: 138698 - DNA, 771 bp, Enterobacter cloacae
atgtcatcacccttaatattgacgctgttagccggtagcgcaaccttcattggcgccatattcggcgtgattggccagaaaccctctaaccgcctgcttggcttctccctcggctttgccgccgggattatgctattgatttcgttgatggaaatgctgcctgccgcgctggccgccgagggcatgtcgccgctgctcggctacggaatgtttgttgtcggcctgctgggttactttggccttgaccgcctgctgccgcacgcccacccgcaggatctgatgactcccgccatgccgcgcccgcgcaacttacgccgcaccgctattcttctgacgctggggatcagcctgcataactttccggaagggatcgccacctatgtcacggccagcaacaacctcgagcttggcatgggcgtcgcccttgccgtcgccctgcacaatattccggaaggactggcggttgccggaccggtgtatgccgccaccggctcgcgcagcaaagcggtgctctgggccgggctttccggcatggcggaaattttgggcggcgtgctggcgtggttgattctggggagcctggtctcgccgctggtgatgggcgcgatcatggctgccgtcgccgggattatggtggcgctgtcggtcgatgaactgatgccgctggcgaaagagatcgatccgcaaagcaatccaagctacggcgtcctgtgcgggatgtcggtcatggggctgagcctggtggtactccagacgatgggcatcggttaa

SEQ ID NO: 138699 - DNA, 792 bp, Enterobacter cloacae
atgtcccgtacccgaatgcccgcgttgtttctcggccatggcagcccaatgaacgtgctggaagacaaccgttatacccgcgcctgggctcaactgggcgaaaccctgccgcgtccgaaagcgatcgtggtggtctctgcgcactggtttacgcgcggtacgggcgtaacggcgatggaggcgccgaagaccattcatgacttcggcggttttccgcaggcgctgtatgacacgcattatccggcgccgggctctccggcgctggcgcaacggctggtggagctgctctcgccggtgccggtcaccctcgatacagaagcctggggatttgaccatggctcgtggggcgtgctgattaaaatgtatccgcaggcggatatcccgatggttcagttgagcatcgacagcaccaaaccgccggcctggcatctcgaaatggggcggaaactggcctcgctgcgtgatgaaggcattatgctggtggccagcggcaatgtggtgcataacctgcgcaccgcccgctggcatggcgagaacacgccgtacccttgggcagagtccttcaataactacgtgaaggcgaatctgcaatggcaggggctggacgagcagcacccgctggttaactacctggcacacgaagggggctcgctctccaacccgacggcggagcatttcctgccgctgctgtatgtcctggggacgtgggatggagttgaggcgatgacgatcccggtcgatggcatcgagatgggctcgctgagcatgctgtcggtgttggttggcgcctga

SEQ ID NO: 138700 - DNA, 1161 bp, Enterobacter cloacae
atggaaagagtcagtattaccgagcgcccggactggcgcgagaaagcgaccgagtacggtttcaacttccataccatgtacggcgagccctactggagcgaagaggcgtattacaagctgaccctcgcgcaggtggaaaagctggaagcggtcaccgctgagctacatcagatgtgcctccaggtggtggaaaaagtgatcgccagcgatgagctgatgaccaaattccgcatccctaaacacacctggggttttgtgcgccagtcgtggaaaaccaaccagccgtcgctctactcacgtctcgacctggcctgggatggcgtcggcgaaccgaagctgttggagaacaatgccgacaccccgacctcgctgtatgaagcggccttcttccagtggatctggctggaagatcagctcaacgccggcaagctgccggcgggcagcgaccagttcaacagtttgcaggaaaagctgatcgatcgcttcggcgagctgcgcgagcagtttggctttcagctgctgcatatggcctgctgccgcgataccgttgaagatcgcggtaccgtgcagtatctgcaggactgcgcagctgaagcggggctggcgacggaattcctctacgttgaagatatcggcctgggcgaaaaaggccagtttaccgatctgcaggatcaggtgattggcaatctgttcaagctctatccgtgggagtttatgctgcgggagatgttctccaccaagctggaagacgctggcgtccgctggctggagccggcgtggaaaagcattatctccaacaaggcgctgctgccgatgctgtgggagatgttccccaatcaccctaatctgctggcggcctacttcagcgaagatactcacccggagatggagaagtacgtcattaagccaatcttctcccgcgaaggcgctaacgtgtcgatcgttgaaaatggcaaagtggtagaggcagtagaaggcccgtacggggaagaaggcaccatcgtgcaggcgttttacccgctgccgaagtttggcgatagctatacgctgattggcagctggctcatcaacgaccagcctgcagggatcggtattcgcgaagaccgggcgctgatcacccaggatctgtcgcgcttctatccgcacattttcgtcgaataa

SEQ ID NO: 138701 - DNA, 672 bp, Enterobacter cloacae
atgaaacggacaaaaaatattaatcattcgtcgttccgcaaaagctggagcgcacgccatctgacgccggtcgcgctggccgtcaccgcggtctttatgctcgccggttgtgaaaaaagcgacgaaacggtgtcgctgtaccagaacgccgatgactgctccgccgccaacccgggcaaagcagccgaatgcaccacggcctacaccaacgcggtaaaagaggcagagcgcactgcgccgaagtatgccacccgcgaagactgcgtcgccgagtttggcgaaggccagtgccagcagacgccagcccaggcgggcgtcgccccggaaaaccaggcgcaggcgcaaagcagcggcagcttctggatgccgctgatggctggctacatgatgggccgcctgatgggcggcggcatggcgcaacagcagccgctgttcagctcgaaaaatccggccagcccggcctacggtcagtacactgacgccagcggcaagagctatggcgccgcccagccgggccgcaccatgaacgtgccgaaaaccgcaatggcgccgaagccagccaccaccaccaccgtcacccgcggcggctttggcgagtcggtagcgaaacagtcgaccatgcagcgtagcgccgcaggctcaacgtcctcttctcgctcaatgggcggctaa

SEQ ID NO: 138702 - DNA, 1470 bp, Enterobacter cloacae
atgaagaaattgctccccattcttatcggcctgagcctgaccgggttcagcgccatgagccaggcggaaaacctgcttcaggtttaccagcaggcacgcatcagcaaccccgatctgcgtaaatcggcagccgatcgtgacgccgcgttcgaaaagatcaacgaagcgcgcagtccattactgcctcagcttgggctgggagcggattatacctataccaatggctatcgcgacagcaacggcgtcaactctaacgtcaccagcggttcgctgcagttaacgcaggttctgtttgatatgtcgaaatggcgcgccctgacgctgcaggaaaaaacggcagggattcaggatgtcacgtatcagaccgatcagcaaacactgattctgaataccgcgacggcctattttaaagtgctggccgccatcgacacgctctcctataccgaagcgcagaaacaggccatttaccgccagttggatcaaaccacgcagcgctttaacgtaggcctggtggcgatcaccgacgtacagaacgcccgttcacaatacgatgccgtgctggcgaacgaagtcaccgcgcgtaacgatctcgacaacgccgtcgaaggactgcgtcaggtcaccggtaattactatccggagctggcctccctgaacgtgaacggctttaaaaccaacaagccgcaggcggtcaacgccctgctgaaggaagcggagaaccgcaacctgtcgttgttgcaggcgcgtctgagccaggacctggcccgcgagcagattcgtcaggcgcaggacggccatttgccgaccctgaacctttccgcctctaccggggtctcgaatacgcgttacaacggttcgaaaaccaataccccgctcgcctacaacgacagtgataacgggcagaaccaaatcggcctgaacttctctctgccactgtatcagggcggcgcggtgacctcgcaggtcaaacaggcgcaatacaacttcgtcggcgccagcgagcagctggaaagcgcccaccgcagcgtcgtgcagactgtgcgttcatcgtttaacaacgtgaacgcctccatcagcagcatcaacgcctacaaacaggcggtggtctctgcgcaaagctccctggatgccatggaagctggctactcggtgggtacgcgtactatcgttgacgtcctcgacgccaccactacgctgtataacgctaagcagcagctctcgaatgcgcgctacaactacctgatcaacgagctgaacattaaatcggcgttaggtaccctgaacgagcaggatctggtcgccctgaacaacacgctgggtaaacccatctccacctccgcagatagcgtcgcgccggaaaatccgcaacaggatgccaccgctgatggctacggcaacactaccgcggcggtgaagccggtgtccgcacggaccacccagagcagcggcagcaatccgttccgtcagtaa

SEQ ID NO: 138703 - DNA, 1416 bp, Enterobacter cloacae
atgttacttcctgtgataatggctggcggtaccggcagtcgtctctggccgatgtctcgcgagctttacccgaaacagttcctccgcctgttcgggcagaactccatgctgcaggaaaccatcacccgactctcgggccttgaaatccatgaaccgatggtcatctgtaacgaagagcaccgcttcctggtggccgaacagctgcgccagctcaacaagctatcgaacaacattattcttgagccggtcgggcgcaacaccgccccggccatcgccctggcggcccttcaggccacccgtcacggcgacgacccgctgatgctggtcctcgccgccgaccatatcatcaataaccagccggtcttccacgacgccatccgcgtcgccgagcagtatgccgatgaaggccatctggtcaccttcggtatcgtgccgaacgccccggaaaccggctacggctacatccagcgcggcgtggccctcaccgacagcgcccacaccccgtaccaggtggcccgcttcgtggagaaaccggaccgcgagcgcgccgaggcctacctcgcctccggggagtactactggaacagcggcatgtttatgttccgcgccaaaaaatacctttccgagctggccaaattccgcccggatatcctcgaagcctgccaggccgcggtcaatgccgccgataacggcagcgacttcatcagcatcccgcatgacattttctgcgagtgcccggacgagtccgtggactacgcggtgatggagaaaaccgccgacgcggtggtggtcggtctcgatgccgactggagcgacgtcggctcctggtctgctctgtgggaggtcagcccgaaagacgggcagggtaacgtcctcagcggcgacgcgtgggtgcacaacagcgaaaactgctacatcaacagcgacgagaagctggtggcggccatcggcgtggagaacctggtgattgtcagcaccaaggacgccgtgctggtgatgaaccgcgagcgttcccaggacgtgaagaaggcggtcgagttcctcaagcagaaccagcgcagcgagtacaagcgccaccgcgagatttaccgtccctggggccgctgcgacgtggtggtccagaccccgcgcttcaacgtcaaccgcatcaccgtgaaaccgggcggcgccttctcgatgcagatgcaccaccaccgcgccgagcactgggtcattctcgccggcaccggccaggtgacggtcaacggcaagcagttcctgctgaccgagaaccagtccacctttattccgattggcgccgagcacagcctggaaaacccgggccgcattccgctggaagtgctggagatccagtcggggtcgtacctcggcgaggacgacattattcgtattaaagaccagtatggtcgttgctaa

SEQ ID NO: 138704 - DNA, 1371 bp, Enterobacter cloacae
atgacacagttaacatgctttaaggcttatgacatccgtggtgaactgggcgaggagctgaacgaggacatcgcctaccgtatcggccgcgcctacggcgaatttctgaaacccgggaagatagtggtggggggcgatgtgcgcctcaccagcgagtcgctgaagctggcgctggcccgcgggctgatggacgccggcaccgacgtgctggatatcggcctgagcggcacggaagagatttacttcgccactttccacctcggggtggacggcggtatcgaggtgacggggagccacaacccgatgaactacaacggcatgaagctggtgcgcgagaacgcgaagcccatcagcggcgacaccgggctgcgggatatccagcgcctggcggaggagaaccagttcccgccggtggacccggcgcgtcgcgggaccctgcgccagatttcggtgctgaaggagtacgtcgaccacctgatgggctacgtggacctggcgaacttcacccgtccgctgaagctggtggtgaactccggcaacggggcggcggggcacgtgattgatgaagtggagaaacgcttcgcggcggccggggcgccggtgacctttatcaaggtgcatcaccagccggacggccatttcccgaacggtatcccgaacccgctgctgccggagtgccgccaggacaccgccgacgcggtgcgtgcgcatcaggcggacatggggatcgcctttgacggcgacttcgaccgctgcttcctgttcgatgacgaggcgtcgtttatcgaggggtactacattgtcggcctgctggcggaggcgttcctgcagaagcagccgggggcgaaaatcattcacgacccgcgtctgacatggaacacggtggacatcgtgacccgcagcggcggccagccggtgatgtcgaagaccgggcatgcgttcatcaaggagcggatgcgccaggaagacgccatctacggcggggagatgagcgcgcaccattacttccgcgacttcgcctactgcgacagcgggatgatcccgtggctgctggtggcggagctgctgtgcctgaagaacagctcgctgaaatcgctggtggcggaccgccaggcggcgttcccggcgtcgggggagatcaaccgcaagctgggaaatgcagcggaggcgatagcgcgcatccgggcgcagtatgagccggcggccgcacacatcgacacaacggacggtatcagtattgaataccctgagtggcgctttaacctgcgcacgtccaataccgagccggtggtgcgtctgaacgttgagtccagagcggatactgcgttaatgaatgcaaaaaccgaagagattttagctcttctcaagtaa

SEQ ID NO: 138705 - DNA, 1167 bp, Enterobacter cloacae
atgaaaattactatttccggtacaggttatgttggtttatcgaacggtgtcctgatcgcgcaaaaccacgaagtggtggccctggatatcgtacaggccaaagtggatatgcttaaccagaagatctctccgattgtcgataaagagattcaggaatatctggcagaaaaaccgttaaatttccgtgccaccacggataagcacgacgcgtaccgcaatgccgactacgtgatcattgcgacgccgaccgattatgatcccaaaactaactacttcaacacctctacggtggaagcggttattcgcgatgtcacagagatcaacccgaacgcggtaatgatcattaaatcgaccatcccggtggggttcacccgcgacatcaaagaacgtttagggattgataatgttattttctctcctgagttcctgcgtgaaggccgtgcgctgtacgacaacctgcacccatcgcgtattgtcattggtgagcgctctgcgcgtgccgaacgttttgctgatctgctgaaagaaggcgcgatcaagcaggatatcccaaccctgtttaccgactccaccgaagcggaagcgatcaaactgttcgctaacacctatctggcgctgcgcgttgcctatttcaacgagctcgacagctatgctgaaagccaggggctgaacagcaagcagattatcgaaggggtatgcctggatccgcgtatcggcaaccattataacaacccgtcctttggctacggcggctactgcctgccaaaagataccaagcagctgctggcgaactacgaatcggtcccgaacaatatcatcgcggctatcgtcgatgccaaccgtacccgtaaagactttatcgcggattctattctcgctcgtaagccgaaagtagtgggtgtgtatcgcctgatcatgaagagtggttcggacaacttccgtgcctcttctattcagggcattatgaagcgcatcaaggcgaaaggtattccggttattatctatgaaccggtgatgcaggaagatgagttcttcaactcccgtgtcgtgcgcgacctgaatgccttcaagcaagaagctgatgtgatcatttctaaccgtatggcggaagagttggcggatgtggcggacaaggtctacacccgcgatctgtttggtaacgattaa

SEQ ID NO: 138706 - DNA, 1005 bp, Enterobacter cloacae
atgaagtttttgatcactggtgccgcaggttttatcggcttccatatcgcgcagcgcctgctgaatgaagggcatgatgttgtcggaatcgacaacatgaacgactattatgacgtcagcctgaagcaggcccgtctggatcgcctggcatctccggcattccatttccagcagctggatctggccgaccgtgaaggtatggcaaagctgtttgccacagagcaatttgaccgcgtgatccacctggccgcccaggccggggtgcgctactcgctggaaaacccgtatgcgtacgcagacgctaacctgatggggtacctgaacattctggaaggctgccgtcataccaaggtgaaacacctggtgtacgcctcctccagctcggtttacggcctcaaccgtaaaatgccgttctccaccgaagattccgtcgatcatccggtctccctgtatgccgccaccaagaaagctaatgagctgatggcgcacacctattcccacctgtacggcatcccgaccaccgggctgcgcttctttacagtttatggtccgtggggtcgcccggatatggcgctgttcaagttcacgaaagcgatgctggaagaaaaaagtatcgacgtttacaactacggcaaaatgaaacgcgactttacctatatcgacgacatcgtcgaggcggtggttcgggtgcaggatgtgatcccgcaggccaatgccgactggaccgttgagagcggttccccggccaccagctccgcgccgtacagggtatataatattggcaacagctcaccagtggaactgatggactacatcactgccctggaagaggcgctgggaatggaagcgcagaagaatatgatgccgatccagccgggagatgtgctggacaccagcgcagacacccaaccgctgtatgacctggtgggctttaggccgcaaacgtcagtgaaggaaggcgtgaagaacttcgtggagtggtacaaggattactatcagatctag

SEQ ID NO: 138707 - DNA, 669 bp, Enterobacter cloacae; identical to SEQ ID NO: 36186

SEQ ID NO: 138708 - DNA, 1014 bp, Enterobacter cloacae; identical to SEQ ID NO: 80749

SEQ ID NO: 138709 - DNA, 633 bp, Enterobacter cloacae; identical to SEQ ID NO: 16794

SEQ ID NO: 138710 - DNA, 840 bp, Enterobacter cloacae; identical to SEQ ID NO: 6027

SEQ ID NO: 138711 - DNA, 1359 bp, Enterobacter cloacae
atgtctgctggcgaaaaaatttctgtcagagagaaaataggttatagcctgggggacgcagccagtcacatcgtatttgactcgtctgtggctattctggcttatttttataccgatatttatggcctgccgcccgccgtaatggggacgatgtttttgctggtgcgtctgctggatgcgattaccgatccgattatgggcgcgattgctgacgccacctcaacccgctggggccgctttcgcccctggctgttggcgatctgcgtgccctttgcggtgagctgcgtgctggtgtattccattccctccttttccgactccggaaaaattgcctacgccgtggcggcttatatatttatgacactgatgtatacggcgattaatattccgtactgctcgctgggcgcggcgctgacctccgatccgcgcgaaagcctctcgctgcagtcctggcgtttcgctatcaccccaatcggcggcgcgctcggtactgcgtttattttaccactggctgattttctctatcccggcgatcgcgcgaccggtattcaggtctcgatggccctgtttggcgttatcggctgcctgatgtttatcacctgtttcgccacgactaaagaacgcgtgcagccgattaaagaacagaacctgaacatcgcgcgggacgtgaaaatactatttcgtaacgatcagtggcgtattctttccgtttacaattttatgatgctggtcgccgtggtaattcgcggtggcgccgtcgtctattatgttaacagcgtcctgcataaaggcgccgacgtgattaccatattcatgctcggcggtatgtttgcctccatgctgggttcggtgctggccaagccctttgggacgcgcttttgtaaggtccgattctctttctggattaatcttctcaccgccgcgctgggcgtggtctgctttatcgtcccggtacaatattggattgcggtgctcggcgtgcatattcttatttctatcattcagggcggcaacggcgcgttgcagtggtcgatgattaccgacgtgaataactatggcgaatggaaaacccagcggcgtattaccggtatgaatgtcgcagcaaatatctttgtcatcaagctgggcgtcgccgtcggcggggccatcctcggctggatattggcctatttccattacgccgctaacaccacggtgcagtcggcttcagcggtgcagggcgtggtgctgttgtttactctggtcccttccgtgttttatgtgcttaccgccgtctcgattaaattctacggcttaacggaaaacagaatgaacggcatcgttgatgatttaaaacacggcactttcgccgaatcctga

SEQ ID NO: 138712 - DNA, 1392 bp, Enterobacter cloacae
atgaaagtaaactatatggctctgattatgagtggtctgttctcctctggcctttgggccgcggcgaataatcacccgacggatattgaaaaacgtttagcgcagctggaacagcgcgtaataaatgctgagcaacgagcggccgatgcggaagcgaaaatccagaccttaacccgacagcagaacgtggtggcgaaaagcacgacaactgtcaaagtggagtccgccgagcccgtcgcaccgggcgcggagccgacaacactaacgctgtccggctatggggatatcaaattttatggtgatgtcgaatttaacatggatggcgccagcagcagcgggagcctgacttcggtaaaaaccacggcaaataaagactgggcgccgggcaataatgaacgctgggatattaatggccgcctgctgttaggttttgacggcatgcgcaaaatggataatggccgttttgccggtttttccgtccagccgctggccgacctgaacggcaaaatgaatcttgatgatgcggtattcttttttggccaggagaacgactggaaggtgaaggttggtcgtttcgaagcctacgatatgttcccgttgaatcaggatacgttcgtggaatactccgggaacaccgccaacgatctgtacagtgacggctacggctatatttacatgatgaaggaagggcgcggtcggagcaacagcggcggcaacttcctgatgagcaaaacccttgataactggtatttcgaactgaataccctgctggagaacggcagcacgctattccaggaccagcagtatcatggcaccgcactggaaaatgagaaaaatgtggcctatttgcgcccggttatcgcgtggaacagcgggcgcttctccactgccatcgccatggaaagcaacgtggtaaataacgcctatggctatcacgatgcgaaaggacgctgggtcgaccagtccagccgtaccggctatggctatacgatgacgtggaatgggcaaaaaaccgatccgcaggacggcgtggtgaccaaccttaacgtcgcttatatggatgccgaagatgagactgactttaccgcgggcgttaactccctgtggcacggttttgagctgggctacatttacgcgcataacaaaatcgacagctttaacaccgctgattttatcgctaactgcgacgataattgctggatcgccgatccgggcaactatgatatccacacaatccatgcgtcgtacctgtttccgaacgtaatgaatatgaagaacttcaacatctatcttggggcctacgcatcatggattgaatccaacccaaacaacggcgacggccaggaagactcccgctatggcggccggctgcgcttcaagtatttcttctga

SEQ ID NO: 138713 - DNA, 1440 bp, Enterobacter cloacae
atgataaaaataacgcttcctgacgggcattattatgacgagatgctgaccgcccagggtgagcagcggccgcactataatgcctggtggcaatggtttcgcaacaccgatcaattctctatccggcagaaaaaagcgcaagcggaactgctttttcaccgtatcggcatcacctttaacgtgtacggcgaggatgaggggaccgagcggctgatcccgtttgacagcgtgccgcggatcatacccgccggggagtggcagcgcattgaccgcggcatacgccagcgggtgaaagcgctgaacgccttcctctatgacatctatcatgagcagaatatcctgcgcgcggggctgatcccggccgagcaggtgctggccaacgagcagtatcagccgtgcatgcagggcatcaacctgccaaacaacacctatgcccatatcaccggcgtcgatatggtgcgcaataacgacggtcagtactacgtgctggaggataatctgcgcacgccgtccggcgtctcctacatgctcgaaaaccgtaagatgatgatgcgcctctatccggagatgttcgagcagcatcatattgcgccggtggagcgctacccgagctacctcctgcagaccctgcgcgaaagctcgctggtggatgatccctgcgtcgtggtgatgaccccgggtcgcttcaacagcgcctacttcgagcacagcttcctggcgcagcagatgggggtcgagctggtggagagcgccgatctgtttattaaaaacggcgcggtgtatatgcgcaccaccgaggggccgcggcgggtggatgtgatttatcgccgcatcgacgacgcctggctcgacccgctggccttccgcgccgattcgatgctcggcgtcccggggctgctgtccgtctatcgcgccggcggcgtagtgctggccaacgccatcggcaccggggtggctgacgacaaatcgatctatccgtacgtcccggagatgatccgcttttacctcggcgaacagccgatcctcagcaatatccccacctggcagtgccggaaagcggaggacctgcgctacgtgctgagcaatctcgagctgatggtggtcaaggaggtccatggcgccgggggctacggcatgctggtcggcccgcgttcgactaaagaggagcgagaggccttccgccagcgcctgctggccaatccggccaactatatcgcccaggacaccctcgcgctgtcgacctgccccaccttcgttgatgaagggctgtcgccgcgacatatcgatttacgcccctacgtgctgtccgggcaggagatgcggctggtgcccggcggcctgacccgcgtggccctcaccgaagggtcgctggtggtcaactcgtcgcagggcggcggaaccaaggatacttgggtgatggaggatgacgcatcatgctaa

SEQ ID NO: 138714 - DNA, 831 bp, Enterobacter cloacae
atgaccccccgccacagccagcagtcgcgggatctggcgctaccgctgaatttgtcgatgacccacgagttgtttcaggcgcgccatgcccgctttaccatgagcaatctgctcaacttttttgcccttgatggcaacaacccctgcagtatttacagctgcgtggagatggcgtggaacaatgcgcacgccgtgcgcggcagtctgtcggccgaagtgtgggagagcatcaatgccactcgcattgagctgcgaagcctgcgccagcaggggctgggcgagctggggagcgacggcttttttgagtgggtgaaagagcgggtgcatctgtttcgcggggcggtgataggcacgctgctgcgtaacgacgccctgagttttatcggtatcggcacgctgatcgagcgcgcgttcgccaccacccagctgctgctgattaaggatcaacagctgaccaacgacccggatccggtgcgggaatactaccggctggataccctgctcaatgcggtcagcgcccgcgaagcctacaacagcctctaccgccagccggtcagtcgtgaaacggtgatggagctgctgatcctgcggaacgatattccgcgttcgctgcgcgccagcattgccgacctggtgggcgagctggagaagattgccaacgatcgttcttatcagccgttgcgcctcgcccatcagctcaacgttgacctgcgcttcagcacccgtgacgacctggcgcaggcggacctgcagaccacccttaacgggctgctggcgagaattaacgcgctgtccgacagcatcagacaaacctacctggaggccttatga

SEQ ID NO: 138715 - DNA, 816 bp, Enterobacter cloacae
atgaaactggtcatcgatcatctcacccgctatggctacgatgaagaagtgaagttttccacccagtatctgcgcctgacgccacgcagtaccgcccggcagacgatcaccgcctggacgctgaccctgccgaacggcgcggcggtgaccactaccgacggctggggcaatgtgctgcatgtgctgacgctggataacccgcacaaggagatcaccatccgcgccagcgggattgtcgatatcgccgacgaaggggaggagacgcgtgatgaagaggccgagctgctgtcgccgctggtttttctgcgctgtacgccgctaacccgcgccgatacggcgatccgtgagtttgcccagcgcctctatcgtcccggtgcggcggaagagagtctgaatcaactgatggcggatctgctgttaagaatgccatactcccccggcgcgacccaggtgcaggactccgccgccgacgccttcgcccgcgcgaagggggtgtgccaggatcatacccatgtttttctcgcctgctgccgcgcgctggagatcccggcgcgctacgtcagcggctatgtctacagcgataacgcccagcatgtggcgatgcacgcctgggcggaagtctggctcgacggccgctggctgtcgtttgatatcaccaataatacccgtcgcctgaatcagcatttacggctggcgaccgggctggattatctcgacgcctgcccggtacggggcacccggctgggcggcggcggggagattatgttaactaacgctgaagtgcgcgaacacagccagcaggcgcagcagcaataa

SEQ ID NO: 138716 - DNA, 747 bp, Enterobacter cloacae
atgacctactgtgtggccatgtgcctggcggatggactggtgtttgcttccgactcccgcaccaacgcgggcgtcgaccatattgccacttttaaaaagctgcacgttttccatcaggagggggaacgggtgctggtgctgcaatccgccggcaatctggccaccacccagagcgtgataagcctgctcagcgcgcgcatccgtacccagcaggagccgaatctgatgcaggtcacttccctctacgacgccgcgatgctgatcggtaaaacgctgctggaggtgatccagcgcgacagcagcaaccagcagacctgcagtaacaccaacttcaactgcaacctgctgcttggcggccagatcgccggcgaaacccatcgtctgttccatatttatccggagggcaactttattgaagccacccgcgacacgccttatttccagattggcgaaagcaaatacggcaaaccgatcatcgatcgggtgctgaccatcgacacgccgctggagcaggcgatgtgctgcgcgttgatctccattgattcgacgctgcgcagtaatctgtccgtcggcctgccgctggatacgctgctctaccgcagcggcagcttcagcagtgccgggcagcatcgcatcaccgacagcgatccctacttcaaccgcattcgcaaggcgtggtccgaagggctgttgcacaccttccagactctgccgacctggacgccagcggagcgggaagaggagtag

SEQ ID NO: 138717 - DNA, 510 bp, Enterobacter cloacae
atgggtttgtttgataaattgaaatctctggtttctgatgacaagaaagacaccggaactattgagattgttgctcccctctccggtgagatcgtcaacattgaagacgtgccggatgtggtttttgcggaaaaaattgtgggcgatgggattgccatcaaaccgactggcaacaaaatggtcgcgccggtagacggtaccattggtaaaattttcgaaaccaaccacgcgttctctattgaatctgatagcggcatcgagctgttcgttcacttcggtattgataccgttgaactgaaaggcgaaggcttcaagcgtatcgctgaagaaggtcagcgcgtgaaagtcggcgatccggttatcgaatttgatctgccgctgctggaagagaaagccaagtcgactctgacgccggtggttatctccaacatggacgagatcaaagagctgatcaaactgtccggtagcgtgaccgtgggtgaaaccccggtaatccgcatcaagaagtaa

SEQ ID NO: 138718 - DNA, 240 bp, Enterobacter cloacae
atgaaaagctatcggttagtgatccgccagcagggacgcattgttggtcattttgatacgacaggtgaggcggcgctggaggatgcctgcgtggcgcggtcgctgttcggcctggccggtggatatcagtgcgaactgctggtcgctgacagcgagcggcgaattctggagagcaccccggagggattgcgcgtcttgtcccgcgagaagtgctatcgaccggtaacctgcgcggtataa

SEQ ID NO: 138719 - DNA, 867 bp, Enterobacter cloacae
atgggccagcaggatgatatacaatcagtgctctttcacgacaaaagccgggcgtcggaagtggatatcgtcgccgtgcagtcgcaggtagtctatggcagcgtcggcaacagcatcgcggttccggcgattaaacagcatggtctgcgcgtgctggcggtgccgacggtgctgttcagcaatacgccccattatgagacgttctatggcggcattattccggaagagtggtttgtcgggtatctgcaggcgctggaggagcgcgacgcgctgcgcgaactgcgtgcggtcaccaccggctatatgggcagcgctgtgcaaatcgaacgcctggcgcagtggctgacgcgcgtacgggcccgccatcccgggttgtgcattctggtggatccggtcatcggcgatgtcgacagcggcatctatgtcaaggctgaaatcccggacgcctatcgtcagcacctgctgccgctggcgcaagggatcacccccaatctgttcgaactggagacgctgagcggccagcgctgtcgcgatcggcaggaggcggtcgccgcggcgcgaagcctgctgtcggacaccctcaaatgggtggtgatcaccagcgcgccgggagaggccgattcgacgatcaatgtgctggtggtgacggccgatgcagtggaagtggtggttcacccgcgggtggagacagacttaaaaggaaccggcgatctgttctgcgcggagctggtgagcgggttgctttccggcctggcgctgggggcagcgacgcaggctgctgcccagcgcgtgctggaggtgatgaactggactgccgcccaggggtgtgacgaattgatcctaccgccgctggagcaaagcagatga

SEQ ID NO: 138720 - DNA, 1299 bp, Enterobacter cloacae
atgttagccggaaaaaccgccagcgaaatcttcgataacatccgccatctggtgcagagcggcgggttgcagcccggagaggttctgccgccggtacgtgaactcgccagccagcttgcagtgaatcgcaacactgtcgccgccgcctataaacggctggtgacctccgggctggccgtcagtcagggacgcaacggtacagccattaaagcgcgggacacactgccggcgctggagggaggtgacccaacgaccccgctgaacgatatctccagcggcaatccggatccggccagactgcctgatttaccccgctatctgggccagattgcccgcacgccccgcctgtatggcgatgcgcccatcgagccgcggcttggccaatgggccgaggcgtggtttgccagagagatagccgttccctttgcggtgaatctcgccagcggggcgatagacgccctggagcgcctgctgtgcgctctgctgctccccggcgacggcgttgtggtggaagatccctgttttctcagcagcatcaatatggtgcgttacgccggttttactccctgcccggtggcggtggatgccgaagggatggatcctgacggcctggaggaggcgttacgcaacggcgcacgggcggtgatcttaaccccgcgcgcgcataatcctaccggctgtagcctgacggaaacccgggcgcatgccctgcgggaggtgctagcccgctatccgcaagtactggcgattgttgatgaccattttgccctgctgtcggccacgccatggcactcccctcttcctgcaagcacccaacgctgggcgctggtgcgctcgatgtcaaaaaccctcggaccagacctacggctggcctttatcgccagcgatgccgctacttcagcggcgctgcgcctgcggcttaacgccggcagccagtgggtcagccatctgctgcaggacctgacgctggcctgcctgaccgacgaggcgtttatcgcctcgatgacggagacccgtcgtcactatcgccagcagaatgagaaactggcggcggcgctggcccggtacggctacagccatgctacgccaggggatggcctcaatttctggctgccgctgccagcggcgagccagccctacgccttacgcctggcccgcgccggctggctggtccgggagggagaggtgtttggcatccgtacgccctcccacgggctacgcctgtcgctgggccgtctgagtgacgctgagatttcccgcctggcggccgatattgcgcaggccttagacgccccctga

SEQ ID NO: 138721 - DNA, 396 bp, Enterobacter cloacae
atgcatcaccctgacccggcactgaaagcggtcattgaagcctgcgatcgcgctatctcgcaggaagattacgataccctgatgagttattacgcagaagacgccgcgctggtcgtcaaaccgggcatggtggtcagagggaaagagaatatccgcaaagcctttatcgccattgccgactatttccagcaccgactggtggtgactcaagggaaaatggaggttattgaaggcggcggcaatgcgctggtgattatggagacccggctggatatcccgacggcggacgggatatcccaggtcacgcgacgcgccacctatgtctttcagaagcagggcgaacgctggctgtgcaccgtcgataactcctacggcaccgacctgcttgatgattaa

SEQ ID NO: 138722 - DNA, 912 bp, Enterobacter cloacae
gtgaatacactcgaacaaaccatcggcaatacccctctggtcaaacttcagcgtctgggaccggacaacggcagcgaagtctgggtcaaactcgaaggcaataatccggccggctcggtgaaagatcgcgccgcgctgtcgatgatcgttgaagcggaaaagcgcggcgaaattcagcccggagacgtgctgatcgaagcgaccagcggcaacaccggtattgcgctggcgatgatcgccgcgctgaaaggctaccggatgaagctgctgatgcccgacaacatgagccaggagcgtcgggccgcgatgcgcgcttacggcgccgagctgatcctggtcagcaaagagcaggggatggagggtgcccgcgacctggctctggagatggcccagcgcggcgaaggcaaactgctcgatcagtttaacaacccggataacccctacgcccactacaccaccaccgggccggaaatctggcagcagaccgcggggcgtatcacccactttgtctccagtatggggaccaccggcaccattaccggcgtgtcacgttttctgcgtgaacagagtaaaccggtgaccattgttggcctgcagccggaggaggggagcagtattcccgggatccgccgctggccggcagagtatatgccggggatctttaacgcttcgctggtggatacggtgctggatattcatcagcaggatgccgagaacaccatgcgtcagctggcggtgcgggaaggcattttctgcggcgtcagttcgggcggcgcggtagcgggcgcgttacgcatagcccgcgaaaatcctggcgcggtggtggtggcgatcgtctgcgatcgcggcgatcgttacctttccaccggcgtgttcggcgaagaacactttagccagggggcgggcatttaa

SEQ ID NO: 138723 - DNA, 1095 bp, Enterobacter cloacae
atgagcattgagattgccaatattaagaaatcgtttggtcgcacccaggtgctgaatgatatctcgttggatatcccttccggacaaatggttgcgctgctggggccctcgggctccggaaaaaccaccctgctgcgaattatcgccggtctggagcatcagaccagcggtcatatccgcttccacggtaccgacgtcagtcggatgcacgctcgcgaccgtaaagtgggcttcgttttccagcactatgcgctgttccgccatatgacggtgttcgataacatcgcctttggcctgaccgtgctgccgcgccgcgaacgccccaatgcggcggcgattaaagccaaggtgaccaaactgctggagatggtgcagctggcccatctggcggatcgctatccggcgcagctgtccggaggccagaagcagcgcgtggcgctggcgcgcgccctggcggtggagccgcaaattttgctgctggatgaacctttcggtgcgctggatgcgcaggtgcgtaaagagctgcgccgctggctgcgtcagctgcatgaagagctgaaattcaccagcgtgttcgtcacccacgaccaggaagaggcgatggaagttgccgaccgggtggtggtcatgagccagggcaacatcgaacaggccgatgccccggatcgcgtatggcgtgagccgtctacccgtttcgtgctggagtttatgggggaagtgaaccgcctgcagggggtcatccgcggtggacagttccacgtcggcgcccaccgctggccgttaggctataccccggcataccaggggccagtggacctgttcctgcgcccatgggaagtggacatcagccggcggaccagcctggattcgccgctgccggtgcaggtcctggaggccagtccgaaagggcactacacccaattagtcgttcagcctctggggtggtatgacgaaccgctgagcgtggtgttaacgggcgacgaggcgccgtcccgcggcgaacggctgttcgtcgggctgcaaaacgcgcggttgtacaacggtaccgagcgtatcgagccgcgcggcgagcttgctctggcggagtcggcctga

SEQ ID NO: 138724 - DNA, 876 bp, Enterobacter cloacae
atggcggaagttactcaattgaaacgctacgacgcgccccgtatcaactggggaaaatggtttctgattggcgtcgggatgctggtctccgccttcatccttgtggtgccgatgctctacatctttatccaggccttcagcaaaggattgatgccggtgctggaaaacctggcgaacccggacatgctgcatgccatctggctgacggtgatgattgcgttgattaccgtaccggtgaacctggtgttcggtaccttgctggcctggctggtgacacgttttacctttccggggcgccagctgctgctgacgttgctggatatcccgttcgccgtctcgccggtggtggccggtctggtgtatctgctgttttacggctctaacggtccgctgggcggctggcttgacgcgcataatctgcaaatcatgttcgcctggccgggcatggtgctggcgaccatctttgttacctgtccgtttgtggtgcgtgagctggtgccggtgatgatgagtcagggcagtcatgaagatgaggccgcggtgctgctgggcgcgtccggctggcagatgttccgccgggtgacgttgcccaatattcgctgggcgctgctgtacggcgtggtgctgaccaacgcccgcgccatcggcgagtttggcgcggtgtcggtggtttccggctcgatccgcggcgaaacgctgtcgctgccgctgcaaattgaactactggagcaggattacaacaccgtcggctcgtttaccgccgccgccctgctgacgttaatggctattctgaccctgtttttaaagagtatgttgcaatggcgtctggccaatcagaaagaacgcgcgcaacaggagggaaatcatgagcattga

SEQ ID NO: 138725 - DNA, 630 bp, Enterobacter cloacae
gtggcctcgatttttaacggcgtctttggtctgctgatggcctggatcctgacccgctatcgttttccgggccgcacgctgctggatgccttaatggacctgccgtttgcgctgccgacggcggtagccggtctgaccctggcctcgctgttttcggtgaacggtatttacggggaatggctggcgaagttcgatattaaagtcacctatacctggctcggcatcgccgtggcgatggccttcaccagcatcccgtttgtggtacgcaccgtgcagccggtgctggaagagttggggcccgagtatgaggaagcggcggaaacgctgggcgccacgcgctggcagagtttccgcaaggtggtgctgccggagctgtcgccggcgctgctggcgggcattgctctgtcgtttacccgcagcctcggcgaattcggcgcggtgatttttatcgccggcaacatcgcgtggaagacggaagtgacgtcgctgatgatctttattcgtctgcaggagtttgactatccggcggcgagcgccatcgcctcggtgatcctggccgcctcactgctgctgctgttttccatcaataccctgcagagtcgctttggtcgacgcgtggtaggtcactaa

SEQ ID NO: 138726 - DNA, 552 bp, Enterobacter cloacae
atgacaaagcagcccgaagactggctcgacgacgtgcccggtgatgacgttgaagatgaagatgatgaaatcatctgggtcagtaagagtgaaattaagtgcgacgcggaagaactgaagcgtcttggcgcggaactcgttgacctggggaaaaacgcgctggataaaattccgctggataccgacctgcgcgacgccatcgaactcgcccagcgaatcaaaaaagagggtcgccgccgccagctacagcttatcggcaagatgctgcgcaaccgcgatgtcgatccgattcgtcaggcgctggacaagctgaaaaaccgtcacaaccagcaggttgcgctgttccacaagctggagcagatccgcgaccgactgattgacgacggggatgacgccgtcgctgaagtgctgaacctgtggccagatgctgaccgtcagcagctgcgttcgctgatccgcaatgcgaagaaagagaaagaaggcaacaagccgccgaaatcggcgcgcctgatcttccagtatctgcgtgaactggcggaaaacgaaggctaa

SEQ ID NO: 138727 - DNA, 1209 bp, Enterobacter cloacae
atgaaaaagacattggttctgacgacgatcgccctgctggtttctggctcggccgcggcaaaaacatgggtgctgacgaacgctgaagaggggatggataaaggaaactggcagatcaacagcgatcagctgaaggtgaaagatcatgcgttcagcattgagcagaaagtcctgcacggcggtaagcaggaaggcagcaaaatccttaccattcacagtaaagacggcctgaccattaccctgagcccgacacgcggcatgaacttactgcgtattgagggtttcggcagccggatgggctgggattcgccggttaaagaggtcgtcaacccggcgtttatcaacctggaaagccgcaatggcctcggctggctggaaggattcaacgagatgatggtccgctgcggctatgaatggaccggccatccggtgaccgcggacgggcaaatttataccctacacggcaaggcgggcaacacgccggcctctctggtggaggtggaggtggccgacagcgcgccgtatgaaatccgcatccgcgggctggtgaaagagagcacctttaaaaaagccgatctgcagaccctgaccgaactgcgctacgtgccgggcagcaacagcttcagcttacatgacgtcttaaccaaccatgccgactatccgcatgattatcagatcatctaccacagcaacttcggcaccccgatcctcgaagaaggcgcgcgtttcctcgccccgatgtccagcatcagcccgttcaatgattacgctaagagtgggttaaaaacctggcaaacctatcagggaccgaccaaagattttgacgagatggtatttaatattcagcccctggccgatgaaaatcaccagaccctggccgccgtggtcaacaaagcgggcgataaaggggcctctattcagtttgatacccgtcagctgccggtcctgacgctgtggaaaaacaccgataccgtcaagcagggctacgtcaccggtatcgaaccggggaccagctacgcctatccggtcaccattgaacgcaaacaaaaacgcgtgaaacagctgcagccgggcgccagcgcgcagtttgatctaacctacaccctgctgcacgacagcgcccaggtagccaccgttgagcagaaaatcgctaagattcagggcgataacaaagtcgcggagaacgagacgccgatcgccaaagagtaa

SEQ ID NO: 138728 - DNA, 528 bp, Enterobacter cloacae
atgctgacctgcgaaagcgtacgttctaccgactcgccccatttcgccatgctggacgcgctttacgcgcgcgcctttccgtggcacgagcagcgcgaaagcgaggccaaacgtcaggcgctgagccacccgcgctacgcgctggaagcatggttcgatgaaggcgtctttgtcggcctcagcggctgctggcagtttgccggctacggttatatcgaacatctggcgatcgacgacacgctgcgctcccgcggctatggtaaacagctgctggcgcagatcctgacgcgcgccccgctgaccattctggaaatcgatccgctaaccacggccatcgcccataaacggctgcgcttttatcagtcgatggggttccatgctaatccctgggcgcatcatcacccgagctatcatcagggcattgcggatcatgagctgctggtgctgagctacccgcagccgatcgatgagcggcagtatcagcagtttgcccgggatctcgggcacgaggtgatggggcgggagtag

SEQ ID NO: 138729 - DNA, 1374 bp, Enterobacter cloacae
atgcgcattcatattttaggaatctgtggcacgtttatgggggggctggccatgctggcgcgctccctcggtcatgaggtaacggggtcggatgctaacgtctatccgccgatgagcaccctgctggaaaaccaggggattgatttaattcagggctatgaccccagccagctggagccccggccggacctggtgattatcggtaacgccatgactcgcggcaacccgtgcgttgaagcggtgctggaaaataatattccctatatgtccggcccgcagtggctgcacgacttcgtgctgcgcgatcgctgggtgctggccgtcgccgggacccacggcaaaaccaccactgccggcatggcgacctggatccttgaagcctgcggctataaaccggggttcgtgattggcggcgttccgggcaatttcgacgtctccgcgcgcctgggcgacagcccgttcttcgtcattgaagccgacgaatatgactgcgccttcttcgacaagcgctccaagtttgttcactactgcccgcggacgctgatcctcaacaaccttgagttcgaccacgcggacatctttgatgacctgaaggcgattcagaaacagttccaccatctggtgcgcatcgtgccgggcaaaggcaaaattatcctgccggagaacgacatcaacctgaagcaggtgatggcgatgggctgctggagcgagcaggagctggtgggcgagcagggccactggcaggcgaaaaaactgaacgccgacgcctcgcagtgggaagtcttactcgacggcgaaaaggtcggcgaagtgaagtgggcgctggtcggcgagcataatatgcataacggcctgatggcgattgccgcggcgcgtcacgtcggcgtgctgccggcggatgccgcgaacgcgctgggcagctttatcaacgcccgccgtcgcctggagctgcggggcgaagccaacggcgtcaccgtgtatgacgatttcgcccatcatccgacggcaatcctcgccacgctgcaggcgctgcgcggtaaagtaggcggtaccgcgcgcattctcgccgtgctggagccgcgctctaacaccatgaaaatgggcgtctgcaaggacgatctggcgccgtcactcggccgcgccgatgaagtgttcctcctgcagccgcagcatattccgtggcaggtggcggaagtggcggaagcctgcgtccagccggcccactggagcgccgacgtcgataccctggcggagatggtggtcaaaaccgcccacccgggcgaccatatcctggtgatgagcaacggcggcttcggcggtattcatcagaagctgctggataagctggcgcaaaaagcggccgcggctgaataa

SEQ ID NO: 138730 - DNA, 999 bp, Enterobacter cloacae
atgaaaacgttaggtgagtttattgttgaaaagcagcacgagttctcccacgccaccggtgagctgactgctttgttgtcagcaataaagttgggcgccaagatcatccaccgcgatatcaacaaggccggtctggtcgatatcctgggtgccagcggtgctgaaaacgttcagggcgaggttcagcaaaaactcgatctgttcgctaatgaaaaattaaaagccgcactgcgagcacgcgatattgttgccgggattgcctctgaagaagaagatgagattgtcgtcttcgaagggtgtgaacacgccaaatacgtggtgctgatggatcctctggatggctcctctaacatcgacgttaacgtctctgtcggtacgatcttctctatctaccgccgcgtgacgcctgtcggcacgccggtgacagaagaagacttcctgcagccgggcaacaagcaggtggccgcgggctatgtggtctacggatcgtcgacgatgctggtgtataccaccggctgcggcgttcacgccttcacctacgacccgtcccttggcgtcttctgtctatgccaggagcgcatgcgcttcccggagaagggcaatacctactccatcaacgaaggcaactacatcaaattcccgcagggcgtgaagaagtacattaagtactgtcaggaagaggacaaagcgactcagcgtccttatacctcacgctatatcggctcgctggtggcggacttccaccgcaacctgctgaaaggcggcatctatctctatccgagcaccgccagccacccggaaggcaagctgcgcctgctgtatgaatgcaacccgatggccttcctcgccgaacaggcgggcggtaaggccagcgacggtaaagagcgtattctggatattatcccggaaagcctgcatcagcgtcgctccttcttcgtcggcaacaaccacatggtagaagacgtcgagaactttattaaagcgttcccggacgcctaa

SEQ ID NO: 138731 - DNA, 999 bp, Enterobacter cloacae
atgataaaacgtaatttaccattgatgatcacccttgcggtgtttgtgctgggctacctctactgcctgacccagttccccggttttgcctcaacgcgggtgatctgcaatatcctgacggataatgccttcctcgggatcatcgccgtgggcatgacctttgtgatcctctccggcgggatcgatctgtcggtggggtcggtgatcgcctttaccggcgtcttcctcgccaaagcaattggcttttggggaatctcgccgctggtggcttttccgctggtgctggtgatgggctgcgccttcggcgcgtttatggggctgctgattgacgccctgaagatcccggcctttatcatcaccctcgccggcatgttcttcctgcgcggcgtgagctatctggtgtcagaggagtcgattccgattaaccacccagtgtacgacaccctgtccgggctggcatggaccattcccggcggcggtcgtctcagcgccatgggactgctgatgctgctggtggtggtggccggtatttttgtcgcccatcgcacccgctttggcaaccaggtgtatgccatcggcggcaacgccacgtcggcgaatctgatggggatttcgactcgcagcgccacgatccgtatctatatgctctccaccggactggcgacgctggccgggatcgtcttttccatttatacccaggcgggctatgcgctggcgggcgtcggcgtcgagctggatgcgattgcctcggtggtgatcggcggtacgctgctcagcggtggcgtcggtaccgtgctgggaacgctgttcggggtggcgatccagggactgattcagacctacatcaacttcgacggcaccctcagctcatggtggacgaaaatcgccatcggcattttgctgtttatctttatcgcgctgcagcgtgggctgaccgtgctgtgggaaaatcggcagaatgcggcggtgacgcgggtgagcggggcggggagtcgctaa

SEQ ID NO: 138732 - DNA, 1266 bp, Enterobacter cloacae
atggccttcttcctcgaatccacctttgtaggtctgttcttcttcggttgggatcgtctgggcaaagttcagcacatggccgtcacctggctggttgcgctgggttccaacctctccgcgctgtggatccttgtcgccaacggctggatgcagaaccctatcgcatcggacttcaacttcgaaaccatgcgtatggagatggtcagcttctctgaactggtgctcaacccggtcgcccaggtgaaattcgttcacactgtggcgtcgggctatgtcaccggcgcgatgttcatcctggcgattagctcctggtacatgctgaaaggtcgcgacttcgcctttgccaagcgctcctttgccatcgcagccagcttcggtatggcggcgatcctctccgttattgtgctgggtgacgaatccggttacgaaatgggtgacgtgcagaaaaccaaactggcggctatcgaagcagagtgggaaacccagcctgcgccggcggccttcaccctgtttggtattcccgatcagaatgcgcagaccaaccactttgcgatccagatcccctacgcgctgggcatcattgctacccgctcggtggataaaccggttatcggcctcaaggatctgatggttcagcacgaagagcgtatccgtaacggcatgaaagcctacgcgctgctggaacagctgcgcgccggttcaaccgatcaggccgtgcgtgaccagttcaataacgtgaagaaggacctcggttatggcctgctgttgaagcgctataccccgaacgtcgctgacgccacggaagagcagatcgccaaagcgaccaaagactccattccaagcgtcgcaccgctgtacttcgccttccgtatcatggtggcgtgcggcatcctgatgctgctgattataggcgcctccttctggagcgtgatccgtaaccgcatcggcgagaaaaaatggctgctgcgcgccgcattctacggcctgccgctgccgtggattgccgtggagtcgggctggtttgttgccgaatacggccgtcagccgtgggcgattggtgaggtcctgccgacggcggtggctaactcatcattaaccgcgggcgatctgatcttctcaatgttgctgatctgcggtctgtacacgctattcctggtggctgaactgttcctgatgttcaagtttgcccgcaaaggacctagcagcctgaaaaccggccgctatcactttgaacagtcctctgcggctattcagtcggcacgctaa

SEQ ID NO: 138733 - DNA, 1140 bp, Enterobacter cloacae
atgatcgattatgaagtattgcgttttatctggtggctgctgattggcattctgctgattggttttgccgtcgccgacgggttcgacatgggggtgggcatgctcacccgcttcctcggccgcaacgacaccgagcgtcggattatgatcaacgccatcgccccgcactgggacggtaaccaggtgtggcttatcaccgccggcggcgcgctgttcgctgcctggccgatggtttacgccgcggcgttctctggcttctatgtggcgatgattctggtgctggcctcgctgttcttccgtccggtcggttttgactaccgttccaagatcgaggacacccgctggcgcaacatgtgggactggggcatcttcatcggtagcttcgtgccgccgctggtgattggcgtggcctttggcaacctgctgcagggcgtgccgttccacgtcgatgaatacctgcgtctgttctataccggtaacttcttccagttgctgaacccgtttggtctgctggccggtatcgtcagcgtggcgatgatcctgactcagggcgccacctacctgcagatgcgtaccgtaggcgaactgcacctgcgtactcgcaccgtttccatggtggcggcgctggtgacgctggtctgcttcgcgctggcgggcgtgtgggtctactacggcatcgacggctatgtggtgaaatcggtgattgaccataccggcccgtctaacccgctgaccaaggaagtggtgcgtgaagctggcgcgtggatggtgaactttaacaatatgccagcgctgtgggcggtgcctgccctgggcgtggtgttgccgctgctgaccgtcgtttcgaccaaagcggataaaggtgcctgggcattcctgttctcctcgctgaccctggcctgcatcattctgactgccggtatcgcgatgttcccgttcatcatgccgtccagcactatgctgaacgccagcctgacaatgtgggacgcgacctccagtcagcggacgctgaacctgatgacctacgtggcgattgttttcgtgccgatcattctggcctacaccagctggtgttactggaagatgtttggccgcatcacgcgcgaagacatcgaaaagaatacccactcgctgtactaa

SEQ ID NO: 138734 - DNA, 291 bp, Enterobacter cloacae
atgaaatttatcgctactctgtacgcgataatggacaagcgcccgctccgggcgctttccttattgatggcgctgctgctggctggctgcattttctgggatccgtcgcgctttgcggcgaagaccagcgagctggaaatctggcatggtttcttgctgatgtgggcggtttgcagcggcgttattcacggcgtgggctttcgcccgcgtgccgttcactggcaggggattttttgtccgcttatcgctgatatcgtgctcgctttaggtctcttctttttcttcttttga

SEQ ID NO: 138735 - DNA, 405 bp, Enterobacter cloacae
gtgaatacaacgctgtttcgatggccggttcgggtctactacgaagataccgatgccggtggtgtggtttaccacgccagttacgtcgctttttatgaaagagcacgcacagagatgctgcgccaccatcactttagtcaacaggtgctgttggctgaacgcgttgccttcgtggttcgcaaaatgacgctggagtattttgcccccgccagactcgacgacatgctcgaagtccagacggaaattacctcgatgcgcggcacctctttggttttcacgcagcgaatcgtcaacgccgagaatacagtgttaaacgaagctgaggttctcattgtgtgcgttgatccactcttaatgaagccacgtgcgcttcccaagtctattgtcgcggagtttaagcagtga

SEQ ID NO: 138736 - DNA, 693 bp, Enterobacter cloacae
gtgactgacatgaatatccttgatttgttcctgaaggcgagccttctggtaaaacttatcatgttgattttgattggtttttctatcgcttcctgggctatcattattcagagaacgcgtatccttaactcggccgcgcgtgaagctgaagcgttcgaggacaaattctggtccgggatcgagctctctcgtctgtaccaggagagccaggggcgtcgcgataacctgaccggttcggaacaaatcttctacagcggtttcaaagagtttgcacgcctgcatcgggctaacagccatgcgccggaagcgattgtcgaaggggcatcgcgcgcgatgcgtatttcgatgaaccgcgaactggaaacgctggagacccatattccgttcctcggcaccgtaggctcgatcagcccgtatatcggtctgttcggtaccgtctgggggattatgcacgcctttatcgcccttggcgcggtgaagcaggccaccctgcagatggtggcgccaggtatcgccgaagcgctgatcgccaccgcgattggtctgttcgccgcgatcccggcggtcatggcgtataaccgcctgaaccagcgcgtgaacaagcttgaactgaattacgacaactttatggaagagttcaccgctattctgcaccgtcaggcctttaccaccagcgaaagcaataaggggtaa

SEQ ID NO: 138737 - DNA, 429 bp, Enterobacter cloacae
atggccagagcacgtggacgcggacgtcgcgaactgaagtccgagatcaacatcgttccgctgctggatgtcctgctggtgctgctgctgatctttatggcaacggcgccgatcattacgcagagcgtggaagtcgatctgccggacgccacggaatcgcaagcggtgaaaagcaatgacgatccgccggtgattgtggaagtctccggggtagggcagtacagcgtaaaggtggggcaggagacgctgtcccagctgccgccggagcaggtaattgccgaagcgaagcgtcgtcttgaagccaatgaaaaaacggtattcctgatcggcggtgcgaaagacgtcccttacgatgaaattattaaagcgctgaacctgttgcatagtgcaggggttaaatcggtcggcttgatgaccaaacctatttaa

SEQ ID NO: 138738 - DNA, 1314 bp, Enterobacter cloacae
gtgtcaaaggcaaccgaacaaaacgacaagcttaaacgagcgatcatcatttcagtcgcgctgcacatcattctgatcgcgctgctgatctggagttcgtttgacgagcatctggatgcctctgccggcggcggcggcggatcgtcgattgatgccgtcatggtcgatccgggggcggtggtaaataactataaccgtcagcaacagcagcaggccagcgcacgtcgcgccgctgaacagcgtgaaaaacaggcgcagcagcaggcggaagagttacgtgagaaacaggcggcggaacaggaacggctgaaacagctcgaacaggagcggctgcaggcgcaggaagcggcgaaagaagcgaaggagcagcagaagcaggctgaagaagcggctgccaaggccgccgcggcggcaaaagccaaagcggacgcacaggcaaaagaagcgcaggaagccgctgccaaagcggccgccgaggcgaaagcgaaggcggatgcccaggcgaaagcggcagaacaggcggcggccaaggcggctgctgacgcgaagaagcaggccgaagccgctgcagcgaaagccgctgccgaggcgaagaaacaggcggaagctgaagcggcgaaagctgcggccgaggcgcagaagaaagcggaagcggcggctgcgaagaaagcgcaacaggaagcggagaaaaaagcccagcaggaagcggctaagcaggcggcagctgaaaaagcggctgccgaaaaagccgctgcgcaaaaagcggccgctgagaaggccgccgccgagaaagccgcagccgctgaaaaagcggcggcagcgaaagcggctgcagcagagaaggctgcagctgataaagcggccaaagcggcagcagcaaaagccgcggcggcgaagaaagcggcggctgcgaaagaagcggacggcgttgacaacctgctcggcgatctgagttctggtaagaatgcgcctaaaacaggcggtggggccaaaggaaacaatgcctccgctgccgggagtggtaatactaaaaacagtgcctcaggggctgatatcaacaactatgccggacagataaaatcggcgattgaaagtaagttttatgacgcatcgtcctatgcgggcaaaacatgtaccttgcgtatcaaacttgctcctgacggtctgttgttaaatatacagtccgaaggtggtgatcctgctctgtgccaggccgctcttgccgcagcccgacaggctaagtttccgaaaccacctagccaggcagtatatgaagtcttcaaaaatgcgccactggacttcaaacctcagtga

SEQ ID NO: 138739 - DNA, 555 bp, Enterobacter cloacae
gtgaaccaggaactggttgtaaccatcgtagtcggacacgcgcagttcgtaagggtactggccgccgtttttctgcaccacgtaggcgatacgggtacggaaggcgcccttgatgccggtcagcttctcaaataccgcgtcgctggccgcgtgcgccgcatagcgcaggtactgcttagtgactttaaaagaaccttgcgccagcgttgtgcccggcgctccgccggtgtccaccagttgatacgcaacctgataagaaccatccggattttgcgtgacctggccgacgactacggcgtcaatacccagcgcagaccaggcagcaggctgcacttcctgggcactggtcggctgctgcggcagacgagagcgatccagcggattgaatttaccgctgttgcgcaggtcagctgccacgataccaccgacatcttccggcgcagcgccctggccggcccactggaacggtaccacgccgatagggcgcgccgagtccaccccctgggtgatctcgatacgtacttctgcgtgcagcaccgccgcccacagcattaa

SEQ ID NO: 138740 - DNA, 2844 bp, Enterobacter cloacae
atgcttgagatatatgccattgctggcggcgactggttacggggcaacctgaacgcgattgcggcgtttatggggaccagcacatggtcgactatagaaaagatgtgtatcgccatctcggtactcattgtggcggggagctgggtaaaaaaacacaacgtgatggaccttattggctgggtcttttccctcaccctggtctctatgctggttgtcattcgcacccctgtgcagatcatcgattacagtaacgtggcgcaggtctatgaagtcgataatgtacctattggtctggccattcctgcgtcgctgacaacgcgggtgggaaacgcgcttatccagagttatgagatggtcttcgcgctgccggacagcgtcacgtacagtaaaacggggatgttatttggcagtaatctggtcgcgaaaagtacggattttttatcacaaaatcctcagattacgacgctgttttccgattacgtacaaaactgcgtgatgggcgatattttcctcaatcataagtactcttttgaggaattactgaattcacctgatccgtatacactgatttttgcaaacccaagcccactgcgtggcgtgtttgataaaaacaaccagttccagacatgcgaggaggcctcacgggatctgaaatcggctcttgcgctggatactcagacagggggtaaaacctggaactactatgttcgtcagctgtttggtggcaaacctaatcccgatctgcttttcagccagatgattggcgacagctacaattacttctacagctcgggacagagcgccgggcagattatccgccagaacgtcacgatgaacgccctgcgcagtgggatccagagttatgcggcccgcagcggggacaccgccagtctggtcaatatggctaacacatcatcccttgaaaagcagcggctggcgcaggccacaatggggcaccaggcgcttcgcacacttccgctgatgcagaccgttatcatggggataatgattgggatgttcccgatcatggtgatggctgccatgtttaacatgatgacgatgcaggtgcttaaggggtatgtgtttgcgcttatctggctgcagacgtggccattactgttcgccatcctgaacagcgcgatggcctactatgcgaagcaaaatggcgtgccggttgttctctctgagttgtcgcaggttcagctcaaaaactcggatattgcgaccaccgcgggttatattgccgtgatgataccgcccttgtcgtgggggatcgtgaagagcatgggggccgctttctccagtgcctacagccatttttcttcttcggggctcagtgcaacatcgcaggcggcctccggcgtggtggacgggaattactctttcgccaacatgcagatggagaacgtcagcggctacagctggggtaccaacagtacaaccagtttcggacagatgtcgcggcagctggcgaatgggggtatgagcacgcagacgcgggatggatcgatggtctgggacagtggtggtgcaatgtcaaaactgccggtggatatcaacgtcggtcgtcagatagccagtgcgcagcaacagatggcccgtgaggctgatgtccaggccgaaagcgcgctgcatggctataacagcagcgtgacaagtgcctggaatagtctgcagcaatttggcaccaataaagggaacagcgcctcaacaacgaccggagctgatactaccgagtcttcacaggatttgatggccagaagcaagatgtggaatgcggttgttgctaatgcgaaagccaacaacatcagtaatgaggagtctttccagcagttgatggatgagtcaagaaaaagaacaatatcgggtgagttgtatggcggtgctaaaattgactcttctgatgcagctcttggtaaattaggaagctgggttaccggaggcagtatatatggaggtattaaggtggcagctagtggagccgccactacggggtcaacggataatgttgggcgatcaggtaggcattcagaagacaatcgccatgatatcagtagtcaggcggcgaaagactttaaagaagcttcggattactttaccagtcgcaaaaccaccacatcgggtaattttaccgataataatgccagctcgcgtgttgaccagtttgccgcgtcactctccagtgccaaaaacagctatgaccagtatacaaccagccggacacgcagccatgagtacagtgagatggcgtcacgcacagagagcatgactggccagatgagcgagaatctcactcagcagtttgctaactttgttcagcgtcgcgctccacaggatgccgaggccattctgaccaataccagttctcctgaaattgcggcgcagcgtgaagccctggcgcgtgaattcgtcaaagagcaggtagaacccagggttgatgctgcatatcaacaggggcgtgaaagcatcggacagaatatgacaggggtgtcaggaggtggagacaatggttcggtaatggccgactacggacataattccgcccgtatcgatgcgatgacgcaacgggcagatattaaggataatgtgggtcagaaagtggatgggatgattacagagaataaacaacagcatcagaaaacccgtgaaaacatacaacagcaaggtgttgaggtgaaaaaagagaatgctgacctggaaaaagaccacaaaacaaaacaaaatgatttcaaaaattcttataatgataagaacgaacatcaaaccagactgcctggcgcggattcaactaaagagctactggataaagcaaccaaattagaaaacgagaaatcaaagagatag

SEQ ID NO: 138741 - DNA, 534 bp, Enterobacter cloacae
atgttaacccatcaaataatacaaagtgaagttgaagagttaaaacggattcttacagagagagatttgacgatcccctcgttctggagttgtatctggcccggattggcatgtatgttatggtttcttctttcatcatattttccgtactggctcagtgattatgcatctgggattgataaaattactgttacggtttttgcgggtgcgatgggtttctttttcatcgtagtgacagctaaagctcgatcttattttctatcgctgcctgaatcattccggaagcaatcaaaatttgttaactttctgctggctaaatgtaaggtgtatgggggtagcatcttattaatgtttacatgtttatcgttttattgttcattcacttatatagattctattgttttttgtgtaataacatttttttacataatagttacggtcatggtgatgaatattgatcttggtcgctatcagttagctaccctgatgtctgttgttgaatcggttagaaataaaggcgttaaactgcagtag

SEQ ID NO: 138742 - DNA, 732 bp, Enterobacter cloacae
atgaagcttaataaagtcatggctgttatggtcgtcagctctgcgctggtgttatctggatgtagtgcaatgggaaccgccattaaaaagagaaatctggaagtaaaaacccagatgagcgaaacaatctggctggaaccttcaaataataagacggtttatctgcaaatcaaaaatacctccgataaggatatgagtggcctgcaggcaaaaattgccagcgctgtcacttcaaagggatatcaggtcgtcagtaaccccgatacggcgggctactggatccaggcgaatgtgctcaaggccgataaaatggacctccgtgagtctcagggctggttaagccggggttatgagggcgctgtgactggcgccgctcttggggcggggattaccgcttacaactccagttccgcgggagcaaccctgggagtagggcttgcagccggtctggtcggaatggcggctgacgcgatggtggaagatgtgaactacaccatgatcaccgatgttcagatcgcggaaagaaccaaaacacaggttcagactgataacgtggccgtattacgtcagggaacatccggagcaaaagtgcagacaagtactgaaacgggtaatcagcataaataccagactcgcgtcgtctctaacgcgaataaagttaacctcaagttccctgaagcccagcctgttcttgaagaccagctggcaaaatcgatcgctaatatcctgtaa

SEQ ID NO: 138743 - DNA, 690 bp, Enterobacter cloacae
atgacaatatctgagcctgtcaggtctcttgatacacatgaactgatgcctggcgatatttacccacatcctgcagcggggggaattgattccctgtcacatcgcgaggtctgttctctcttcagtgaccacatcatgtatatctgcagcgcgttagttattcttctgcttgttttcatcgcaggtgtctttttccgaaaaataatgacgtcttccgtggagcgtaagcgaaacacggcgtcagttatttccgatgcaaagccagaagtacagagcaaaccggaatacttccatctttccatatgtgtggaaggcccggccagcacggatgactccgccttgtcctctcttgcctcccgtgttgtccgcgaagcagaaaatctgtatatccccggcgtcaatcgccgcgacagcgctgacgacgtgtttgcctggtccgtgcagactcagtttccttctgacaggctcttcggcacacggattttcccgtcaaccggctggtttgaacgtccggatatgattaaacatccggtgaaatgctactgcgtctgcctgcagtacacgactgaaacattgccatccacactgtatgccctggtcgatgaggccggacggcaggtggcgaagtcgtatattaaaggcgggcactgccctggctcagagggctataccttctgcataacctcttaa

SEQ ID NO: 138744 - DNA, 300 bp, Enterobacter cloacae
gtggaggcagaagttctggatttcggagtttttaagaataggcagatcgccaattttaatatcggaggccataccatcacgcttcatctggcgggccacttctttgggcttatcggaaagctggcgcccgccggtattctcatcctcactctgctgtttcccctggcggcccagcacccaactggcgatgaagaacgtcacgatacagataacaagagaaaccacggctgcaaagacgaaactggtccacagctgctctccgcaccagatagtatatttatcggccaggatttgttctga

SEQ ID NO: 138745 - DNA, 198 bp, Enterobacter cloacae
atgttctatcttatttttatcgaagggaccatcaggactacctacaggatactcttttgcaataaacgctcttttctgacaggtaatctgcacagtatgtatattatcctcacccttatcattaaccggttttgtctgcgcctttgtctcaaaataacaaacattttcacgcttatttttagaatatgcttgccctga

SEQ ID NO: 138746 - DNA, 441 bp, Enterobacter cloacae
gtgcagcgcgttgccccgaacgtcatccgccttgacagcatgtcgctattcgataccgggaaatgggtactgaagcctggttcgacaaagcggctggtcaactcgctgatggacattaaggccaggcccgggtggctgatcgtggtggcgggtcacaccgacagcgtgggtgaggaaaaagccaaccagctattgtcgctgaaacgtgcggaatcggtccgcgactggatgcgcgataccggcgacgtgccggacagctgctttgccgttcagggctatggcgaaagccgaccaattgcaacaaacgatacgccggaaggccgtgcgctgaaccgtcgtgtcgaaatcagtctgatgccgcaggtagacgcctgccggttaccggaccaaccctctgcgtcatcccaggatgatggcgcttcactacacaatggagagtaa

SEQ ID NO: 138747 - DNA, 765 bp, Enterobacter cloacae
atgatcgacaagctcggcaccgacaaaatgccgttcttcttcaccatgaaggggcgcaccgacgcgatgctggagaaagtctcgctgtttaagccgcactttaccgaccgctttatgcagaagctcggccacgtctttccggcgcatttaccggagcggatgaaaacctggcgtgataaatatgaacatcatctgctgctgaagatggctggcgacggcatcgaagaagcgcagcgttggctgacggagtacttccagcaggccgagggggatttcttcgcctgtacgccggaggaaggcagcaaggcgttcctccatcgctttgccgccgccggcgcggcgatccgctatcaggcggtgcatgccgacgaagtcgaagatattctggcgctggatatcgccctgcgccgtaacgataccgagtggttcgaacatctgccgccggagatcgacagccagctggtgcataagctctactatggccactttatgtgccatgtgttccatcaggattacatcgtcaggaaaggggtcgacgcccacgcgctgaaggaaaaaatgctggagttactgaaagcgcgcggcgcccagtatccggcggagcataacgtgggtcatctgtatgaggccccggaaagcctgcagcagttctatcgccagaacgatcccaccaacagcatgaacccggggattggtaaaaccagcaagcagaaatactggggtgaagcggccccgacgccagcctctccggcggatccgcaataa

SEQ ID NO: 138748 - DNA, 555 bp, Enterobacter cloacae
atgcccgcagaggccccgttactcgacagtgatttagaaattcgcgaagcgctgcccgacgatgcgcacgccatcgccgcgctgtatgtctggcacgtgcttaatggccgcgcctccttcgaagagatcccccccaccgttgacgaaatgcgtaaacggatccagaccgtgcgcgacaacgggctgccgtggctggtagcgctgtggcgcggggctatcgtcggctactgctatgccaccttctatcgcccgcgtccggcctatcgctacaccctcgaggaatcgatatacgtggaatccggaatgggcggacgcggcatcggcagcgcgctgctgtccaggctaatcgctgagtgcgagaaaggcccgtggcggcagatgctggcgatcatcggcgatggccataacaatgccggctcgctggcgatccataaaaagttcggctttaccgtggcgggtcagctgcgcagcgtcggctacaagatgggcgactggcgggatacgttgattatgcagcgcgcgctgggtgacggcgactggacgctaccggagtga

SEQ ID NO: 138749 - DNA, 951 bp, Enterobacter cloacae
atgatgccgaaatttcgagtctctttgctcagcctgaccttgctgctggctgtgccttttgcgccccaggcgttagcaaaaaccccgacggcggtgaccgcctcgcagccggaaattgcctccggcagcgccatgatcgtcgatctggccacgaaaaaaatcatttatgccagccagcctgatctggtgcgcccgatggcgtcgatcaccaaagtgatgaccgccatggtggtgctcgatgcccatctgccgctggatgagatgctgacggtggatatcagccatacgccggaaatgaaggggatctactcccgcgtgcgcctcaacagccagattagtcgccgcgatatgctgctgctggcgctgatgtcttccgagaaccgcgcggccgccagcctggcgcatcactatccgggcggctacgacgcttttattcgcgcgatgaacgccaaagcccaggcgctgggcatgacccatacccgctacgtggagcccaccggcctgtcggtgcataacgtctccaccgcccgcgatctgaccaaactgctgatcgccagcgagcagtatccgctgatcggccagctgagcaccaccaaagaagagaccgccaccttcgcccatccggcctacagcctgccgttccgcaacaccaaccatctggtgtatcgcgataactggaacattcagctgaccaaaaccggcttcaccaacgctgccggccactgcctgattatgcgcacggtgattaaccaacgtccggtggcgctggtggtgatggatgccttcggcaaatatacccacttcgctgacgccagccgcttgcggacctggattgaaaccgggaaggtgatgccggtacccgcctcggcgctgagctataaaaagcagcgcgaagcgcagatggcggaggcgatgctgaaaggcggcgcgcagaccgcgcagaacgattaa

SEQ ID NO: 138750 - DNA, 588 bp, Enterobacter cloacae
atgaaccatgtctgggggctcttcgctcatcccaaccgggaaatgagcgtgattaagagcgagaatgaaaccatttctcatcactatacgcatcatgtgctgctgatggcggcggttccggtaatctgcgcctttatcggcaccacgcagctgggctggaacttcggcgatggcaccgtgattaaactgtcgatgctgaccggactggcgctggcggtgctgttttacgccgtgatgctcgccggggtggcgatcatggggcgggtcatctggtggatggcgaggcagtatccgcagcagccttccctgaaacgctgcatggtgtttgccggctacgtcgccaccccgctgtttctgagcgggattgtggcgctctatccgctggtctggctgtgcgcgctggtcggtactattgcgctgttctataccgggtatctgctgtatctcggcattccaaccttcctgagcattaatcgggaagaggggttaagctttgccagctcgacgctagctattggggtactggtgctggaagtgctgctggccatcaccgtggtgctctgggggtatggctaccgactcttctga

SEQ ID NO: 138751 - DNA, 570 bp, Enterobacter cloacae
atggatatcaatcacctgatttcccagtatggctacgcggcgctgatcgtcggcagcatggcggaaggtgagaccattaccctgctgggcggcgtcgcggcgcatcaggggctactgaaatttcccctggtggtgatcgccgtcgccctcggcgggatgattggcgatcagctgctctatctggtcggtcgccgcttcgggggacgcatcctgcgccgtttcgccagtcagaaagcgcggatccgtaaagcgcagcgtatgatccagcaccggccgttgctgtttgtcatcggcacccgctttatgtatggcttccgggtaatcggccccctgctgatcggcgccagccgcctgccgccgcgcattttcctgccgctgaatattgtcggagcgctggtgtgggccctgctgtttaccaccattggctatctcggcggcgaggtggttggcccgtggctgcaccatctggacgcccatctgaagcactggatctggctgatcctcgcggtggtggtggtggtggccgcccactggtggctcaggcggcgcgagagtaagaagaaagactaa

SEQ ID NO: 138752 - DNA, 1440 bp, Enterobacter cloacae
atgaaattgatattaaataaaagcgtgctggcggcattgcccctggccatcgcgctggctggctgcgcgccatctcatgaggttgctaatccgccgcagcagcaaattccggcctcccatgtttccatggatctccctgccgccgtgaaaaatggctggccgcagactgactggtggaaagattaccatgacccacagcttaataatctgattcagcgagcgttggccaacgcgccggatatgcagattgccgaacagcgcatcaggcttgccgaagcgcaggcgcgaatgtcgcaggcgaatcttggtccggagatggatttctccgccgatattgaacgccagcgcatgtcggccgaaggcctgatgggaccgtttgctaccgacaccgacggcaataccggcccgtggtacaccaacggtacctttggcctgaccgccggttgggatctcgatctgtggggaaaaaaccgtgcgctggtgaaagcgcgtatcggcgagctgaaaccccaggttgctgaacaggcccagacccgtgagctgctctccggcagcgtggcgcgtctgtactggcagtggcagacggaagcggcgatcaaagcggtgctgcagcaggtgaaaaacgagcaaaataatatcgtgacggtcgacaaggccctgtatcagcgcgggatcactaactccgccgaaggggcggagaacgatattaacgtcagcaaaaccgaccagcagctggcggacgtgacgggcacgatgaaagagattgaagcgcggctgatggccctgaccaacagccagagccagtcgctaaacctcaaacccgccagcctgccaacggtcagcgcgcagctgccagataccctcggctatgagctgctggcgcgccgcccggatctgcaggtcgcccactggtatattgaggcgtccctgagcgaagtggacgcggcgaaagcggcattttatccggacatcaatctgatggcgttcctgcagcaggatgccctgcacttaagcgatcttttccgccattcggcgcagcagatgggcgttactgccgggttgacgctgccgatctttgacagcggccgccttaacgccaacctggatatcgccagcgcgcagaatagcctgtcgatcgcccagtacaacaaagcggtggtggatgccgttaaccaggtggcgaaaaccgccagccaggtcgaaacattaatggccaaaagccagcagcagcagcaggttgaaaaagacgctcagcgggtagtagatctggcgcaggcccgaatggcggcggggatcttacctggctccagagtcagtatggcgaagctcccggcgctgcaggaacggatcaccgcattgcgcctgcacggccagtggattgacgctagcattcagctgacctcggccctcggcggcggctaccaccagacggtgaagtaa

SEQ ID NO: 138753 - DNA, 735 bp, Enterobacter cloacae
atgagccagaatatttatgacgacccgcagttttttgccggctatgcgaccctcgatcgctcggtgaaggggctggaaggcgcaccggagtggtcttccctgcaggcaatgttgccgccgataaccggtttgcgggtggtggatctcggctgcggctacggctggttttgccgctgggcacagcagcagggagccagccagataaccggttttgatatctcccagcggatgccggcgcaggcgcgggagatgacccgcggggatgagattgtctaccgctacgccgatctgcaaaccctgacgctgcccgccaacagctgcgatctggtctacagctcgctggcgctgcattatttaccggacattgccccgctcttcgccaccctgcagcaggcgctggttcccggcggcaccctggtcttttccgccgaacatcccatctataccgcccccttgcagcagggctggcgggtggatgagcaggggcaaaaaagctggccggtcagtcactatcagcaggagggtgagcgcgtcagcaactggtttgccgagggcgtcatcaagcaacatcgcaagctctcaagctggataaacgcgcttatcgccgcgggttttgtgctggagcagttggatgagtggggtccgagcgccgaacagattgtccaacagcccgccctggatgaagagaaagaacgtccgatgacctttttactgcgcgcgcgtaaaccgggctaa

SEQ ID NO: 138754 - DNA, 786 bp, Enterobacter cloacae
gtggccagcgcgctggcggtcaaagcctgtcatgagctggtgcctgagggcaaaatcggcaatatgctgctcggcgggctgatgtatcccctgagctgcaaaccggaggatgtgtttgagacgctgcaggagaaccgcagctggcagttcttcggcgacgtacaggcgcgcggcgcgtacccgggctatatgcagcgctatttccgtgacaacggcatcacgctcaccatcaccgacgccgatcgtgaagcgctaaaaaccaccgtcgactttatctccttcagctactacatgaccggctgcgtcaccgccgacgaggcgctgaaccagcaggcgcgcggcaatattctcagcatggtgccgaacccgcacctggcgagctcggagtggggctggcagatagacccgctgggcctgcgcacgctgctgaacgtgctgtgggatcgctaccagaagccgctgtttatcgtggaaaacggtctgggcgccaaagataaggtggaagccgacggcagcattaacgatgactaccgcatcagttacctgaacgaccacctggtgcaggcgcgggaagccattgacgatggcgttgagctgatgggctttaccagctggggaccgattgacctggtgagcgcctcaaaggcggagctgtcgaagcgctacggctttatctatgtcgaccgccatgatgacggtaccggcaccctggcgcgcagtaagaagaagagctttagctggtataaagaggtgattgccagccgcggcgccagcctgaaagcctaa

SEQ ID NO: 138755 - DNA, 636 bp, Enterobacter cloacae
atgactatgcctgatattttaattaacactgaaaacatatttcttaatcgcggaatttgcgaactgcttagcgagatcgcgaaggaagaacacatccatgaaccgtattccgttgtggactattccacagatatattaggtccgattgatatgctgttcacagaaatggccgctggtgaacattatctatgccacccgtttttcaaaaaactccctccgcacacgtctatttttattttcgtcgccaccgacagcgctttgcaggttgcacggttaccactttgtctacgcgatgccacttttatcagcatgaacagcgacttgcaccgcgtaaaaaatcagattgcaaaacgtctgacggagtcgacaacatctagttgcggtgggctggaaaaagacagcagacgctgtgtcaaatgccctcggttaaccttgaccaaatcacaactttatattatcgatgcgatcagaactggaatgaacaatcagcagatagcgcaagaactgggcatcagccataagacggtcttctctcacaaaatcaatattttgaaaaaattccaaatagctaccaaacaagagttaacgagattctcatctgttgctcttgcgctttccgcaggaaggatcggttaa

SEQ ID NO: 138756 - DNA, 135 bp, Enterobacter cloacae
atgcttttccacaccattcccaggccgatcaacatcgacgcgaagagggcgaacagggtggttgagataaaaatgctggtcatggcggtgcctcagaaagtgcgtatgcagatcattaggcacggtgtcggatga

SEQ ID NO: 138757 - DNA, 474 bp, Enterobacter cloacae
atggcactcaaaaccttgtcagcactcccggtatttgctgattctctttttgccgatcgctttaatcgtattgaccgtcttttcagccagttaacgggcgatacgccggtgggcactttaccggcttatgatttacagaaagtcgacgacagcaatttcctgctcagcgtcagcgtgcctggctggaaagatgatgagctggaaatagaaaccgtaggggggaatctgcatatttccgggaaacgccaggaaaccgattcctcgacagacagcggtgaacgctggatttataaaggtatccgccgcgctaatttccagctcagtttctctcttcctgaacacgcccaaattaatcaggcgcagctggatagcggcatcttaaaaatagccatccaccaggaaatcccggagagcgaaaagccacgtaaaattgcgatcgagaatcaggggcgcgtgatagaacataaagtttga

SEQ ID NO: 138758 - DNA, 513 bp, Enterobacter cloacae
atgactgacgagatcgatagcgacgcaaacaatacgcatgaactaaccgctgaagtggctcgggcgctgatcgcgcgcggttggcgactgaccacggcggagtcctgcaccggagggaatctggcggcagcgctctgtgcccaggcggataccgcggcattttatgataccggcgtagtgaccttcagcgatgaagccaagcgcaacgtactgcaggttcgcgcggaaaccctggcggtacacagcgccgtcagcgaagcctgcgttcaggagatgtcttctggtattctggcgctcgccggggccgatatcgccatcgccgtcagcggctacgccggaccggagggcggggaagatggtacccccgccggcacggtatggtttgcctggaattttcgcggccagactgaaaccaaacggatgtgctttgccggcgactgtgagaccgtggtggcgaaagcggtacgatatgccctggcggcgctgagcgaaaagcttgcccactggcagtga

SEQ ID NO: 138759 - DNA, 1218 bp, Enterobacter cloacae
atgctaaccaccctgatttaccgcagccaggttcatcctgaccgcccgcccgtcgatctcgacgctttagtccatcgcgccagcagtaaaaatttgccccttggcatcaccggcattctgctgtttaacggcctgcagtttttccaggtcctggaagggactgaggaggcacttgagtcgctgttcagcgaaatccaaagcgacccgcgtcatcgcgacgtagtggagctgatgcgcgattactcagcctaccgacgttttcacggcaccggaatgcgcatactggatctccggctgtttgaaaccgatggcgcgctggaggaaattctgcgctttagcacgtttggggtcaccgaaccggtcaacgaccggatgttccggctgcttagcgccttcattgccgacggcggccgctattgcctgcccgagccgctgcagccctctcgctggatgatgatgcccgcgtcaggtacggccgcgccgcaccacctgcccggtcaaccttgccagtttgctctgcaggctattgtcgagccggctaaaaagcgagtttcttcctttgaggctctgatccgcagcccaaccggcggctctcccgtggaaatgtttgctgccattgcggcggaggatcgctaccgttttgatcttgaaagcaaagcgtatgcattcgctctcgccggccagctgccgctcgggaaacatcagctggcgattaacctgttgcccggatcgctgtatcaccaccctgacgccgtaggctggctgatggacagcctgctggcggccggcctcagaccggatcaggtactgatcgaggtgaccgagacagaggtgatcacctgctttgaccagttccgcaaggtgctcaaagccctgcgcgtcgcgggcatgaagctggccatcgacgactttggcgcaggttattccggcctgtcgttactgacccgttttcagcctgataaaatcaaagtggatgcggaactggtacgcgatatccatattagcggcaccaaacaggcgattgtcgcctcggtcgtccgctgctgcgaggatcttggcattacggtggtggctgaaggtgtcgaaaccctggaggagtggtgctggctgcagtcggtgggcatacgcctgtttcagggctttctcttttcccgaccctgccttaacggcatcggggagatttgctggccggtagcgcgccaggcaatggacctgtaa

SEQ ID NO: 138760 - DNA, 612 bp, Enterobacter cloacae
atggctaattttttgttcaatataaaaaatcactatttgcgagtcgctattgctgaactggttgatgaagcgatgaaggccgccgggcggccacactatcagttttctcaacaatgggatgcaggatcgatggcgcaagctgatgtgatattcacggaaatggtcgcgggggagtggtacttgtgccaggatctttttcagcatgccccggaacaatatacgctttttattttcccggacaatgaacacgctaccgtagatgagggtttaccgaattgtctgcagcatgcggtatttataccgcctcacgctcgcgttcagcggctgaaagatgagatagctaacgccattgagcgtccgctgctaccgcggcaagacccgccgttcaatcgtctgcggcgttgcattaattgcgcctgcaggtcggtcagcgacgcgcaaaccaaagtcatttacgcgttcagtattggcctgagcccgcatgaagtcgccgctgcgctaaatattagtcccaaaacgattcattcacataaaaagaatattatgagtaaatttaatttgaatagccgtcagcagtttaacaaccttgtgcaactgctcgccaaacgctga

SEQ ID NO: 138761 - DNA, 942 bp, Enterobacter cloacae
atgtatgccgtacttatgaagcagatgctctatttgaaaatgctggcgtggctggaggataatatctattgtaacccggcgatcgatgacctggcgctgtatatgggctattcacgtcggtttgtgtacgacgtgttttaccagtatggccagttacccatcgggcagtatattcgtctgcggcggttgaccatcgcagcggtcagtctgcgcttaacacgacaaccgatcgccgctattgcctggcagttaagctatgactcgccgcagaccttttcccgggagtttaagaagcgcttttcgctctcgccacgtgaataccgttgcgcggcgcactgggacacggcaaagctgttgaaaaagtttcacccggacggagagagcctacctctggctcgttttttttctctgccggaacaggtctattacggctatccgatgaagtatgaactgcgcctgtcggatttggtgttgcaaagcaccgctaagacgagcatcagacaaaaggttgaccgttttttcaccgctggcggaggctcgctttccgtactttccgactacgccgcggcgagcaaaaatgagcttaacgtcgaggttaacgcttttgtcggctgtcatgaggcgggaaagctgccccccgcgctggccatgaacagctcgctgaccacccggtcagggctttatgtcggggttgaattctacggcagctggtcacgttatgctcgtttatccagcgatctgtatatggagctgctgccatccctgggggtaagtcgtcgggacggctatgacattgaatgttttataacccgccatgcggaaggcgaagaggcaggggacaggcgctatcgcgtacgctattttatcccggtgacgctgtcggcagcgggtctgcggtctgacagcggtagtgggtcagggcctgtgccggggcgaagttaa

SEQ ID NO: 138762 - DNA, 582 bp, Enterobacter cloacae
  misc_feature (208)..(217): n is a, c, g, or t
atgctgattgtttccgggacgctgtgtcaggcgcttctgctgccggaaaacgcggttcgccagctgatgaccgtcattggtaccccgccggtcgccctgctgatctccctgggcctggccagctggacgctgggcatccgtcggcggatgagcctgaaaaagctgggcgaagtcaccggcagcgcgatcccctcgtcggcggacgtgnnnnnnnnnnccggcatcggtaatgccttagccgaggcgctggagacaatacatctgccgctgatgcccgccgcttttctgctatcgctggtgctcagagcctcgcagggttcggccaccgtggcgatcctcaccacctccggtctgctgtcgcaggcggttgtcggtctggagccgctgcagctggtgctggtgacgctggcgacctgcttcggctcgctcgggctgtcgcacgtcaacgacgccgggttctgggtcgtcacgcgctatctcggactctcggtgccggatggactcaaaacctggaccgtcttgacaaccatcatgggggtgacgggctttctcatcacctggctgctgtggtttgcgctttga

SEQ ID NO: 138763 - DNA, 258 bp, Enterobacter cloacae
atgaaaatcaaaaccactgtagctgctctcagcatcctgtccgtcgtgtcgtttggcgctttcgccgctgatattatcaacagcgagcaggcccagggccgcgaggccatcggcacggtttccgtcggcgcggtagcatcttccccgatggatatgcatgaaatgctgaacaaaaaagcgcaggaagaaggggcttcttcttaccgcattattgaagcccgcactggcgaccactggcatgccactgctgagctctga

SEQ ID NO: 138764 - DNA, 471 bp, Enterobacter cloacae
atgcgaagttcggcaaaacaagaagaactggttaaagcgtttaaagcgctgcttaaagaagagaaattcagctcgcagggagagatcgtccaggcgctgcaggaagagggcttcgagaatatcaaccaatcgaaggtttcccgcatgctcaccaaatttggcgcggtgcgtacccgtaacgccaaaatggaaatggtctattgcttgcctgccgagcttggggtaccgaccacctccagcccgctgaagaatttggtgctggatatcgactataacgatgccgtagtggtgattcataccagccccggcgccgcgcagctgatcgcccgtcttctcgactcgctgggcaaagcggaaggcattcttggcagtatcgccggggatgacaccatctttaccacgcctgcgcgcggttttacggtgaaagatctgcacgacgccattctggttctgtttgagcaggaactctga

SEQ ID NO: 138765 - DNA, 939 bp, Enterobacter cloacae
atgaaagttgcagtccttggcgctgccggtggtatcggccaggcgcttgccctactacttaagacccaactgccttcaggttcagagctctcgttgtacgacatcgctccggttacaccgggcgtggcggtagatctaagtcatatccccacagatgtaaaaattaaaggattttccggtgaagacgctactccggcgctggaaggcgcggatgtagtgctgatctccgcgggcgtggcgcgtaagcccggcatggatcgttccgacctgtttaatgtgaatgcgggtatcgtgaagaacctcgtgcagcagattgccaaaacctgcccgcaggcctgcatcggcattatcaccaacccggtgaataccaccgtggctatcgccgccgaagtactgaaaaaagccggcgtgtacgataaaaacaaactgttcggcgttaccacgctggacatcatccgttccaatacctttgtggcggagctgaaaggtaaatcggcaaccgaggtggaagtcccggtcattggtggtcactccggggtcaccattctgcctttactgtcgcagatccccggcgtcagctttagcgatcaggaaattgccgacctgactaaacgtattcagaacgccggtactgaagtcgtggaagcgaaagcgggcggcgggtcggcgaccttgtcgatgggccaggcggctgcccgttttggtctctctctggttcgcgccatgcagggggaaaaaggcgtggtggagtgcgcctacgtggaaggcgacggccactatgcgcgtttcttctcccagccgctgctgctggggaaaaacggcgtggaagagcgacagtctatcggcaaactcagcgcctttgaacagcaggcgctggagggcatgctggacaccctgaagaaagatatcgcgctcggcgaagacttcgtcaacaagtaa

SEQ ID NO: 138766 - DNA, 1059 bp, Enterobacter cloacae
atgcctggaaagttattacgttcagtactcatcggtttgcttgtcgggggtctgctgctggccctgatgccctcgctgcgccagtggcagttggcgccgactacccagaacgatacggcagacgactccccggcgagctataacgccgcggtgcgccgcgcggcgcccgccgtggtgaacgtctataaccgcgccctgaacagcaccagccataatcagctgacgcttggctcaggggtgattatggatcagcgcggctatatcctgaccaacaagcatgttatcaacgatgccgatcagattatcgtcgccctgcaggacggccgcgtcttcgaagcgctgctggtaggatccgattccctcaccgatctcgccgtgctcaagatcaatgctaccggcgggctgccggtgatcccgatcaatccgaaacgcacgccgcacatcggcgacgtggtgctggcgattggcaacccttataacctggggcagaccatcacccaggggatcatcagcgccacagggcgcattggcctcaatccgaccggccgccagaacttcctgcagactgacgcctcgatcaaccacggtaactccggcggggcgctggtgaactctctcggcgagctgatggggattaacaccctctcctttgacaagagcaatgacggcgaaacgccggaaggcattggctttgcgatcccgttccagttagcgaccaaaattatggataaactgatccgcgatggccgggtgatccgcggctatatcggcattagcggccgggagatcgccccgctgcacgcgcagggcggagggatcgatcagattcaggggatcgtcgttaacgatgtcgccccggacggtccagcggcgcaagccgggatccgcgccaacgacgtaatcatctccgtgaatgacaaacccgccgtctcggcactggagacgatggatcaggtggccgagatccgcccgggatcggaaattccggtggtcatcatgcgtgatgataagaaaatcacgctccatatcgccgtccaggaatacccggccaccaactaa

SEQ ID NO: 138767 - DNA, 1368 bp, Enterobacter cloacae
atgaagaaacagactttgctgttgagtgcgttagcgttaagcattgggttatcgttgtcggtcctgcctccggcagcggcatccttaccgactcaggtgcccggccagggcgcgttaccaagcctggcgccgatgctggaaaaggttctgccggcggtggttagcgtacaggtggaaggcactgcctcgccgacgctcaatatgccggaagagctgaaaaaatattttggcgataacgccccgcaggagcaggcgcagccgtttgaagggctcggctccggcgttatcatcgacgcggcgaaaggctatgtgctgaccaataaccacgtcatcaatcaggcgcagaagatcagcgtccagctgaacgatggccgtgagttcgatgccaaactggtcgggagcgatgaacagagcgatatcgctctgctgcagctgattaagccagaccacctgacacaaatcgccattgctgactctgataaacttcgcgtcggcgacttcgccgtcgccgtcggcaacccgttcggccttggccagaccgccacatccggcattatctctgcccttggccgcagcggcttgaaccttgaagggctggagaatttcattcagaccgacgcctcgattaaccgcggcaattccggcggcgcgctgctgaacctcaacggcgagcttatcgggatcaacaccgcgatcctcgcgccgggcggcggcagcatcggcatcggctttgccattccaagcaatatggcgaaaaccctcgccgaccagcttattcagtttggcgaaatcaagcgcggcctgttgggcattaaaggcatggaaatgagcgccgacatcgccaaagcgatgaatctcaacgttcagcgcggcgccttcgtcagtgaagtcctgccaaactccggctccgccaaagcggggattaaatccggggacgtcatcgtgagtctgaacggcaaaccgctgaacagtttcgccgaactgcgttcgcggatcgccaccaccgagccgggtaccaaggtcaaactgggcctgctgcgcgatggaaagccggtcgatgtcgaagtgaccctggataagagcacctcctcaaccgccagcgcggaactgattatcccggcgctgcagggggcctcgttcagcgacggccagatgaaagatggcaccaaaggagtggtgatcgataatgtggataaaggcagcgccgccgcccaggtcggtctgcataaggatgacattatcattggccttaaccggcagcgtattcactcgattgccgaactgcgcaaagcgctcgaaggcaaaccgccggtcatcgccctgaacgtgatccgcggcaacgaaagcatctatctgctgctgcgctga

SEQ ID NO: 138768 - DNA, 399 bp, Enterobacter cloacae
atgacctgggaatacgcgctaattgggttagtcgtcggtatcatcattggtgccgtcgccatgcgtttcggcaaccgcaaactgcgccaacagcaggcgctgcagtacgaactggaaaagaataaagccgagcttgaagagtaccgtgaagagctggtgagccactttgcgcgtagcgccgaactgctggataacatggcgcacgattatcgtcagctatatcagcatatggcgaaaagctctaacaacctgctgccggactcgatggcagacgccaacccgttccgcaaccgtctggaagagtctgaagccagcaacgatcaggcgccggtccagatgccgcgcgactactccgagggcgcatccggtttactgcgcggaggcgcaaaacgcgattaa

SEQ ID NO: 138769 - DNA, 1128 bp, Enterobacter cloacae
atgcaaagcctgtctccaacatcgcgttaccttttagccctgaaagagggcagccatcaacccgacgacgtccagcaagaagcggtgagccgccttgataccatttaccaggaactgcagacgcagcccgcgccggtcgcgtcaggcggcggtttgcgcgcgaaattcggcaaactgctgggtaagcgcgagccggctgccgggacggcacctgtccgcggcctgtatatgtggggcggcgtggggcgaggcaaaacctggctgatggacctgttttaccagagcctgccgggcgagcgtaaacagcgcctgcatttccatcgtttcatgctgcgcgtacacgaagagctgaccaccctgcagggacatagcgacccgctggagatcgtcgccgaccgctttaaagcggaaaccgacgtgctctgtttcgacgagttttttgtctccgatattaccgacgccatgctgttgggcgggctgatgaaagccctgttcgcccgcggcatcaccctggtggcgacctccaatattccgccggatgaactctatcgtaatggcctgcagcgggcccgttttctgccggcgatcgacgccatcaagcagcattgcgatattatgaacgtcgatgccggcatcgattatcgactgcgtaccctgacgcaggcgcacctgtggctgtcgccgctgaataacgacacccgcgaacagatggataaattgtggctcgcgctggcgggcgcgccgcgctctgccgggccgacgctggagattaaccatcgcgagctgcctaccctcggcgtagaaaaccagacgctggcggcgtcattcgccacgctatgcgtggatgcgcgcagccagcatgactatatcgcgctctcccgactgttccatacggtgatgctgttcgacgtgccggtgatgaccgcgcagctggagagcgaggcccgccgctttatcgctctggtggatgagttctacgagcgccatgtaaagctggtggtcagcgcggcagtaccgctgtacgacatttaccagggcgagcggctgaagtttgagttccagcgctgtctctcgcgtctgcaggagatgcagagcgaagagtacctcaaacgtccgcatatgccctga

SEQ ID NO: 138770 - DNA, 1035 bp, Enterobacter cloacae
atgaagagaggggcgatgaaaaacatttcactggcgatgctggccagacagattggcgtcggcgtggccaccgttgaccgggtgctgaacgagcgcggcggcgtatcgccgcagaccacgcgcaaagtgctgcaggcggcgcgcgaggcgggactgaagcggatcctgccggaggagcaccgctttccctggcagattgaggtctttctcagcagcaatgactcgttcttctttccgcagctggcgcaggattttgccgccgtggcggatagcctcggctatcgccgtctgaccttgcaccgcacctttgtcccggagtcgcagccgacgacgctggcccggcgcattgcgcgcagttgccagcaacgtcaggggatcatcgtcttcggcaatgaccatcccgcggtgcacgacgcgctgcgccgctgccgggaggctggcgtcccggcgatcaccctggcgacggacctgcccggcgccgaccgactctgccacgtggggatcaatcagctgcaggctggccgcacggcggggttaatgctggggagaatgacgccgcggcccggcgaggtgctgatggtcagcggccggcaagattacagcgcgcatcgcctgcgcattcaggggttccgcgaggtgctgagccagcgctttccccacctgcagctcagcgacgtgctggcgggcgaggagcggcgggagcagatcacccgcctggtggagcaagccctgtgccgcagccggaatattgttgggatctataacaccgggcttggcaatacccagattgccgaggcgctggcccgccaccgccgcgaaggcgacgtctgctggatcacccatgagcgttacaacaccacccggcagcagctggcgaagggcagcctggcgttaacgctcgatcagaacacccgccagcacgcccagctggcgatcgacctgatgctgcgccatctggagtccggctaccagccgcaaacctatgccgacggtaaagtcgactttatcctctacagcgccgagaacgtggactaa

SEQ ID NO: 138771 - DNA, 1008 bp, Enterobacter cloacae
atgatctgcaaacgttttgccctggtaggcagtggttttatcggtcaggttcatgccgccagtcttgctcgtcatgaaggaagtgcgctgacgatggtggccgatgccgccccggagcgcgcccaggcgctggccgcccgctatggcgcccgggcggtgaccgtgagcgaggcgatccatagcgacgccatcgacgcggtgctgatcgccagttcaaccccgtcgcatgccgaactgctggaagccgccgccagggcgggcaaggcggtctattgcgaaaaaccgatcgacctctccctggcgcgcgcccgtgaggtggtggagcgggtgctccccctgaacgtgccggtcactgtcggctttaaccggcgcttcgatagcagccatcagcagctccgccgccagctggagcaagggctgatcggccgggtcgagctggtgcagatggtctgccgcgcctccagcatgccgccgctcgactatctgcgcagctccggcggccagatgcgcgatcaggcgatccacttcttcgatctcctgcgctttctcactggcgatgaagtgcgcaccgtagcagcgatgggcgcggcgctggccctgccggacattgccgaatttggcgatgtcgacacctccatcctgatgatgcagatgcgcggcggcgcgctggcgcagctggacaatacccgccgcaccggccacgggtacgatgaacggatcaccctgctgggcgccgaaggcgcgctggagtccggtagccagtcgccggcgggccctaccctgtggcgcggcaatcagcgcattgagccgggcctgtggccggactggttcagccgggtacagggatcttattaccagcatcttgacgcctttattcgctccctgaatggtgaaaccgtcgccgacctgcccggcctgctggacggcctgcaggcgcaggccatagccgaagcggcggttcagtccctacagcatggccagtttgtcgccgtcgatgactgtcgctga

SEQ ID NO: 138772 - DNA, 1032 bp, Enterobacter cloacae
atgtttccgtcacacttaccaaccccgcgccgcccggcggcgcagagcattcccatcctgcgctggggcattatcggtcctggctggatcgccgagcgctttgtgcattcattgaaaacctacagccggcagcaggtggtggcggtggcttcccgcagccaggcgaaggccgaccgggtggccgcggaatgggggatcccccaggcttacggccaggtggaggagatgctggcgcgtccggatattgatgcggtgtatattgcgacgccgcacaaccatcactttcccgacggcatgcaggcgctgaaggcgggtaaacacgtgctgattgagaagcccttcgccctcaacctcggcgaagggcgtgagctgcaggccgaagccgcccgccaggagaagctggcgctggaggcaatgtggtgcgattacgcgccgaaatatgatgtgatccgccagctgctggaggatggggcgctcggcgacctgcataccctgctggccgatcacggcgagtatttcacccccgagcaccgcatcttcaatgccgatcttgccggcgggccgatgatggacctcggcagctatgtgacctcgtttgcgctgatggtgggcggcatgccgcaggagattgtcgcccgcggcagcgccacggcggaggggctgaacggtcagacgtcgatgctgtttagctggcagaacgggatgcagggggtgttaaacaccactttgttcagcaacacgccgggcggggcggtggtggccggacgccaggcgaccctgacgatcgacggccagttttacgcccccggcggcttcacgctcgccgccagtcagggcgggcaggtgctgcgctgggaagagccgcgcaatcgctacgaccagctgttctggcaggcggagcattttgcctggtgcatcggacaggggttgcaggactcgccgctgcggccgctcagtcgggtgctgcagaatctgcaggtgatggatgaggtgcggcgccaggtgggcgcggtgtttaacgaagaacgctaa

SEQ ID NO: 138773 - DNA, 1173 bp, Enterobacter cloacae
atgagcgcgcggttaaatatcggccttatcggctcaggttttatggggcaggcacacgctgacgcttaccgtcgcgcggcaatgttctatcccgatctgcccaagcgcccgcatctctacgcgctggcggatcaggatcaggcgatggccgaacgccacgcggcgaaactgggggcggaaaaggcctacggcgactggcgcgagctggtaaacgatccgcaggttgatgtggtggatatcacctcgccgaaccatctgcactacacaatggcgatggcggcgatcgcggcgggtaaacatgtctattgcgagaagccgctggcggtcaatgagcagcaggcgcaggagatggcgcaggcggcacggcgcgcgggggtgaagaccatggtggcctttaacaacatcaaaacgccggcggcgctgctggcaaagcagattatcgcccggggcgatattggcgaaccggtgcgctttcgcggcacctttgatcaggggttttataacgacccgaacctgccctggtcctggcgctgctcgaaaactctcggcggcagcggggcgcttggcgacctcggcgcccataccctgtccgtcgcccagtttttgctgggcgggatccgtgaagtgaccgccagcgcgcaaacctgcctgcgccagcgtccggtgccgcagaccgatgccgggtatgccagccaggtcgcggtcgatgccgagtggcgggaagtggaaaatgacgatcaggttcagtgcctggtcaatttcgacagcggcgcggcgggggtgattgaggcctcgcgcatcgccgccgggcggatcttcggcgtgttctgggaggtctccggcaccgaaggcacgctgtatatggacggggagcgctttaacgagctgcaggtctatcgcttcaacgatgataaacatgaccgcggctttaagacgctgtatgccgggagccagatcccggcctatgccggcttcttcggcttcgattttggcggcggcgggctgggctattttgacgtcaaggtgatcgaagtgcatgacctggtgcaggggatttgcggggagggcgactgctatcccaactttgaatttggtttgcagaatcagcgcgtgctgtcggcgattgaagcctcgatggccagccgtcgctgggtgaacgtggttaaagactaa

SEQ ID NO: 138774 - DNA, 921 bp, Enterobacter cloacae
atggcgacagagcaactgcggtggggcgtgagccccctgtgctggaccaacgatgtactcgaggatttaggcggtgatattcccctggatacctgcctgcgcgaggcgcgggaggcgggctatcagggcattgagttaggacggaaatttccccgccaggcagcaaccctgggcccgctgctggcggcggccgacctgcgcctggcgtccggctggtacagcggcatgctggccgaccgcagcgtggaagcggagctggaggcggtgcgggagcacgcccagctcctccggcagctcggcgcgaaggtgatggtttacggcgaatgcgggcaactgccaggtgaaaccccgcttgatgagcctatttcgctctcgccgccgttaagccgcgtcagcctggcggcgtattgccacaagctgaatacctttgccgacctgctgctgcgcgactatgacctccagctggcctatcaccatcatctgatgatgctggtggagcacgatgacgagctggagcggtttctgtctcacacccatgacaacgtcgggctggcgtttgataccgggcacgcctttgtcgccggggtcgagatcccgcgcgtactgcacaaatatggccaccgtatccgccatctgcatctgaaagacgtgcgtccgcaggtgctggggcgtctgtatcgggaaaacctgagctttaacgaggcggtgcgcgccgggctgtttaccatcccaggcgacggctgcatcgactatgcgccgatcctcgactttgtccgggacagcgactaccgcggctggctgattatcgaagccgagcaggacccggcgatggcgccgccgctggccaccgccagccgcgcctatgcctggctggcgcaccatttatcttccccttcatcgtcagaggagtacgcatcatga

SEQ ID NO: 138775 - DNA, 426 bp, Enterobacter cloacae
atgaataagacctggcttttcaccaccctcaccctggcgctggtcgccgccgcgccggcccacgccattagcgcgaaataccgggaacagcttgaacgttccggctgcacgcagatgaccgacgggatcacctgcgatattcataaaaccaaagccgagaatgccgccgccgcgcagcaggccgacagcggcttcggcccctgggtgggcacctggtatgtttatacggagtatggcgataaaattgatgagattaccgtcaccgctaaaacggtgaaaacccgcggccatctggttgaggcggcgaaagccagccagggtaaactgaccttccgggtgaaaagctcagcctttacgctgaacgacgcctttaacggcgtatgggcaaacggcagccagcgcggcacgttgcaaaaagtcctgtaa

SEQ ID NO: 138776 - DNA, 189 bp, Enterobacter cloacae
gtgaacgccaaagcggcgggcgatgacgaagcgatgttctacgacgaagactacgtgaccgccctcgagtacggcctgccgccgaccgcgggtctgggtattggtatcgaccgcatggtgatgctgtttaccaacagccataccatccgcgacgtgatcctcttcccggccatgcgtccgcagaagtaa

SEQ ID NO: 138777 - DNA, 1428 bp, Enterobacter cloacae
  misc_feature (1264)..(1273): n is a, c, g, or t
atgacgacgattctcaagcatctcccggttggtcaacgtattggtatcgctttctctggtggactggataccagcgccgcgctgttatggatgcgcaaaaaaggcgccgtgccttatgcatataccgctaacctgggtcaaccggacgaagacgactacgatgctatcccgcgccgcgcgaaagagtacggcgctgaaggcgcccgtctgatcgactgccgcaaacagctggtcgcagaagggatcgccgcgattcagtgtggcgctttccataacaccactggtgggttgacctacttcaacaccacgccgctaggccgcgcggtcaccggcaccatgctggtggcggcgatgaaagaagacggcgttaacatttggggcgatggcagcacctataaaggcaacgatatcgaacgtttctatcgttacggcttgctgaccaacgctgaactgcagatttacaaaccatggctggacagcgactttatcaatgagctcggcggtcgtcacgaaatgtccgaatttatgatcgcctgcggctttgattacaagatgtcggtcgagaaagcctactccaccgactccaatatgctcggcgcgacccatgaagcgaaagatctcgaattcctgaactccagcgtcaagatcgtcaacccgattatgggcgtgaagttctgggacgaaaacgtgaagatccctgcggaagaggtcaccgtacgctttgagcagggccatccggtggcgctgaatggtaaaacctttgccgatgacgtcgagatgatgctggaagccaaccgcatcggcggtcgtcacggcctgggcatgagcgaccagattgaaaaccggattatcgaagcgaaaagccgcggcatttatgaagctccggggatggcgctgctgcatattgcctacgagcgtttgctgaccggtatccataatgaagatacgattgagcaatatcacgcccacggtcgccagttgggccgcctgctgtatcagggccgctggtttgattcccaggcgctgatgctgcgtgattcgctgcagcgctgggtcgccagccagatcaccggcgaagtcaccctcgaactgcgtcgcggtaacgactactcgatcctcaatacggtatcagacaacctgacctataaagcggagcgtctgaccatggaaaaaggcgattccatgtttactgccgaagaccgtatcggccagctgaccatgcgtaatctggacatcaccgatacccgcgagaagctgttcggcnnnnnnnnnnctgccgaagaccgtatcggccagctgaccatgcgtaatctggacatcaccgatacccgcgagaagctgttcggctatgcccagtctggcctgctgagcgcctcctcggcaaccggtttaccgcaggttgaaaatctggaaaacaaaggcaaataa

SEQ ID NO: 138778 - DNA, 630 bp, Enterobacter cloacae
atgaatattaaaccgccgatcaggccgcaaaagaccattgaccgactgatcgatgtacttgagccacacgcgacccccgttaacgcgatcgccagaaaaagactgacatgggaatataaaggcaaaacccagctctttatttttaaaaaaggcgagctgtcgattattcgtaattccgacaggctactgatggtgaccgtctatgagccgcatcttttcggcgtggcggaaatgctgcagcccagccgcagccacagcctgcgagccgaggtatcatgcgaactgctacggatcgaccatgacctggcttcggcgctttttcgccagcataacctatgggaagaggtgaccagcctgttggcttatcatacctcgtatatggtgtatcgtgacgatctggtcctgcagcagcgtacctattcggtcatccgtaaccatctgctggagatgatgctattaagcgaagagacccgacagcgggtatctattcttgagtatattcaggacaggacccttctgtcgcgtagcagtattctcaatgtattgtcagcattaaagaaaggcggttatattgcctttgcccgcggcggttatttacaaaatatcgtctcacttcctgaaaaattctga

SEQ ID NO: 138779 - DNA, 552 bp, Enterobacter cloacae
atgaagtctattgctgcaaaaatggttgccgtaacgatcgctttgggagccagcagcgctgcctgcgcagccgttaacctgcatggagaagctggcgccgagtttaccaatctgtccgccagctttggcgccggggaaccgggtatgacgttcagttctcagtgggctcatagcgacaacgatggagatagtgtaggactgggaatgggttataactttaaccttggcccttttctgatgaccctgggcggtaaggcggtctatctgaacccaaaagatggtgatgaaggttacgccatcgccgccggtggtggcgctgaactcccccttggtcagtatttcacgcttttcggcgagggctattactcaccggactcaatgtccagcggcgttaaggattatgtggaggccaatgccggggtacgccttaacgtgctcccgtctctgaatatcgaagctggctatcgctatattgatatggcagggaaagatggcaatcgcgataacacgctggccgacggcgcttacgccggggttaacttccgcttttaa

SEQ ID NO: 138780 - DNA, 402 bp, Enterobacter cloacae
atgaacaagatcgggttgcttatcgtcgccggcgtgctcggtttagctgggtgcagttcaacatcgccctcccaaacggtggagacgattaatgcgctaaccgtaccggtatcgcccagtgagtctgggactacagcgaatcatgcccaggcggtgaggcgctatttccaggacaatacggcactgattagtcgccttaaccattcgttgaaaagtcattatctgcaggacgtggagcgccgcgatgtgttcgacagacacagcgaggcgtataaggtgtatggcgccctgacccgcctggagcagatggcgtccatgaatgaggtttaccgcaaagagaataatgttgcgggcctacaagagatcaaccgcgtactgaaaagcgtgccgctgaccagctga

SEQ ID NO: 138781 - DNA, 330 bp, Enterobacter cloacae
atgtacgaagctcttttggttgttttccttattgtagcgattggccttgtaggtctggttatgctgcagcaaggtaaaggcgctgatatgggagcctccttcggtgcaggcgcttccggcacactgtttgggtccagcggttctggcaactttatgacccgtatgaccggcatcctggctgcgctgttcttcatcatcagtctggcgctgggtaatatcaacagcaacaagaccagtaaaggaagtgagtgggataatctgagcgcgccgaaaacggagcaaactcagccaactgcgccggctcagccgaccagcgatatcccgcactaa

SEQ ID NO: 138782 - DNA, 1338 bp, Enterobacter cloacae
atgagtaaccgcaagtattttggcaccgatggtattcgtggccgcgtcggcgatgcgccgatcactccggagtttgtgctcaagctgggctgggcggcgggcaaagtgttagcgcgtcacggttcgcgtaaaattatcatcggcaaggatacccgtatttcgggctatatgctggaatcggcgctggaagctggactggcggcagcggggctctctgcgtcgttcaccgggcctatgccgacaccggccatcgcctacctgacgcgcgccttccgcgccgaggcggggattgttatctctgcttcacataaccctttctacgacaacggcattaaattcttctccattgagggcaccaaactgccggatgatgtcgaagaggcgattgaagccgaaatggagaaagagctcacctgcgtggattcggctgagctgggcaaagccagccgtatcgtcgatgcggcggggcgctacattgaattttgtaagggtacctttcccaacgaactgagcctgggaacgctgaaagtggtggtggattgcgcgcacggcgcgacctatcacatcgcccctaatgtcttccgcgagctgggagcccaggttatcgcgatgggctgcgagccagacggtctcaacatcaacgaagaggtcggcgccactgacgtgcgggcgctgcaggcgcgcgtgctggcggaaaaagccgatctgggtattgcctacgacggcgatggcgatcgggtgattatggttgaccacgaaggcaataaagtcgatggcgaccagatcctctatatcatagcccgggaaggattgcgtcaggggcagctgcgcggcggcgccgtcggcacgctgatgagtaatatggggctggagctggcgctcaagcagttaggcatcccgtttgcccgcgcgaaggtcggtgaccgctatgtactggagatgctccaggaaaaaggctggcgcatcggtgcggaaaactccggccatgtgatcctgctggataaaaccaccaccggcgatggcattgtcgccagcctgcaggtggtcgcggcgatggtccgcaaccacatgagcctgcatgacctgtgcagcgggatgaaaatgttccctcagctgctggtgaatgtccgctttaccgagggcagcggtaacccgctggagaatgagcacgtcaaagcggtgaccgcggaagtggaggcggcgttaggaaaacgcggccgtgtcctgctgcgtaaatcgggtacggagccgctgatccgcgtgatggtggagggcgagcatgaagatcaggtgcacgagtttgcgcaccgcatcgctgaggcggtaaaaagcgtttag

SEQ ID NO: 138783 - DNA, 306 bp, Enterobacter cloacae
ttgctgctcgacccgggcttcggtttcggtaaaaatctctcccacaattaccaactgttggccaggcttggggagtttcatcactttggtctgccgctgctggtcggtatgtcacgtaagtcgatggtaggtcagttgctgaacgtcgggccgtcggagcggctgaacggcagcctggcgtgtgccgtcattgcagcaatgcagggcgcgcagattatccgcgtccatgatgtcaaagaaacggtagaagcgctgcgcgtggtggaagccaccctcgccgctaagggaaaaaaacgttatgagtaa

SEQ ID NO: 138784 - DNA, 897 bp, Enterobacter cloacae
atgaacaccgaagatcaggattgcggctttaacggcggcgaaatgaccctgtctctggcagaccgctggatcctggcggaatttaaccagacggtgaaagcattccgcgacgcgctggacagctaccgcttcgacatcgcggcaggcatcctgtacgaattcacctggaaccagttctgtgactggtacctggagctggcgaagccggtcatgaacggcggttctgaagcggaactgcgcggcacgcgtaatacgctgattaccgttctggaaggtctgctgcgccttgcgcacccgatcattccattcatcaccgaaaccatctggcagcgcgtgaaggtgattgccggtattaacgccgataccatcatgctccagccattcccggcattcgacgccgcgaaagtggatgaagccgcgtctgcggataccgagtggctgaaacaggcgattgttgcggtacgtaacatccgcgcggaaatgaacatcgcgccgggtaaaccactggagctgctgctgcgcggttgcagcgaagctgccgttcgtcgcgtcaccgagaacaacaccttcctgaaaaccatggcgcgtctggaaagcatcaccgtgctgcctgccgatgacaaaggtccggtttccgtgaccaaaatcatcgacggcgcggagctgctgatcccgatggcgggtctgatcgacaaagacgcggagctggcgcgcctagcgaaagaagtggcgaaagtcgacgtggaaattggcaaaatcgaaagcaaactggcgaacgagggctttgtggcccgcgcgccggaagcggtcatcgccaaagagcgtgagcgtctggttgccttcgccgatgcgaagaccaaactgatcgagcagcaggcggttatcgcagccctgtaa

SEQ ID NO: 138785 - DNA, 3411 bp, Enterobacter cloacae
atgaatataccgggtaatggcctgggccggtttggcctggccgggcttacgttggccgggatggctgcaatatggtgggggatcacccgctatggcggcatgctgaatatcaatacgcggggcgagcaggtactggtgtttgtcctggtctgtctggcgttggtatttgttttttaccttcctgcaatgtcccgccgtgtgaaggagagtttatatcgccggcagtcgcagcaggccagcgtcttacccggcgaagaagggcgcgtggcgctgacacctccccatcatattacggtgggggaaattcgccagactctacgctatcagtatggacgcgcctggtcccgcaaagtccgtattctgctgataattggctcagtcagagacgtagaacaactgaccccaaagctcacgcaggaactctggcaggaagatcaaggtacattattgctgtggggtggagaccctggggcagcggtagataacgcctggttcacagcgctgcgtaaactgcgttatcgcccggctgatggtatggtgtggataacatcgggctttgacggcgttttgacaacgatgaacagaacgaagcccaggctcacgccagatgaaatggacagtgtgtctcactctctaaagctacgcttcgaagctattggctggaaactacccctatacgtctggtcgctgtatgaggggggcaacgaaaaaaatggacgtatcactcagcctgtaggctgcctgttacctgcaggttgtacgccgcaaatagttgccgaacagttcactgccctggcgtcgttactgatagagcagggcatccagcagatatgcgggcaaccacagcacaattttttactcgcgctggccgaccagttgactcgggaagcggaagcggtggtggaaccgttatcgatactgcttaatccataccgaccattgccgctggccggggtggtatttagtgaggcgtcagtagaggctggtcgcagtgtccgtcatcactggggacgggataaccgctgggaaacgataccagactcagtgctgtggttgccagccggtctacgtccgcgcaaacagggagtcaactggatgcgtgggatgagcgtggccgccgccgccctgatgttactctgggccgcctcaatgacagtctcttttatcgccaaccgccacctggtggcgatcgcacaggagcaggtgcggctggcctcagcggagaaacagccgctggtcgtacgcctgcatgcgctctccgcgttacagaaaacgctttctcaactggaataccgctcgcagcacggcgcgccgtggtacctccgcgctggcctcagtcagaacgatgacctgctggcggcgctgttcccgcgctacggagagagggcgcagccgctgctgcgcgatgcggcggcgcatcatctggaagagcagctcaccgccttcgtgcagctgccgccggacagcacactgcgtgagaagatgacgaagaccgcttacggacaactgaaacaatatctgatgttgacccgcccggaaaaaatggacgccgcgtggttcgccaccacgctaatgcaggactggtcgcagcgctcaggcatcgctgacgccgtctggcagggcagcggcccttcgctgctggcattttatgccgccagtctggtgtcgcatccgcagtggcgtctgcctgtcgatgacggtctggtcagccaggtgcgcacacggttaattcgacagatgggccagcgcaacagtgagtccacgctttaccagaagatgctcgcgcaggtggcgaatcagtatgccgatatgcgcctggcggatatgactgccgacaccgatgcttcgcgtctgttcagcactgatgaggtggtgccgggcatgtttacccgtcaggcctgggagcaggccgtgcagccggccattgagaaagtggtcgcggaacgccgcgatgaaatggactgggtgttgagcgatacgaagcagactgccgcgcagtcgacgtcgccggaagctctgcgagccaggctggcggagcgttatttcgctgattttagcggcgcctggctggatttcctcaacagtctgcgctggcagcgcgcggcgaccctctccgatgctatcgaccagctgaccctgatggccgatgtgcgccagtcgccgctggtggcgctgatgaacaccctgagcgtgcaggggcgaaccggccagaccggggaagccatcgccgattcgctggtcaaatcggccaggcagctgtttaaccgtgataactcgcccgtcatcgatcaacggtccggcgcgcgcggtcctctggatgccaccttcggacccgtgctggcgctgctggacaatcgcgacggcgggacgcccaccagccgtcttagcctgcagaccttcctgacccgcgtcacccaggtgcgtctgcgcctgcagcaggtcaccaacgccaccgacccgcaggcgatgacccgcctgcttgcgcagacggtattccagggcaaggccgtggatttaaccgaaacgcgcgactacggcagcctggtggcggcggggctgggccagcagtggagtggatttgggcaaacgctttttgttcgcccgatggaacaggcctggcagcaggtattgaccccggcggcggaaagtctcaacgcccagtggcgcagcgcggtggtggaggactggaatagcgcctttggcggccgctacccctttaaaaataccagcagtgaagtctctctgccgctgctggcaaaatacctcgacagcgagactgggcgcatcgcccgctttctgcagacccggctgaacggcgtgctgcataaagaggggagccgctggatggcggacagtatcaatgctcaggggctgacgtttaacccggcctttctgcaggcgatgaataccctgagccaactctccgacgtcgcgttcgccaacggcgaagcgggattgcattttgcgctacgtcccggcaccgcggacggcgtgatgcagacggagctggtcatcgacagtcagaaacttgtctatatgaaccagatgccggtctggcggcggttcagctggcccgctgacaccgaagcgccgggcgccagtctgagctggatcagtacccgggcgggcacccgccagtatggcgatttcccgggcgcctgggggtggatccgtctgctggataaggaggtggtcagcgcttatcccggaacgagcagcagctggagcctgagctggaaagcgccggatggtctgttgctgaactacacgctgcgtaccgaggcgggggaaggaccgctggcgctgctggcgctgcgaaactttacgctaccggagacgatattcagcgtgcgcgcgtctgctgaacgtgttccgctgaccgacgatatacccggcgaagagggatactga

SEQ ID NO: 138786 - DNA, 1158 bp, Enterobacter cloacae
atgggctgggtacgaacaaaagcattgaccatggagcagccatcggctccttcactgacccgatggctgtttgccggtgtactgatggcgattatcggtgtcctgctgtttatcctccatgcttccggcaccatagaaacactttcagcgatgaatatctggtgggtatctctcgctccagcaggatgctggctgttggccttttgtctgcggtgctggcagtgggacagagagctgaaagagtatcagttcttacagaaagaggcggaacgcgggcaattaaagtgggaagcctgggccggtcgttatctggcggtactgggcagtgcagtgctgttgccggatcatatttctgcggcacgttggggggatgagcggcctcagcaatacggacttacccgcaggattaattaccttccggtagaagagcccgtgcagttgagtgcgatgcatgcgctgctgaccagtatagaagagcgcgtgcagtgcctgccggaagagctactgctgtatgtcaccctgatcacggataatccctcgcctgagctgaccagcagtttcagtaatctctggaaagaacactttcctggccgcgccgtgcctgatgatattaccgttaccggctcattctcactgtcggaagtggaggagcgcctgatgcagcctgtactgacggtcaatttactcctggtcatccagctcaacggtggtacagcatactccgacgggctggccgtgctgctgctgaccagcgatgatgtggcgcaaaaataccatctgccgcactcatcacggctgttacgtcctatgcccttagatatgacgaactttgaagacgatatcaccctgtttctggaaacccagactgtcgcctgccatacgccctccgttatcggggacgcaaaaaaatggacggaaagaagcgccgcgcttatcacgcagggcggcaaaatgcataccccatggaaagctgaagatatcgcgctgctggaaaaatggtgcggtattccgggacccgcagcgccctggctcctgaccgcgctggcagccgatctggtcagcctccgtaaacagcccctgctggcgttattttccagcgaacaggaacattttatcagtaccatcaccccagggagtgaagatgaatataccgggtaa

SEQ ID NO: 138787 - DNA, 267 bp, Enterobacter cloacae
atgtccaaaggttttgtattactcggcgataaaaccacgcacggcggtgctgttatttccgcatcttccaccatgattgtaaatggaaagcccgtagcgctggtgggggataaagtcagctgcccgattccgggacatggcactaatgccattattgagggatcgccggaatggtcttccgatggtaaagccatcgtggtcgatggctgcaaatgtcagtgcggttgccaggtgatttccggcgcgccggaatgcgcgataggataa

SEQ ID NO: 138788 - DNA, 1605 bp, Enterobacter cloacae
gtgaaaggcaccaaaactgcaccgccgcagatctctgctgaagtgctgaagaaaatgaagaaaacggctgaagattacctgggtgaaccggtaactgaagcggttatcaccgtaccggcttactttaacgatgcgcagcgtcaggcaaccaaagatgccggccgtatcgccggtctggaagttaaacgtatcatcaacgaaccaaccgcggccgcgctggcttacggtctggataaagaagtgggcaaccgtactatcgcggtttacgacctcggtggtggtactttcgatatctcgattatcgaaatcgacgaagttgatggcgaaaaaacctttgaagttctggcgaccaacggtgatacccacctgggcggcgaagacttcgatactcgtctgatcaactacctcgttgatgagttcaagaaagatcagggcattgacctgcgcaacgacccgctggccatgcagcgcctgaaagaagccgctgagaaagcgaagattgaactgtcttctgctcagcagaccgacgttaacctgccgtacatcactgcagacgcgaccggtccgaaacacatgaacatcaaagtgactcgcgcgaaactggaaagcctggtagaagacctggttaaccgttccatcgagccgctgaaagtcgctctgcaggatgccggtctgtccgtttccgatatcaacgacgtgatcctcgttggtggtcagactcgtatgccgatggtgcagaagaaagtggccgagttctttggtaaagaaccgcgtaaagacgttaacccggatgaagccgtggcgatcggtgctgccgttcagggcggtgtactgactggcgatgtgaaagacgttctgctgctcgacgtaaccccgctgtcgctgggtatcgaaaccatgggcggcgtgatgactgcgcttatcagcaaaaacaccaccatcccgaccaagcacagccaggtgttctctaccgctgaagacaaccagtctgcggtaaccatccatgtgctgcagggtgagcgtaaacgcgcgtctgataacaaatctctgggtcagttcaacctggatggtattaacccggcgccgcgcggcatgccgcagatcgaagtgaccttcgacatcgatgctgacggtatcctgcacgtctccgcgaaagacaaaaacagcggtaaagagcagaagatcaccatcaaagcgtcttccggtctgaatgaagaagaaattcagaaaatggttcgcgaagcagaagctaacgccgaatctgaccgtaagttcgaagagctggtacagacccgcaaccagggcgaccatctgctgcacagcactcgtaagcaggttgaagaagcaggcgataaactgccggctgacgacaaaactgccattgagtctgcgctgaccgcgctggaatcttctctgaaaggcgaagacaaagcggatatcgaagcgaaaatgcaggcgctggcgcaggcttctcagaagctgatggaaattgctcagcagcagcacgctcagcagcaggcgggttccgctgacgctcaggcgagcaacgcgaaagacgacgatgttgtcgacgctgagttcgaagaagtgaaagataaaaaataa

SEQ ID NO: 138789 - DNA, 1134 bp, Enterobacter cloacae
atggcaaagcaagattactacgagattttaggcgtttccaaaacagcggaagagcgtgaaatcaaaaaggcttataagcgcctggccatgaaatatcacccggaccgcaaccagggtgataaagaggctgaagccaaatttaaagaaatcaaagaagcgtatgaaatcctgactgatgcccagaagcgtgcggcctacgatcagtacggccacgcggccttcgaacagggcggcatgggcggcggcggcggttttggcggcggtgccgacttcagcgatatctttggcgatgttttcggcgatatctttggcggcgggcgtggtcgtcagcgcgcggcacgcggcgccgatctccgttacaacatggagctgacgctggaagaagcggtgcgcggcgtcactaaagagatccgtattccgacgctggaagagtgcgacgtctgccacggtagcggcgccaaggccggcagcaaaccgcagacctgtccgacctgtcatggcgcaggccaggtgcagatgcgccagggcttttttgcggtacagcagacctgtccgcactgccagggacgcggtacgctgattaaagatccgtgcaataaatgtcatggccatggccgcgtagaaaagaccaaaaccctgtcggttaaaattccggcgggcgtggataccggtgaccggatccgtctggcgggcgaaggcgaggccggcgaacatggcgcgccggcaggcgatctgtacgttcaggttcaggtgaagcagcacgctatctttgagcgtgaaggcaataacctgtactgcgaagttccgatcaacttcaccatggcggcgctgggcggtgagatcgaggtcccaacgctcgacggccgcgtgaacctgaaaattccaggtgaaacccagaccggcaagctgttccgcatgcgtggaaaaggcgtgaaatccgttcgcggcggtgcgcagggcgatctgctgtgccgcgtggtggtggagacgccggtggggctgaatgagaagcagaagcagctgctgaaagagctgcaggagagcttcggcggtccgaccggggaaaacaacagcccgcgttcgaaaagcttctttgacggcgtgaagaagttcttcgacgacctgacccgctaa

SEQ ID NO: 138790 - DNA, 1224 bp, Enterobacter cloacae
gtgtattatgcttttatcgagttattcaccaacaggatgaaagtaaaagtgaaacatctgcaacgattctttagtagcgatgcttccggcggcattgtcttaattatcgccgccgcgctggcgatggtgatggccaataccagcgtgaccagcggtctgtatcactccttccttgagacgccagtacagctgcgtgtgggcgcgctggagatcaacaagaacatgctgttatggatcaatgatgccctgatggcggtgttctttttgctgattggcctggaggtcaagcgtgagctgattcaggggtcgctggcgagccgccgtcaggcggtcttcccggtgatagccgcgctgggcggcatgatcgtcccggccctggtctacctggcctttaacgcccaggatcctgtcgccagagaagggtgggcgatcccggcggcgacggatattgcctttgccctcggcgtgctggcgctgttaggtagccgggtcccgacggcgctgaagattttcctgatggcgctggcgattattgatgacctcggggctatcgtgattatcgcgctgttttatacccacgacctgtccatgctctcgctgggcgtggcggcggcggcgatcgcggtgctggtggccctgaatctgagcggcgtgcggcgtaccgggatctatattctggttggcgcggtgctgtggacggcggtgctgaagtctggcgttcacgcgacccttgccggggtgattgtcggctttatgatcccgctcgaagaaaagcatggcaagtcgccggccaaagcgcttgagcatgtcctgcacccgtgggtggcgtttatgatcctgccgctgtttgccttcgcgaacgcgggggtctcactgcagggggtcacccttgccgggctgacgtcgctcctgccgctgggcattatggctggcctgtttatcggtaagccgctggggattagcctgttctgctggctggccctgaagctgaagtgggcttcgctgccggagggaaccacctgcaagcaaattatggcggtggggatcctgtgcgggattggctttacgatgtcgattttcatcgccaccctggcctttggcagcgtggatcccgcgttgatcaactgggctaagctgggcatcttaattggctcagtggtatccgctgttaccggctacctcatactgcgtcagcgcgtgacggatactcgcctcgcggtataa

SEQ ID NO: 138791 - DNA, 897 bp, Enterobacter cloacae
atgtcacatattaactacaatcatctgtactacttctggcacgtgtataaagaagggtccgtcgtgggcgcggcggaggcgctgtttctgacgccgcaaaccattaccgggcagatcaaagccctggaggagcgcctgcaggggaaattatttaagcgaaagggaagggggcttgagccgagcgagctgggggagctggtttttcgctatgccgaccggatgtttaccctcagccaggagatgctcgacatcgtcaactatcgcaaagagtcgaacctgctgtttgacgtcggcgtggccgatgcgctctcgaaacggctggtcagcggcgtgctggatgccgccgtcgttgagagcgagcagattcatttgcgctgttttgaatccactcatgagctgctgctggagcagctgagccagcataagctcgacatgattatctctgactgcccgatcgactcgacgcagcaggaagggctattttcggtgaagattggcgagtgcagcgtcagcttctggtgcatgaatccggcgccgacgaagccgttcccggcctgcctcgaagagcggcggctgctgatccccggccggcgatcgatgctgggacgtaagctgttgaactggattaacgtgcagggcctgaaggtggagatcctcggcgagtttgacgacgcggcgctcatgaaagccttcggcgccgcacataatgcgatatttgtcgcgccgacgctctacgcgcatgatttctaccatgatgaatcgattgtcgaaattggccgtatggatagcgtgatggaggagtatcacgctattttcgctgaacgaatgattcagcacccggcggtacagcgtatctgtaatcgcgattattcgtcgctgttcaccgaaccccgatag

SEQ ID NO: 138792 - DNA, 210 bp, Enterobacter cloacae
atgacgcgcagctttgtttttgtggatcagacctttagcagcctgacggtccacgatcggttgcatttcgttaaatgctttctgtgcagcagctttgtcgccagcttcgatagctgcgtatactttcttgatgaaagtacgcatcatagagcgacggcttgcgttgtgcttgcgagccttttcagactgaacggcgcgcttcttagctga

SEQ ID NO: 138793 - DNA, 939 bp, Enterobacter cloacae
atgaagctgatacgcggcatacataatctcagtcaggccccgcacgggtgcgtgctgaccattggtaatttcgacggcgtgcatcgtgggcatcaggcgctgctgcagcggttgcgcgaagagggccgccagcgcggtttaccggtcgtggtgatgatttttgaaccccagccgctggagctctttgccgctgataaagccccggcgcgattgacccgcctgcgtgaaaagctgggctatctggctgaaagcggggttgactatgtattgtgcgttcgctttgaccgccggttcgccgcgctaaccgcgcaggattttatcagtgaactgctggtgcgtcgcctgggcgtgcagttcctcgccgttggtgacgatttccgctttggcgctggtcgccagggggatttcttgttattacaaaaggcgggggcggaatatggcttcgacgtcaccagtacccaaaccttctgcgaaggcggggtgcgaatcagcagcacggcggtacgccaggcgctggccgatgacgatctcctgctggcggagacgctgctcggccatccgtttagcatctccggacgcgtcgtgcatggtgatgaactaggccgaaccataggttttccgacggcgaacttaccgctgcgtcgtcaggtttccccggttaaaggggtctatgcggtagaagtgacagggctgggcgacaaaccgatagcgggcgtcgccaatattggcacccgtccaacggttgcgggcgtgcgtcagcagctcgaagtacatctgttggacgttgtaatggacctctacggtcgccatatcaatgtaatactgcgtaaaaagatacgtaacgagcagcggtttgcgtcgctggacgagctgaaggcgcaaatcgcacgtgatgagttaacggcccgcgaattatttgggctgaccagccaggcctga

SEQ ID NO: 138794 - DNA, 1068 bp, Enterobacter cloacae
atgtcaaaactggtgctggaacaggtaaccaaaacgttcggcgaattctatgccgccagggaaatctcgttctgcgccgaagagggggaattcgtgactctgctggggccaagcggctgcggtaaaaccaccctgctgaagatgatcggcggttttcatcagccggatagtgggcgcattctgattggcgataaaacggtgaacgcgctgccgccggaaaagcgcaacaccgccatgtgctttcagtcctacgcgctgtttccgcacctcaacgtggcgcacaatatctgtttcggcctgaaacagaaaaaggccaccatcggcgaacagcaggcccggctggcggaggcgctgaagcaggtagggctggagagtcagcggctgaaaatgcccgggcagctctctggcggtcaacagcagcgcgtggcgctggcgcgggcgatgatcacccgtccagacgtgatcctgttcgacgaaccgctctccaacctcgatgccaagctgcgcgagagcgtgcgttttgaaattaaggaactccagcggctgtatcagctcacctcgatttacgtcacccacgaccaggcggaagcgctggcgatgtcggacaaaatcgtggtgttgaacgccggtaacgtcgagcagatcggccagccggaggagatctactaccgcccagccaaccgctttgtggcggactttatcggcgcggccaatatcgataccgcacaggtcacgcccgcagagcagccgggctattaccgggtacgctgcgccctcggtgagttttatgtcttctctgaccggccgccgcgcgcggagcactgctatatctgctggcgaccagaagatgcgcagtatgtcggccagccgcaggcgggagacaaccacttcaccctgacgctcgataaaatggcctttatgggcaacctcaccgaagcctggggccacaacaacgccggactgtcggtgcgcctgcagctgattaaaaagccgcccattgcccccggcgagcgcgtttgcttccgtctgacggaaaacgccatccattttctggagccggtatcatga

SEQ ID NO: 138795 - DNA, 867 bp, Enterobacter cloacae
atgaaaaactggcgcaacgagctattcgcctggctgttgatgctcagcgggctgggcaccattctgctgctgatgggatccactttttatgtggtgatcgcccagagtctgggctggtttaacctcgaaggcgatagtcatttctctctagagtactggcgcaacatgctgcaggacgaggtactgcaaagcgccctgttctactccgtaaaagtatcactgctgggggcattcggttcggtaattttcgcgtatccactagcgctgtggctacgtaaaccgatggtcggtaaagcagggattatcgcggtactgcgtgcgccgatgtttatccccggtctggtggcggcgtttctgttcgtcaatatcgtggcttatcacggcatcatcaacgagctgctgctggcgctgggcattatcagtgagccgctgcggatgcagaacgatgatttcggctggggtgtcgttatcctgcaaatctggaagaacctgcccttagccctgatcctggtcggcggcgcggtcaacgctattcgtaacgacgtgctggacgccgccagcaacctcggtgctaaccgctggcgcagctttaccggcgtcgtggtgccgctgacgctgcccgccgtacaggtgacgctgattctggtgtttatcggcgcgttgggagatttcgccttcttctcagtggccgggccgcgcaacacctactcgctgtcacgcctgatgcaggccaccgccatggaatacggcgagtggaatagcgcggcggtaattgcagtgatcattatggtcacggcggccatctgcacgctgctgatcgccctgcttatcaccccattcgcaacccgcaaaggagagctcaaatga

SEQ ID NO: 138796 - DNA, 837 bp, Enterobacter cloacae
atgagccacactgccaatggtcgtcgggtggtgacgatttcgctgatctttttcatggttgccaacctcatctggctgggaatgccgttcggtatggcgatcctttggtcgctggttgacgcggcccatccgtggagctacccggatatcttcccgccggtgttgtcgttcagccgctggctgctggtatgggaaaaaacctcgcttgcagaggcgctattgaacagctacaccatcgcacctacggtagcggtcgccagccttctgctgtcgctccccaccgcgtatgccttcgggcgcatgacctttcgtggtaaggcggtggcggagatgctgacgctgatcccactggtgatgccgggaatgctgatcgggattttcttcagcgccatgctgctcaatctcaatatcgacaacgcttttatcagcattgttatcggccatacggtactgacgctaccctattcgattcgcattatgtcggcagggtttaaggctgtaccgcaggatctgatcgatgccactcgtgacttaggctctggtgtgtggggcactttcagcaacgcctacctgccgctgctgaaaccgagcttgctggcggcgctgattttttgtctggtgcgaagccttgaggaattcagcatctcatacgtactgggcgcaccggattttatcaccgtcccgaccattctttactctttccttggctactccttcgtccgcccggatgcggcagtggtgtcgatgattctggtgatccccaacgtcatcctgatggctatcatcgagaagttgctgaaagggaattatctgtcgcagtcaacggggaaagcctga

SEQ ID NO: 138797 - DNA, 1068 bp, Enterobacter cloacae
atgaaaaaagcagtgataattatggcgggcggcctgctgtgcagttctctgacaatggcggctgagaaggccgactgggataaagtactggaacaagcaaaacaagaaggcaacgtgacttttcatgtctggtacctgcaatcacagtggcgaattttcgtgcaggaatttgaaaaacaatacggcattaaagtacgtattccggaaggcagactcgacggcaatgttaataagttgctggcggaagcgggcaaaaagaaaggcagactcgacgttatcgccatgtctgtaacacagttgccggtgatgatgggattgaaagcgctagcaaagattgacgatttacctggctatgatgacgccgttcatcagattcagaacgtcgatactcagggttatgccgtggcgttctggggtaatcagaccggttttgcctatgatccgaaacagattggcaatcaggcactgccgcagacactggatcaattacaaagctttattaacgcaaatccaaagaggttcggctataacgacccaaataacggtggcgcgggggaagcttttatccagagaatcgtcaccattacgggcggtgattttaacagcaaaacggacagcattgacccaacggtagtgaaacgctggcagaaaggatggctgtggtttgccgctaaccgcgacaacataacactgacagcctccggcgctgacagcctgactcgcctgaacgatggcgagttgatgctgattcccatctgggaagaccatctagttgggctgcaaaaaactggagccattaccccaaggctgaaattttacgtgccggagtttgggatgcccggtggcggcaacatcgcggcgattgccgccaacagcccacatccggcggcatcacggctgttcctaaactggctgatcctgccatcaacccagaaggcaatgaatcaagcgtttggttcaactcccctgaagaaactgagcggtccggacaccgcagtacaattttacggtaaagcctacagcagacagcttaggagagtcttcgtccatgaagttatgacgcagtaa

SEQ ID NO: 138798 - DNA, 1476 bp, Enterobacter cloacae
atgaactcgaagctaacgtcgcaggtcgttcaatctcacctgatgcaaagctgttttgaccagcaatcttcatctgccgagggttgtgcccgcccgtcaaaggaaaccgcgatgatcgtgacgctggaccaactccgtccttacgagttcaatcccagggttatgcgcaaccccaactatgacgatatcaaagcgtcgatccgccagcgcggtctggacacgccgccacctatcacccgtcgccccgatcaggactattacatcattgccaacggcggtaatacccgcttgtcaatcctcaatgagctatggcaagaaactcatgatgagcggttttggcgtattcattgcctttaccgaccgtggggtgggacgtctaaacagcttatgcatggagaactgcgatgtctgatcggtcatctggcagagaacgatcttcacggtaaattgagttttattgagcgggcgctggggatcagtaaagcgcgagagttgtaccagcacgttgagcaatatcaactctcgcagcgggaactggcggaacgcctgaggaaagatggctacccgatcaaccagtcacaaatcagccgcatggaacagactctggaatatctgcacccctatattcctcaagtactgtatgccgggctggggcgtccacagatagaaaaactactttccatgcggactgcggcgctacgaatctgggaacaacatgccaccgatgatttgggttcatttgaaaatatcttttcctcggcgctatcgctgttcaatgatcagcctgaagagttctgcttcgaacttgtacaggatgagctattaggactactgagtcaggcgctgaacgttgattacaatctgctgatgctggatctggatccttccgagcagaagcgcctggccttactcggccccactcaggaatcgccgctttatatacagaaagaggcctccgcagcacgttctactgtatacagacgtaaaccgagttccaaaagaaaaacggttctctctgcgccagactcgcctctgggttccacactaatgtgtgaaagcaacgatcccatcatggatatctggtgtatttcacccctaattgattcaacccaggcattgcaagcgctaagaaaccaagttgcgcgagaactggcggagtgttgtggcatcgacggtaagatatttcctgataacaatgtagacgatgccgactataaacttagcgcgattacaacagccccagatgtatattcccaaactcaagcccgcgtctgcagagctctattgatgacactcaatggagttcccctaacagcagatctggccgctactctagatccgatactacttatccgacgcgaacagaatagattcgtgttcagcgatcagttccttattaaagcattccggttaattcgcatcgttcgtcggcttatggaattacaacaggacgcaaaaaatgataccaacgattaa

SEQ ID NO: 138799 - DNA, 540 bp, Enterobacter cloacae
atgataccaacgattaaccatgctattttgtcacaggtggtgcaagccattaaggctggtaacttacgttattgcgaagctttgggctttaatcatgatgaattaaacaaactatgttccctttcctatgatgagttactatatctgacaaatacctcttcacattttctaaaagtgacagtcaaccatgacgttctacgcaaaatgcttgttcaggtacaacaggagcacaaacttcagcagattgtgaaccaggcagtgcaattgggtggctcaatcgccttgattaaccactacttcggtattccgacggccgaaattagcgctcgccgtcgacttatggggatcaacattcgccaggggcgcagccaggctccagatgaagaagaagaaatcgcactctggaaacgctggcaagaggtgaaagtagataatcttgattcaatacaagcgctggaagtcatgatgcagctaactcgggaacgatcgctctcattaaccgtcgtctggaacctgatccggaagtgggaaacgcgttga

SEQ ID NO: 138800 - DNA, 1212 bp, Enterobacter cloacae
atgctaaccaccatcatttatcgcagccatatctgcgacaatgtctcattcaaatcgatcgaggccatggtcgccagggcaaacgaaagaaatgggcaggcggacgtcaccggtattttactttttaacgggacgcatttttttcaactcattgaggggcctgaagaaaaggttcaggatatttatcagcatatctgccaggatcctcgccactataatctggtggagttgctttgcgattatgcaccgtcccgtcgttttggtaaggtcgggatggaactgtttgatttacgcgaacacgatcgcgaggaagttctgcaggcggtgatggaccgggggacgtcaaaatatcagctcacctatgatgaccgggcgctgcaatttttccgtacttttgtcgaagccacagaaaaagcgaactattttgagattccttccgcagatagttgggtttttattcctgataaggagacgttctatcctgataccccgattatcgataatacggaaggttgttcctttgccttccagccgattgtcgaccctttcgcctgcgaaattatttcgtgggaagcgctgttgcgtacaccggacgggcaatcccccggcgcctattttgccgggctgaccggggacgatatttatctcgctgacctgcacagtaaacgggtggcgttgtcgctggcgggaaaattaggtttacgtaataaggcgttaagcattaatttactgccgatgaccatggtcaaagcgccgaatgcggtggctttcctgctcgacgaaattagtcgcaatgaccttattccggagcagattattgtcgagttcactgagcgggaagtgatttcgcggatggacgattttaccgatgcggtgcgcaaactgaagggcgcgggaattaatcttgccatcgatcacttcggcgccgggtttgccgggctatcgctgctggcgcaataccaacccgacagaattaaaatcgaccatgagctgatccgcaatatccaccaggacggaccgcgccagtcgattgtacaggcgattatcaaatgctgtacttctctggagattgcggtctcagccgtcggcgttgagcgtgctgaagagtggatgtggctggaatcagccggtatttcacagtttcagggcaatttgttcgccagcgcgcgcctggggggcctacccgccgtcgcatggccggagaaaaaatga

SEQ ID NO: 138801 - DNA, 246 bp, Enterobacter cloacae
atgcagcagaatggttacattccagatacagcgaacgcaattgcccagtatttcaacaaagcatctttgccttcccagcaggaaaccctgggtcagatcgtgatggatattcttaacgaagggcgtcatctcaaccgcaaagcgctatgcaccaaactgttgagccgcctggaccgcgctcgcgcgccggaggaagagagccactatcagaccttaattggtctgctgtttgctggccaggaataa

SEQ ID NO: 138802 - DNA, 306 bp, Enterobacter cloacae
atgaataacagtgaaactgaggaaataaccgatgaaatcatcggcgaggcggttctagcgcttctgaaaacgaatcgcccgattaccaccccgaccctgctggttcgacttcggttaatgcaggcgacagaaccagatcgccagcgtagaaagatcatcgctgccgtgatcgaagaaatttgcgcgaagcttatccgtcagcggaagtacgcgcctttacaggtaaagaaaatcaatggccgttgggaaaccagaggttcgctggcgccagacagcatgccgtcggaagctaaaaagatccactga

SEQ ID NO: 138803 - DNA, 267 bp, Enterobacter cloacae
atgcatcagcaaccagatatttacgcaagactgcaggacaccgcgctctccgactatttccgtaacgccggtgataaactggttgatgagtccgccgtcatgtcgctcgccatcaacagtattctccagtccgagggtcacctgaacaataaggccattattttatggctgattcaggcgctggaaaccaccgatgacgtggtgaccgcggacgtgatccgaaaaacgctggagattgtcgttggctacaccatggacgatatctaa

SEQ ID NO: 138804 - DNA, 996 bp, Enterobacter cloacae
atgaaacaaaccgtttataccgccagcccggaaagccaacaaatccatgtctggagtcttgaagcggacggcaaactgacgctggtgcaggtggttgatgccccagggcaggtccagccgatggtggtcagccccaacaaggaatttctgtacgttggcgttcgtccggagtttcgcgtgctggcctatcgcatcacgccggataacggggcgttaacctttgcgggcgaagctgcgctgccgggcagcccgacccatatctctaccgatcaccatggccgctttgtcttcagcgcctcctacaatcagggctgtgtcagcgtgaccccgctgcacgatggcctgccgggcgaaaccatcaccgtggtggaagggctggaaggctgccactcggccaatatctccccggataatcgcaccctgtgggtgccggcgctgaagcaggatcgcatttgcctgtttaccctcagcgacgatggtttcctctcggcacaggagcccgcggaagtgacgaccgtcgagggcgccggtccgcgtcacatggtattccatcccaaccagcagtatggttactgcgtcaatgagctaaacagctcgattgacgtctgggagttgaaagatcctaagggcaacatcgaatgtgtacagaccctggatatgatgccgcctgattttagcggcgtgcgctgggcggcggatattcatatcaccccggatggccgtcatctttacgcctgcgatcgtaccgccagcatcatcacggtgttcagcgtttcggaagatggtagcgtgctggcggtggaaggctatcagcctaccgagacccagccgcgcggctttaacctcgatcacagcggtaaatatctcattgccgccgggcagaagtcgcaccatatcgcggtgtacgacatcgtcggtgagcagggactgctgcaggagaaaggccgctatgcggttgggcaggggccgatgtgggtggtggtcaacgcccactga

SEQ ID NO: 138805 - DNA, 819 bp, Enterobacter cloacae
atgacaacacgcgtgattgccctggatttagacggcaccctgcttaccagcaaaaaaaccattctgcccgcttcgctggaggcgctggcccgcgccagagaggcaggctatcaggtcatcgtcgtcaccggacgtcatcacgtcgctatccatcctttttatcaggcactggctctcgatacacctgcaatttgttgtaatggcacctatttgtatgattatcacgcaaaaaaggttttggccgccgatcctatgccggtagagcaagcggtaagcctcactgccatgctcgccaaacagcagatccacggcctggcatatgtggacgacgcgatgctttatgaacaccccaccgggcatgtgatccgcacccgcaactgggcgcaggcgttaccggaagatcagcgtccagttttcgctcaggtcgattcgctggcgcaggcggttcgcgaagttaacgcggtatggaaattcgctctcaccgatgacgacattccccgcctgcagcggtttgcgcagcaggttggcgagacgctgggcctcgagtgcgaatggtcgtggcacgatcaggtggatatcgcgcgcgccggcaacagcaaaggcaaacgcctggcgcaatgggtggccgaccaggggctgtcgatgcaggatgtggtggccttcggcgataactacaacgatcttagcatgctggaagcggcgggcaccggggtggcgatgggcaacgcggtggacgaggtgaaagcccgcgccaacatagtcatcggcgacaatgaatccaccagcatcgccgagtttatctaccgccaactgctgtaa

SEQ ID NO: 138806 - DNA, 1059 bp, Enterobacter cloacae
atgctggagctggattttacccagaccctcggtagccactgcctgcagatccgtgaaactctgcccgccagcgggatcaccgccgtctttggcgtctccggcgcgggcaaaacctcgttgattaacgccatcagcggcctgacccgaccccaggcggggcggatcgtgctcaatggccgggtgctgaacgacaccgcgcagcgtatctgcctggcgccggagcagcgccgtatcggctatgtctttcaggatgcgcgcctgtttccccattataaagtgcgcggcaatctgcagtatgggatggcgaaatccatggtcagccagttcgataagctggtggatctgctggggattgcgcccttgctggatcgtctgccgggccggttatccggcggcgaaaagcagcgagtggctatcggccgcgccctgctgaccgcgccggagctgctgctgctggatgagccgctggcctcgctggacattccgcgcaaacgcgagctattgccctacctgcagcggctggcgcaggagatccatattccgatgctttacgtcagccactcgctggatgagatccagcatctggccgatcgtgtgctggtgctggaggccggtaaggtgaaagctttcggtccgctggaggaggtctggagcagcagcgtgatgcacccctggctgccggcggagcagcagagtactatccttagcgccaccgtcgccgcgcagcacccgcagtatgcgatgacggccctggcgctgggggaccagttgctgtgggtcaaccggctcgaacgtcccgcaggcgacaccgcacggatccgcattcaggcgtcggacgtttcgctgacactggcccagccgtccgggaccagcatccgcaatatcttgcgcgccgaggtggctcagtgtctggaggtcaacggacagattgaagtgcagctcagagtgagtggccgtctgctatgggccaggattagcccatgggcgcgggacgacctggcgatagcgccaggtcagcaggtgtttgcccagatcaaaagcgtgtcgatcgccgcctga

SEQ ID NO: 138807 - DNA, 390 bp, Enterobacter cloacae
gtgatgtctttcccgctgatggtgcgcgccattcgcctggcgctggaaggggtggacgtcaaactggagcaagcggcgagaaccctcggggccagccgctggcgggtatttttgaccattacgttgccgttgactctgccggggattattgtcggcacggtgctggccttcgcccgctcgttaggggagtttggcgcgaccatcacgttcgtctccaatattcccggtgaaacgcgcaccctcccttcggcgatgtacaccttgattcaaaccccgggcggggagggggcggcggcccgcctctgcctcatcgccatcggtctggcgctggtttcgctgctgatctcggaatggctggcccgcgtgagccgccagcgcatgggaggataa

SEQ ID NO: 138808 - DNA, 1221 bp, Enterobacter cloacae
atggcaactgaacaaccggcaatcacccgcgccacattcgatgaagttattttgccaatttatgcaccggcagaattcatcccggtgaaggggaaaggcagccgcgtctgggatcagcaggggaaagagtatatcgatttcgccggcggtatcgcggtgacggcgcttggccattgccatccggcgctggtggcggcgctgcatcagcagggcgaaacgctgtggcacaccagcaacgtctttaccaatgagccggcgctgcgtctgggacgtaaacttgtcgaggctaccttcgccgagcgcgtggtgtttatgaactccggcaccgaagccaatgaaacggcctttaagctggcgcgtcactatgcggtgacccgccatagcccgtataaaaccaaaatcatcgccttccataatgcctttcatggccgctccctgtttaccgtttccgtcggcggtcagccgaagtattccgatggtttcggcccaaaaccggcggatattgtccatgttcccttcaacgatctgcaggcggtaaaagcggtgatggatgaccacacctgcgcggtggtggtggagccgattcagggcgaaggcggcgtgacggcggccacgccggctttcctgcagggactgcgcgagctgtgcgatcagcaccaggcgctgctcgtctttgatgaagtacagtgtggtatggggcgtaccggatcgctgttcgcctatatgcactacggcgtgaccccggatattctgaccagcgccaaagcgctgggcggcggcttcccggtcagcgccatgctgaccacccacgagatcgccagcgccttccatgcgggctcccatggctcaacctacggcggcaacccgctggcctgcgcggtcgccaacgccgccttcgatctgatcaataccccggcggtgctggatggcgtgagcgcgaagcgcgaactgttcgtcaaacacctgcagcggctggatgccgagtttgatctgttcagtgatatacgcgggatgggcctgctgatcggcgcggaactcaagccgcagcacaaaggccgcgcgcgtgatttcctctatgccgcggccgacgccggcgtcatggtgctcaacgcccggccggacgtgatgcgttttgttccctcgctgatcatcgacgagcaggatattactgaagggatggcgcgctttgcccatgcggtggcaaaggtgattaacggttga

SEQ ID NO: 138809 - DNA, 2079 bp, Enterobacter cloacae
atgtggcgcaggctgatttaccacccggaagtcaactatgcactgcggcaaacgctggtgctgtgtctgcccgtggccatcggtcttctgctcggccatctccagcaggggctgttattttccttagtccccgcctgctgcaacattgccggtcttgataccccgcataagcgctttttcaaacgcctgattatcggcggctgcctgtttgccggatgcagtctggtggtgcagttgctgcttgcccaggcgatacccctgccgtttattctcagcggcctggcgctcttgctcggcgttaccgcggagatcagttcgctgcacgcgcggctgctgcccgcgtcgctgatcgccgccatctttaccctgagcctggcgggcaatatgcccatctgggagccgctgctgatctacgccttcggcacgctgtggtacggcgtgtttaactggttctggttctggctgtggcgcgaacagccgctacgggagtcgcttagcctgctttaccgggagctggcggactactgtgaagccaaatacagcctgctgacccagcataccgatccctcgaccgccctgccgccgctgctcacccgccagcagaaagtggtcgatctgattacccagtgctatcagcagatgcatatgctggccgctaaccaacgcaacgatcataagcgcctgctgcgggcgtttcagatggggctggatctgcaggagcatatttcggtcagcctgcatcagccggaagaggtgcaaaagctggtggaacgcagccatgccgaagcggtgatccgctggaacgcgcagaccgtcgccgcccgcctgcgcgtgctggcggatgacatgctctatcatcgctttccaaagcgctttcagatggataaacagatcgaggctctggaaaagatcgccagacaacatccggataacccggtcggccacttctgcgcctggcacttcagccgcatcgcccgggtgctgcatacccagcgcccgctgtatgcccgggacctgatggccgacaaagagcgtcgtttaccgctattgcccgcgctaaagaactacctgtcgctaaaatcgcccgcgctgcgcaatgccgcccgcatcagcgtgatgctgagcgtcgccagcctgatgggcaacgccctgcacttgcctaagccctactggatcctgatgacggtgcttttcgtcacccagaacggctatggcgccacccgggtgcgtattgttcaccgggcggcagggacgctcgccggcctgacgatcgccgggctgaccttgcattttcacgttccggagagctacaccctgagcgggatgctgctgattaccctgctcagctatctgatcattcgcaaacactatggctgggcgatggttgggtttacggtgacggcggtatataccctgcagctgctgacgcttaacggcgaacagtttattatcgcccggctgatcgacacccttatcggctgcctgattgccttcggcgggatggtctggctgtggccgcagtggcagagcggcctgctgaaaaaaaacgcccacgatgcgctggaggccgaccagcaggcaattcgcctgatcctcagccccgacccgaaagctcccgcgctggcctatcaacgcatgcgcgtcaaccaggcgcacaacgcgctctacaactccctgaatcaggcgatgcaggaacccgggtttaatacccactatctggaagatatgaagctgtgggtgacgcacagccagtttatcgtcgaacacatcaacgctatgaccaccctggcccgggagcatacgatgctgaccccggatcttgcccagcgctatctcgaatcctgtgagattgcgctgcagcgctgccagcagcggctggacagcgatggtcccggcagcgcaggggatgccaatattatggagtcgccggaaagcgaggcgccgatcggtccgttaagcaccctggagcagcatctgcaacgcattctgggccatctgaacaccatgcacaccatttcgtcagtggcatggcgtcagcggccgcaccatggcatctggctgcggaagatcaaccgttaa

SEQ ID NO: 138810 - DNA, 633 bp, Enterobacter cloacae
atggtgcttggcaaaccgcaaacagaccctacccttgaatggttcttgtctcattgccacattcataagtacccatcaaagagcacgctgatccaccagggtgaaaaagcagaaacgctgtactacatcgttaaaggctccgtggctgtactcatcaaggatgaagaaggtaaagagatgatcctctcctacctcaaccagggcgatttcatcggtgaattaggcctgtttgaagagggtcaggagcgtagcgcctgggtacgggcgaaaaccgcatgtgaagtggccgaaatctcttataagaaattccgtcagctgatccaggtgaacccggacattctgatgcgtctctcttcgcaaatggctcgccgtctgcaggtcacgtctgagaaagtgggcaacctcgccttcctcgacgtgacgggccgtatcgcccagacgctgctgaacctggcgaagcaaccggatgccatgacccacccggacggtatgcaaattaaaattacccgccaggaaattggtcagatcgtcggctgctctcgtgaaaccgttggtcgtattttgaaaatgctggaagatcagaacctgatttccgcgcacggtaaaaccatcgtcgtctacggcacccgttaa

SEQ ID NO: 138811 - DNA, 405 bp, Enterobacter cloacae
atgcaagcgcgtgtgaaatgggtagaagggttaacctttatcggggagtccgcatcgggacaccagattctgatggatggcaactccggggataaggctcccagcccgatggagatggtgctgatggcggcgggcggttgcagtgcgatcgatgtggtctccatcctgcaaaaaggtcgtcacgacgtgaccaattgcgaagtgaagctgacctccgagcgtcgcgaagaggctccgcgtctgttcacgcatattaatctgcattttatcgtcaccggcaaggcgctgaaagatgccgcggtctcccgggcggtggacctgtcggcagagaaatactgctcggtggcgctgatgctggaaaaagcggtgaacatcactcactcctatgaagtgatcgaggcgtag

SEQ ID NO: 138812 - DNA, 870 bp, Enterobacter cloacae
atgtctgccaaacatccggtgatcgccgtcacgggctccagcggcgcgggcactaccaccaccagccttgcctttcgcaaaatcttcgcgcagctaaacctgcacgccgcggaggtggaaggcgatagctttcatcgctacacccgcccggaaatggacatggcgatccgtaaggcgcgggatcagggtaaacatatcagctactttggcccggaggcgaacgacttcggcctgctggagcagacctttgtcgactatggtcgccacggcaaaggtcagtcgcggaaatatctccacacctatgacgaagccgtgccgtggaatcaggtgccggggacctttaccccctggcagccgctgccggagccgacagacgtgctgttctatgaggggctgcacggcggggttgtcacgccgcagcatgatgtcgccagccatgtcgacctgctggtcggggtggtgcctatcgttaacctcgagtggatccaaaagcttattcgcgacaccagcgaacgcggccactcccgggaggcggtgatggactcggtcgtccgctcgatggaagattacatcaacttcattaccccgcaattttcccgcacccatatcaactttcagcgcgtgccgacggtggacacctccaacccgtttgccgccaaagcgatcccctcgctggacgagagctttgtagtgatccatttccgcaatctgcagaatatcgatttcccctggctgttggcgatgctgcagggctcgtttatctcgcacatgaacaccctggtggtgccgggcggtaaaatggggctggcgatggagcttatcatgacgccgctggtcgagcgcctgatggaaggccgtaagataggctaa

SEQ ID NO: 138813 - DNA, 219 bp, Enterobacter cloacae
atgattattccctggcaggatctggatcccgaaacgctggataacctgattgaaagctttgtgttacgtgaaggcaccgattatggtgaacatgaacgttcacttgccgataaagtcgccgatgtaaaacagcagctgaaacgcggagaggcggtccttgtgtggtcggaactgcatgagacggtcaatattatgccgcgcgcgctgtttaacggctaa

SEQ ID NO: 138814 - DNA, 702 bp, Enterobacter cloacae
atgcatttccgcggctgcagcggcgaacctaaccgcaatcaccgcatctatcactccggcgaaacggaagatggcacctggtttttgcactggctgaagcgcgagtttggtcccgcgccgaccgcggccgtcggctattcgctgggcggcaatatgctgggctgcctgctggcagaagaaggcgaccgctgcccgctggatgcggcggtgatcgtctccgcgcctttcatgctcgaagcctgcagctatcatatggataagggcttctcgcgagtttatcagcgctatctgctcaatctgttaaaagccaacgcttcacgcaagctgaaagcgtacccgggctcgctgcccgtcgatttacgccagctcaaagggatgcgccgcatccgggaatttgacgatatgatcaccgccaaaatccatggctttgccgatgcgctggattattaccggcaatgcagcgccatgccgcggctcagcgatatcactaagccgacgctcatcattcacgcgaaagacgatccgtttatggatcaccactcgattccgccgcaggagcaactgcccgcgaacgtagagtatcaattgaccgagcaaggcggccacgttggctttgtcagcggcactctgcgtaaaccggagatgtggctggaaagacgcattcctgactggttaaaccgctggctggaggttcccgtatga

SEQ ID NO: 138815 - DNA, 1458 bp, Enterobacter cloacae
atgacaataactccacaacaactgatcgcactgctaccgctgctgatcgtcggcttgacggtggtggttgtgatgctctccattgcgtggcgacgcaatcattttctcaatgccacgctgtcggttcttggacttaacgccgcgctggtctcgctctggttcgtcggccagaacggggcgatggacgtcacgccgctgatccgcgttgacggctacgccatgctttacaccggtctggtgctgctggcgagcctcgcgacctgtactttcgcctacccgtggcttgagggttacaaggacaacaaagaagagttctacctgctggtgctgatcgccgccctgggcggcattctgctggccggtgcgaatcatctggcggcgctgttcctcggtattgagctgatttcgctgccgctgttcggcctggttggttacgccttccgccagaagcgttcgctggaagcgagcatcaaatacaccatcctctccgcggcagcttcgtccttcctgctgttcggtatggcgctggtgtatgcgaactccggcaacctgtccttcctcgcgctgggcaaaagcctggcggacaacatgctgcacgagccgctgctgctggcgggtcttggcctgatgattgtcggtcttggctttaaactgtcgctggtgccgttccacctgtggacgccggacgtttaccagggggcgcctgcgccggtctccaccttcctggcgaccgccagcaagatcgctatcttcggcgtagtgatgcgtctgttcctgtacatgccggtgggcaacagcgaagcggtacgcgtggtgctgggcctgatcgccttcgcctctatcatcttcggtaacctgatggcgctgagccagaccaacattaagcgcctgctcggttactcttccatctcccatctcggctatctgctggtggcgctgattgccctgcagagcggtgaaatgtcgatggaagccgtgggcgtctacctggccggttacctgttcagcagcctcggcgcgttcggcgtggtcagcctgatgtccagcccgtaccgcggcccggatgctgactcgctgttctcctaccgcggcctgttctggcaccgtccgatcctgtcggctgtgatgacggtgatgatgctctccctggccggcatcccgatgaccctcggctttatcggtaagttctacgtgctggccgtcggtgtgcatgcgcatctgtggtggctggttgccgcggtggttgtcggctcggcgatcggtctctactactacctgcgcgtggcagtgagcctgtacctgagcgcgccggagcaactgaatcgcgatgcgccgtcaaactggcagtacagcgccggcggtatcgtggtgctgatctccgcgctgctggtgctggtgctcggtatctggccgcagccgctgattagcatcgtgcagctggcgacgccgctgatgtaa

SEQ ID NO: 138816 - DNA, 921 bp, Enterobacter cloacae
atggaattaacttttttggggacatccgccggggtgccgacccgcacgcgtaatatgacgtcgataatactgaatttgcaacagccgacccgcgccgaaatgtggttgtttgactgcggcgaagggacccagcatcagtttcttcacacgccctaccatcccggcaaactgaataagatttttattacccatctgcacggcgaccacctgttcggcctgcccggtctgctgtgcagccgctcgatgcagggaaactctctacccctcaccctctacgggccaaaaggactcaaagagtttgttgagaccgcgctgcgcctgagcggttcgtggaccgactatccgctcaccatcatcgaagtcggccctggtctggtgttcgacgaagagggctatcgggtcaccgcgtatccgctcagccatccggtggagtgctatgggtatcgcattgagcagcatgacaagcccggcaccctcgacgccgcccagctgattgccgatggcgtgcctcccgggccgctgttccatcaactcaagcgcggacagcgcgtcgagctggcagatggccgggtcattgacggcagccgctatctggggccagcaaccccgggtaaaacgctggccatcttcggcgataccgccccctgcccgcaggcgctggagatggctcgcggggcggatgtaatggtccacgaaaccacccttgagcaggcgatggcggagaaagccaatagccgcggccactcttccagtcagcagaccgcggcgcttgccaaagaagcgggggtcggtacgctgatcgccacccactttagctcgcgctacgatgccgaaggctgtctgcgtatgctggcggaatgccgggagattttccctaacacgctgctggcggaagactttatggtctacaagatggcgtaa

SEQ ID NO: 138817 - DNA, 459 bp, Enterobacter cloacae
atgacctggcaggatctccaccatagtgaactcaccgttccccagctgtatgcgctgctgaaattgcgcagtgaagtctttgtcgtagagcagcagtgcgtctatcaggatgtcgacggcgatgatttggttggtgaaaatcgccatctgctcggctggcgcgatggcgaactggtggcctacgcgcggatcctcaaaagcgaagaggagtttgcgccggtggtgattggccgggtcatcgtcagccccgccgcccgtggtgcgaagctcggctatcagctgatggagcaggcgctggccagctgtcagcagcactggccgcaaaaggcgatttacctcggggcgcaggcgcacctgcaatccttttacgcccacttcggttttacgccggtgaccgaggtctatgatgaggatggcatcccccacattggcatggcacgagaaaagcgcgctgtctga

SEQ ID NO: 138818 - DNA, 1290 bp, Enterobacter cloacae
gtgctgtctgtttccactgcgctggcccgtttgcaagacggcctgggcgagtcatttccagactcgcccggcacgcgaattatcgatgttgcctttccgctgaatgatgccttcgatccgctactatggtgcggccagcaggcgcaatggccgcagttttactggcagcagcgcaatggcgatgaggaactggcgacgctgggggcggtaaaaacctttacctcgctcgacgcggcgaaccgctttttacgccaggccggccggcaggatctgcgtatctgcggcctgaatgcgtttgaaccgcagcagggcagcctggcgctgccgcgtctggagtggcgccggtgcggcggcagggccgtgctgcggctggtgctgcatagtgatatctccctgcgtgaggatgccgcgacggcccgcgcgtttctcgccagcctgacaaccactcaggcgactcccggcgccataccgccgttgctgagcgagcgccactcatccgactatcctcaatggcaggcaatgattgcgcgggcgactaaggcgatcagcgccggtgaaatggataaagtagtgctggcgcgggcaaccgacctgcagtttgccgccccgctggacgccgtgagcatcatggcggctagccggcgcagcaatcttaactgttttcatttcctgatggcgttcaatgcccggcaggcatttttcggctccacgccggaacggctgtggcgccggcgcggcgcgctgctgcgcaccgaagcgctggcggggaccgtcgcgaaccatcaggaagacgcgaaggcgcagcaactggccgactggctgatgaaagacgacaaaaaccagcgggaaaacatgctggtagtagaggatatctgccagcgcctgcagagtgaggcctcgacgctggacgtcctgccgccgcaggtggtgaggctgcgtaaggtgcagcatctccgacgctgcatctggaccgagctggcggcgcctgacgacagccgctgtctgctgcagctgcagcccaccgccgcggtggccggcctgccgcgccgggcggcgctggcgttcattcagcgtcatgaaccgttttcccgcgaatggtacgccgggtccgccgggtatctgtcactggcgcaaagcgagttttgcgtggcgctgcgttcggcgaaagtgaaccacgacaccctgcggctgtatgccggggcggggatcgtcagcggctctgatgcacagcaggagtggcaggagattgacaacaaagcggccgggctgcgctcgctgctgtgtccataa

SEQ ID NO: 138819 - DNA, 1608 bp, Enterobacter cloacae
atgtcagtaagcgcatttaaccgacgctgggcggcggtgatcctggaagctttaacgcgccatggcgtgcagcatatctgcatcgcgccgggctcgcgctcgacacccttaaccctggcggcggcggaaaaccgcgcctttatccatcatacccatttcgacgaacgcggcctcggccacctggcgctcggcctggcgaaggccagccggcagccggtggcggtgatagtcacctccgggaccgccaccgcaaacctctatccggcgctgattgaggcagggctcaccggtgaaaagctgatcctgttaaccgccgaccgtccgccggagctgatcgactgcggcgcgaaccaggctatccgccagccggggatgtttgcctcccatcctgcgcagacgatttctttgccgcgtccctcgcaggatattcctgcccgctggctggtctcaaccatcgaccaggcgctgggcgcgctgcacgccggcggggtgcatattaactgtccgttcgctgaaccgctgtatggtgatatggatgagaccggcgtggagtggcagcagcagctcggcaactggtggcagagcgacaaaccctggctgcgccaggcgctgcagttagagagcgagaagcagcgcgactggttcttctggcgacaaaaacgcggcgtcgtcgtggcgggcagaatgagcgccgcggaagggaaaaaggtcgctgagtgggcgcagaccctcggctggccgctgatcggcgatgtcctgtcgcagaccgggcagccgctgccgtgcgccgacctgtggctgggcaacggcaaagcggtcagcgagctggcgcaggcgcagatcgtcgtgcaactcggcagcagcctgaccggcaaacgcgtgctccagtggcaggcgacctgcgagccggatgaatactggctggtggataatctgcccggtcgcctcgacccggcgcagcaccgcggtcgccgtctgctctcaagcgttgagcgctggctcgaattacatccggcggagaaacgccagccgtgggcgacggtgatcccacagcttgccgggcaggcgtggcaggctgcggtcgccagcaacgagccttttggcgaagcgcagctggcgcagcgtattcggcgctatctgccggagcagggccaattgtttgttggcaacagcctggtggtgcgcctgatcgacgccctggcgcagttgccggccgggtatccggtctacagcgcccgaccgacgctggccatcgttggcgatctctccgcgctctacgatctcaactcgctggccctgctgcgccaggcgtcggcgccgctggtgctgatcgtggtgaataacaacggcgggcagattttttctatgctgccgacgccgcaggacgaacgccgtcagttctatttaatgccgcaggacgtggatttcagccacgcggcggcgatgttcggcctggcctatcatcgccctgatgactggccgtcgctggatgaggcgctggccggcgcctggcgcagggcaggggcgacggtgattgagctggcggtcaatgagaccgacggcgcgcagaccctccagcagctgctggcgcaggtaagtcgcctgtga

SEQ ID NO: 138820 - DNA, 759 bp, Enterobacter cloacae
gtgatcctcagcgctgctgtcgacaacggccagccgggctatccctggctggtgtttctgcacggtttttccggcgaccgcaacgagtggcggaaagtgggcgacgcctttcccgcctggccgcggctgtacctcgatctgccggggcacggcggctccgcggatatcgcggtgcaggactttgccggggtcaatactctgctgcagtctatgtttaatagttacaacatacataagtattggctgatcggctactcgctgggcggccgggtggcaatgaacttcgccagccagccgcgcgcaggcatgcgcgggctgatcgttgaaggcggccatccgggcctgcaggatgcagaggcgcggcaggcgcggcgcagcaatgacagcgcctgggcggaacgttttcgccgcgagccgcttgagcaggtctttgccgactggtatcagcagccggtcttcgcttcgctgaatgccgcgcagcgtgagtcattggtcgccttacgcagccggaacaacggcgcgacgctggcggcgatgctgcaggcaacctcccttgccgcgcaggccgatctgcgcgcgtctctgcaggcgcgcgattttccttttcactacctgtgcggcgagcgcgacgcgaagtttcgcgccatcgcgcagacgctcgcggcggatctccatcttattcaccatgccggacacaacgcgcaccgggacaacccggcggcggtgattgcctgtctggcgcagattctggcaagttaa

SEQ ID NO: 138821 - DNA, 1122 bp, Enterobacter cloacae
atgagtggcggagacggacgaggtccgggtaattcaggtctgggacacaatggtggtcaggccagtgggaatgtgaacggtacatcaggtaaaggtggcccttcatcaggtggtggtacggatccaaacagcgggccgggctggggtacgacgcatacacctaacggggatattcataactataacccgggggagtttggtaacggcgggagtaaacccggtggtaatggcggtaacagcggcaatcatagcgggagctctggtggcggacagtcttcggccaccgcgatggccttcggtctgcctgccttggccactccgggggctgaaggactggctttatccgtttccggcgatgcgttgtcggccgctgttgctgatgtgctggctgccctgaaaggtccgtttaagtttggtctgtgggggattgcgatttacggagtgctgccttctgagatagcaaaagatgatccgaaaatgatgtcaaaaatcgtgacgtcattgccggcagacacggtaacggagacgccggtcagctccctgccgctggaccaggcgacggtcagcgtcactaaacgtgtggcggatattgtgaaggacgagcggcagcatattgcggttgtcaccggccggccaatgagtgttcctgtggtggatgcgaaaccgacaaaacgtccgggggtattcagtgtgtcgattccgggtctcccgtctctgcaggtgagcgtacctaaaggtgttccggccgcgaaagccccgccaaaaggcattattgctgaaaaaggtgattcacgtccggctggttttacggccggtggtaactcccgtgaagccgttattcgtttcccgaaagagagcggacagaaaccggtctatgtgtcggtgacggatgttcttactccggcacaggtaaaacagcgtctggaggaagaaaagcgtcgccagcaggcatgggacgctgctcacccggaagaggggctgaaaagagagtatgataaagcgaaagctgagctggatgctgaagataaaaatattgcgaccttaaacagtcgcattgcatcgacagagaaggcgatccccggtgctgatgaatcccctaatgattttggtaaaaatcattaa

SEQ ID NO: 138822 - DNA, 1440 bp, Enterobacter cloacae
atgcgacagggtgaccaccacatcttcctggttgatcagatcttcgatgttaatatcagcgctgttggcggtgatttcggtacgacgttcgtcgccgaactggtcgcggatcagctccagctcttcgcgaatcacttccatcagacggtcggcgctgccgagaatgtgcagcagctccgcgatctgctccagcagctctttatattcgtcgagcagtttttcatgctcaaggccggtcagtttctgcagacgcagatccagaatcgcctgagcctgctgctcggtcaggtagtatttaccgtcgcgtacgccaaactctggctccagccattccggacgcgcggcgtcatccccggcgcgctccagcatcgccgcgacgttaccaagatcccacgcctgggcaaccagcgccgttttcgcttctgccggggtcggcgcgcgacggatcagttcgataatcgggtcgatattggccagcgcaacggccagcgcttcgaggatatgcgcccggtcgcgcgctttgcgcagttcgaaaatcgtacgacgggtcaccacttcacggcggtggcgtacaaacgcggcgatgatgtccttcaggttcatgatcttcggctgaccatggtgcagagctaccatgttgatgccgaaggagacctgcagctgggtctgggaatagaggttgttaagcactacttcccctaccgcatcgcgcttcacttcaatcacgatgcgcatcccgtctttatcagactcgtcacgcagcgcgctgatgccttccacgcgtttttctttgaccagctcggcgattttctcgatcaggcgcgctttgttcacctgatacggaatttcgtgcacgatgatggtttcgcggccggatttcgcgtccacttccacttccgcgcgcgcgcggatgtacactttaccgcgaccggtgcgataggcctcttcgatgccgcgacggccattgataatggcggcggtcgggaaatcagggccaggaatatgcgccatcagcccttcaatgctgatgtcttcatcgtcaacatacgccagacagccgttaatcacttccgtcaggttatgcggcggtatgttggtggccatccctacggcgatcccggaggcgccgttcaccagcaggttaggaattttggtcggcatgacgtccggaatacgctccgtaccgtcatagttgtcgacgaaatcgaccgtctctttttcaagatcggccatcagctcatgagcgattttcgccagacgaatttcggtataacgcatcgccgcggcggagtcgccgtcgatggaaccaaagttaccctggccgtccaccagcatgtaacgcagcgagaacggctgcgccatacgcacgatggtgtcgtataccgcgaagtcgccgtgcgggtggtatttaccgattacgtcaccaacgacacgggctga

SEQ ID NO: 138823 - DNA, 729 bp, Enterobacter cloacae
atgaatgccgaaaaaacgtcggtagcccctaacgtcgatcatgctgaaatcgccaaattcgaagccgtcgcctcgcgctggtgggatctggagggcgagttcaaaccgctccaccgcatcaacccgctgcggctgggctatattgccgaacgctccggcggcctgttcggtaaaaaagtcctcgatgtcggctgcggcggcggcatcctcgccgagagcatggcgcgcgaaggcgcgacggtcaccgggctggacatgggggccgaaccgctgcaggtcgccaggctgcacgccctggagagcggtattcaggtagactatgttcaggaaacagttgaggaacatgccgcgaagcacccgcagcagtatgacgtcgtgacctgcatggagatgctggagcacgtccccgacccgcagtcggtggtgcacgcctgcgcgcggttagtgaagcccggcggccaggtcttcttctccaccatcaaccgcaacggcaaggcctggctgatggcggtagtcggggcggaatatgtcatgaagatggtgcccaaaggcactcatgatgtgaagaagtttatcaagccggccgagctgctgggctgggtagatcagactactctgaaagagcagcatatcatcggtctgcattacaatccgctgaccaataccttcaagttagcgccgggggttgatgttaactatatgttgcatacaaccgccaaacaggactga

SEQ ID NO: 138824 - DNA, 495 bp, Enterobacter cloacae
ttgtaccagatacttgccttccagctgcttaacggctgcgtaggagaagttcatgtcgcgccagtggtcgaggaaaccgtccatctgctggaactcttcttccgtgtagtcttccagcagatgatgatcgtatttacctttctcgaccatcttcaccacgtgatcgtagagcgccggcggctcaaactgaccgaaggcttttttacgcaaatggaaaatcgccagacgcgcggcgaggtactggtaatccggcgcgtcgcgggagatcagatccgcagcggctttaataatggtttcgtggatgtccgcggttttgatgccgtcatagaactggatatgggagcgcagctctacctgggaaatcgaaacgttattcagtccttctgccgcccaatccagtacgcgatggattttgtcgagattgatgcgctcggtggtcccgtcgcgctttgtcaccagcagactctgattcatgtggattttacctgtccgtga

SEQ ID NO: 138825 - DNA, 1422 bp, Enterobacter cloacae
gtgaaatcctgctcgcagggcggcgtacgcggcggcgcggcaaccctcttctacccaatgtggcatctggaagtggaaagcctgctggtgctgaaaaacaaccgtggtaccgacgccaaccgcgttcgtcacatggactacggggtacagatcaacaagctgatgtacacccgtctgctgaagggcggcgatattaccctgttcagcccttccgacgtcccgggcctgtatgacgccttcttcgccgatcaggacgagtttgagcgcctgtacacccagtacgagcaggacgacagcattcgcaagcagcgtattaaagccgttgagctgttctcgctgatgatgcaggagcgcgcctctaccggccgcatctatatccagaacgttgaccactgcaacacccacagcccgttcgatccggtagtcgccccggtgcgtcagtctaacctgtgcctggagattgctctgccgaccaaaccgctggaagatgtcaacgacgaaaacggcgaaatcgcactgtgcaccctgtcggccttcaacctcggggctatcgacagcctcgacgagctggaagagctggcggtgctggcggtgcgtgctctggatgcgctgctcgactatcaggattaccccatcccggcggctaaacgcggtgcgatggggcgtcgtacgctgggtatcggcgtgatcaacttcgcttactatctggcgaagcatggcaaacgctactccgacggcagcgccaacaacctgacgcacaaaacgttcgaagcgattcagtactatctgctgaaggcctctaacgagctggctatcgagcaaggcgcctgcccgtggttcaacgaaaccacctatgcgcagggcatcctgccgatcgatacctataagaaagatctggacggcatcgtcagcgaacccctgcactacgactgggaagcattgcgcgaatccattaaaactcacggcctgcgcaactccacgctctccgcgctgatgccgtccgagacctcgtcgcagatctccaacgccaccaacggcattgagccgccgcgcggccacgtgagtatcaaagcgtccaaggacggtatcctgcgccaggtggtgccggattacgaaaacctgcagaacgcctacgagctgctgtgggagatgccgaacaacgacggttatctgcagctggtgggtatcatgcagaagtttatcgaccagtcgatctctgccaacactaactacgatccgacgcgcttcccgtccggaaaagtgccgatgcagcagttgctcaaagacctgctcaacgcctataaattcggcgtcaaaacgctgtactatcacaacacccgtgatggcgctgaagacgcccaggatgacctggccccgtccatccaggacgacggctgcgaaagcggcgcttgtaagatctaa

SEQ ID NO: 138826 - DNA, 1131 bp, Enterobacter cloacae
atggcatacaccactttttcacagacgaaaaacgatcagctgctggaacccatgttttttggccagccggttaacgtggcccgctacgatcagcaaaaatacgacatctttgaaaagctgattgaaaagcagctctccttcttctggcgtccggaagaggttgacgtttcccgcgatcgcatcgactaccaggcgctgccggaacatgaaaaacatattttcatcagcaacctgaagtaccagacgctgctcgactccatccagggccgtagcccgaatgtggcgttgctgccgctgatctccatcccggagctggagacctgggtagaaacctgggccttctccgagaccattcactcgcgttcgtacactcacatcatccgcaacatcgtcaacgacccggcgaccgtgttcgacgacatcgtcaccaacgagcagatccagaaacgtgcggaaggcatctctcactattacgattcgctgatcgagatgaccagctactggcatctgctgggcgaaggcacccacaccgtcaacggcaaaaccgtgaccgtgaatctgcgcgagctgaaaaagaaactctatctgtgcctgatgagcgttaatgccctggaagcgatccgcttctacgtcagcttcgcctgctccttcgcctttgccgaacgcaaactgatggaaggcaacgccaaaattatccgcctgatagcccgcgatgaagcgctgcacctgaccggcacccagcatatgctgaacctgctgcgctccggcagcgacgatccggaaatggcggaaatcgccgaagagtgcaagcaggagtgctatgacctgttcgtgctggcggcgcagcaggagaaagagtgggcggactacctgttccgcgacggctcgatgatcggcctgaataaagatattctctgccagtacgtcgagtacatcaccaatatccgcatgcaggcggtgggcctcgatctgccgttccagacccgctccaacccgatcccatggatcaacacctggctggtctccgacaacgttcaggtggcgccgcaggaagtggaagtcagttcttatctcgtcggccagatcgattctgaagtcgatgccgacgatctgagcaacttccagctgtaa

SEQ ID NO: 138827 - DNA, 255 bp, Enterobacter cloacae
atgaagcggatcttcctgaaaatctctgacactcgccttgagtgtcaggatgaacacccttccctgctggcggcgctggagtcgcataatatcaacgtcgaatatcagtgccgcgaaggctactgcggctcctgccgcacgcgtctggtctccggccaggttgactggctgaccaagccgctggcctttatccagccgggagaaattttgccctgctgctgccgggcgaaaggcgatattgagatcgagatgtag

SEQ ID NO: 138828 - DNA, 585 bp, Enterobacter cloacae
atgcctgagcctgagagaagaatcgcttcattaacgctcaaaccaggaaaatcggactcaacgctgatcgccatgcttcaatcagagcaaattgaaattatcacaattgatgacacgcaagcagaggtacttctacttgcaatacgccaggcatttttacacgctgatgccgaagattttctcaaccttatagattccactacagattttgtgatgctgtatgcagtgcaagttatggaagatactcgttttaactatgaatattttgaacacgaattatggaagcagaatctattttctcaccatctcgcggtactttattgttatgaaaccgaaaatggtaaaaaaattctctccggagccgtaattaaaacgaatgcggttcatccttctgaagcagaaaatagtatcactatacgcatcaatgaacagtgtccaaaattaagggtagtaaatgaaaagtattccttgtgcgagatattcagtaaagttattccgactgttggcaacatggatagtttggaagcctgtctgcatccattaaagacattttttattgagcaacaggcaaaacttgagttctaa

SEQ ID NO: 138829 - DNA, 543 bp, Enterobacter cloacae
atgaataaacgtattatcgcagcactgatcaccgcaagcggcctggtagcattcaatgctagcgctaacgatggcaccgttaattttatcggtgacattactgatggcgcatgtactgtcgatgtacaaaatactggttcttctaccggtcaggttactctcggctctgtaccaaaatctgcattctctggcgtcggttccactgcgggtaacggttctggtctggctgcgatcactatctccctgtcaggttgccctaccactaaaaccgacgcttatgtgacttttgacggcgactattacaatggtctgaatgactacctgaaactgaccggctacggtaacactggtgttgcaaaaggtgttgccatccagctgatggattccaacaacaatcacctgaaactgggtgagaaatctgctgcaattccactgacagctggcgccgcaaatgttgcatttaaagcaacttatgcacaagttgaaagcaccgttgacgctggtactgcaaatggcgttgcgaccctgctggtaacttactaa

SEQ ID NO: 138830 - DNA, 681 bp, Enterobacter cloacae
atgcgaatcttaaattcattgctatccattatactccttttttctacctctctcgcctgctacgcaggagtacaggtcggaacgactcgtataatttatgcagaaggtaaaaaggaggcgagcgtatcccttgataacctggacagtactccttatctaattaaatcatggattgaaaacaataataatgctgggacacactttttagttacgccccccctctttcgtctggaaggtaaacaaaaaaatgttgtcaggatctttaagcttgatggcgttttgcctgccgatcgtgagtcacttttcttttttaatacgacgtcaatcccggccagtacgacagatgccgatcgtaatacgttgcaaattgcagttcgtaccagacttaagctcattttccgcccgaaaggactaagcgatgacttgccagtaaatcatgctaaagaattatcatggtcaaaaaatggcaatcagattatcgtcaaaaacccgtcagctttttacattaatttcatgtttatcaaggtgaatggtcaatcaatagtaatgaaagataaaaacttcgttgcaccattctcctcagcaagttactcattgcctgcaggcggtggtgggaaagtagaatggaaaattatcaatgatatgggtggccaaagcgacctttatcaaagcagtttatag

SEQ ID NO: 138831 - DNA, 2574 bp, Enterobacter cloacae
atgattaaaaaattcaaattatctccatgctgtttagctcttataagtatcggtgtgttagccatatcttctgagctatatgcaagagaattttttaaccccgcatttcttaccgatctaaacggttcagacgtgagtccggacctttcggcttttgaagtggcaaattctcaggcccctgggaaatatcgggttgacattatcatcaatggtaccgtcgtcgataccaaagatgttgatttcttttctacggcagaacaaaaagcaagctatcttaacgaggcgggagaagaacttaaactatacccatgcttatcaacagaggaattaagtggttatggtattaaggtaaaagcaatctcttcattaaaaacaaacgctaatggttgcgtcattatcagttccattccagaagcctctgttgattttaactttaacttacagaaacttgagttaagtgttccgcaggccgcagtatcctcaacggttcgtgggtatgtttcacctgatgaatttgacaatggtattaacgcgttctatttaaattatagatataatggaaccagtagctacgcacgagataacggatcatcagatcaagagaaccatagtgtcaacttactaccaggcttaaatatcggaccatggcgtattaaaaactacaccacgtggaataaagatagttatgataatgatagcaatggtaaatgggatactatttatacctatgctgaacgaaatattatttcacttaaaagcctgttaacattgggtgaaagcacttcagatgctgatatttttgatagtgtgccatatcgtggtgcgcaattaaactcagacgattacatggatgcagaaagtatccagggatatgcacctgtagttcgcgggattgcgaaaagtaacgcaaaagttattattaaacaaagtggatatgttatttatcaatctttcgttcctcctggagcctttgagatcactgatctgtattcgacaggtggcaatggggacctcaatgtcactatcgaagaagctgacggcactcaacaaaattttgttgtagcttatgcttcacttcccgtattacgtcgtgaaggtagtttaaaatatagcattacatccggccaataccgctcctccgacggtagcgttgactatactccgttttcacaagcaacggccagctacggtttaccacacaacaccaccctatacgggggattccaggctgcttctaaatatcaatcagtggccattggcgtcggtaacaacctgggtgtacttggtgctgtttctttagacgtaacacaggcctggtcgacgaagcaagatcaagataagatatcgggccaatctgtgcgtatacgctacagcaaaaacctgaacgatataggcacaaatatagcgattgcaggctatcgttactcaacgagcggctttaataccctttctgatgttcttgaaacctatcgtgatgactataaatactactataacgatcgcgttaaaaatagaactgaaattaccgtaagccaaagcctcggtgataaattaggctattttaacatcggcggcgtaatggaagattactggaatcagcgccgcaggaataactcacttaacgtaggttacagcaatagctggagcggtattacgtataatttaaactattcccattctcgctcctcaactgactatgagggttacggtagaaactattctactgataatatattttcattcaacgtcaacattcctcttgatatttggatgccgaatacttgggtaacctatggcttgaatactagcgatccgggctcaaccagtaatagtgtgggtttatctgggcttgcgttggcagataataatctgagctggaacttgcaacaacaatacgataatcgagacttcagtagtggtaacgctggcgtcgactataagggtagctatggtgaaatttacggaagctacaactatgatcatgattggcagcgtctaaattatggtattaacggtggtgtaattgtgcaccgcaatggtattacagctggacaatcttttagtgatacaagtgctcttgtcaaagcgcccggtgtgaccggaacacgtgttataggaaataccggtgtgaaaacagactaccgtggctatgcgatagttccaaatattacgatgtatcggagaaatgatgttgttcttgatacagaaacaatgcctgaagacgttgatttagatacaaccaccgctacagtggtgccaactcgtggggcgattgtattagctcaatatacaggtaaaaaagggatcagagctatgtttcgtctagttgataccaataataaaccagtcccatttggtgctatggtaaacagcgttgcagagacgtcacaagaagttcgtaatggtatcgtcagtgataatggtcaggtttatatggctggtttgcctttggaaggggcactatcggttcagtggggtaaaaaggcttctcagcagtgtcgtgcaaattatcaattttcggatgctgaaaaaacaagcggtattcaacaaagtcaacttgtgtgccactactaa

SEQ ID NO: 138832 - DNA, 960 bp, Enterobacter cloacae
atgtataaaattatggtggctattatcaccacctttatcggtatctatagttcgcagtgcttagctgatgcgtctggctgtattgtattggacggcaagacgtatactttaaatttgtcttcaatagctatcgatccagatgccgaggttggtgcaactctctatacagctcgcctcgatacagaaggaccaaagataacctgtcctttaaactcaggaagaggtaaatatacctctaaaatgctgggttctttccagacattagtgggctcgaatgtttatggtaatatctatgcctcaggtattgatggtatcggtattcaaatacgagatcttgtacaatcttcaaaagccgtcccttattcagcgtctatgacttctggcgatttattatattggtctaccgataaaaaaactgtcattagcttcattaagacaggcactgttggtaaagggacgacgaattatggtctcgcggcccagtttaatgttgataactgggttgtagcaaaaatatctattaaagcaaaaatttcctggattactaaaagctgtgtgacagacccaagtttacgaattcaaaatattcaacttggtaatcatcttgcttcttcctttacgtctgttggaagcacatctacggataccaagttctccgttaagcttaattgtcagaaagatgctaatgctgtctacgtttcttttgacccaacaaccggtagtactggaaaaggtatacttaatgttgacaccagtaattcagatgccgccacaggcatagcagttgaaatacttaatgctaaagatcgttctcctttagttttttctagtgaaaccaaatatcataccaatatggagagctcaatagagatcccacttgttgctcactataaacgtatcgggacggttaagtcagggactgctaatgctgcaatgaccttcacgataaatcaatattaa

SEQ ID NO: 138833 - DNA, 321 bp, Enterobacter cloacae
gtgcgcggcgaggcgcgaaaaaccgcggtggaggaagcgcttagccgcgccgggctggcgggcttcgccccgcgcgatccggccacgctctccggcgggcagcgggcgcgggtgagcctgctgcgcgccctgctggcgcgccccgaggcattactgcttgatgagcccttcagccgcctggatgccagcctgcgcgccgggttccgccgctgggtctttgaagaactggaccgccaggccattccggcgatcctggtgacccacgatcgcgaggactgcccgccgacggggcgctgcctggcgatggagcgctggcaatga

SEQ ID NO: 138834 - DNA, 1308 bp, Enterobacter cloacae
atgaaacgtgtttctcaattgaccgcactcgccctgctcatggggcttgctgcttccactacctgcgccgctgaaaccatgccagcgctcactctctcccacctgcaacagcagcacggcgtggccatcgacacccggctgagcgcttattacaacggctggccgcagcgcgccaacggcccggaaggccatgagccgcaggccctcaatctttccgcccgctggctcggcgccatgagcgacgatcagctccgcgcctgggctaagcagcaccagctccagtccgatacccccatcgcgctgtacggcagcccggaggataacgccagcgtcgcggcgcggctgaaacaaacgggtttcacccggctcagcaccctgagcgatgcgctgagccagaccgaccgtctgcaaaagctgccgcactttgaacagctggtctacccccagtggctgcacgacctacagcaagggaaagcggtcgccgccgccccggcaggcgactggaaagtgtttgaagccgcctggggagcgccgaagctctatctgctgagccatatccctggcgcgggctatatcgataccaatgaggtggagagcgaaccgctgtggaataaagtgtccgacgcgcagctgaaggcgatgctggcgaagcacggcatccggcatgacaccacggtgatcctctatggtcgcgacgtctacgccgcagcgcgggtggcgcagatcatgctgtacgccggggtcaaagacgtgcgcctgcttgacggcggctggcagacctggtccgacgccgggctgccggtagagcgcggtatgccgccggcgcagcagccggcgcctgatttcggcgcgccgatccccggccagccgcagctgatactggataccgaacaagcccgcgggctgctgcatcgtcaggacgcctcgctggtcagcgtccgctcgtggccggagtttatcggcaccaccagcggctacagctatatcaagccgaagggcgacatcgctggggcccgctggggccacgccgggagcgactccacgcacatggaggatttccataacccggacggcaccatgcgcagcgccgacgatatcgctgccctgtggcgccagtggaacattctgccgagccagcaagtggcattctattgcgggaccggctggcgggcctcggaaacctttatgtatgcccgcgccatgggctggccgcacgtcgcggtgtacgacggcggctggtacgaatggagcagcaacccgcacaatccggtggcccgcggagagcgcggcccggaaagcagtcagtaa

SEQ ID NO: 138835 - DNA, 417 bp, Enterobacter cloacae
atggcctggacggcgctcgggctcacggacgcgggcggctttctcgatattgcgctggattttctcttttacgccctggtgccgttcggctttattctggcggatccgctgaacaatgccctggcgggcggctggctgctgtttgcctttatcggcaccggcagcagctttctcgcttttgccgccctggcggccaggcaccagatcgccaatcccggctacgcccataaatcgctgtactatctcgggggactgacggaggggacggagaccatcctgttgtttgtcctcggctgcctgtttccggcgcatttcgcctggctggcgtggctgtttggcgcgctgtgctggctgacgacggcgacgcgcatctgcagtggctaccagaccttaaagcgggtaacgaccacagcgtaa

SEQ ID NO: 138836 - DNA, 411 bp, Enterobacter cloacae
atgctaaaaatgattgatgttgtcgccgccattattgaacaggatggccagattctgctggcgcagcgtccgccccacgccgaccagccggggatgtgggagttcgccggcggcaaagtggagccgggtgaaaaccagccgcaggcgctggcccgcgaactgcaggaggagatgggcatcatcgcccgcccagcttgctatatcgctagccatcagcgggaggtctccggccgccggatccatctgcacgcctggtgggtgccgcactttcagggcacgccgctggcccactatcacactcagctgcgctggtgccttcccacagaagcgctggccctcgatctcgccccggccgatattcctctgctgcacgcctttatcgcccagcgccccaccctttccgtccgctga

SEQ ID NO: 138837 - DNA, 1344 bp, Enterobacter cloacae
atggatcagacgtgcactctggaaggctttctcacccgcgttcaacagcgcgatcctcatcaaaccgaatttgctcaagccgtccgggaggtgatgaccaccctgtggcctttccttgaggaaaatccgcgctatcgtcagcttgctttgctggaacgtctggtggaaccggagcgcgtgatccagttccgcgtggtgtgggtggacgaccgcaatcaggtccaggtcaaccgcgcgtggcgcgtgcagttcaactcggccatcggcccgtataaaggcgggatgcgttttcacccgtcggttaacctgtcgattctcaaattccttggcttcgagcagaccttcaaaaacgccctgaccactctgccgatgggcggcgggaaaggcggcagcgatttcgatcctaaaggcaagagcgatggcgaagtgatgcgtttctgccaggcgctgatgaccgaactctatcgccaccttggcccggataccgacgtaccggcgggcgatatcggcgtcggcggtcgcgaagtcggctttatggccggaatgatgcgcaagctctccaacaacagcgcctgcgtcttcaccggtaaaggactctcctttggcggcagcttgatccgtccggaagccactggttacggcctgatctacttcaccgaagcgatgctcaaacgtcacggcctcggcttcgaaggcgctcgcgtggcggtctccggctccggcaacgtcgcgcaatacgccattgagaaagcgatggagcttggcgcgcgggtggtgacggcctccgactccaacggcaccgtcgttgacgaagcgggcttcaccaaagaaaaactggcccgcctgatcgacattaaagagcgtgcccacggccgcgtggccgattacgcccgcgaatttggcctcacctatcttgaaggccagcagccgtggtcagtgccggtggatattgccctgccttgcgcgacccagaacgaactggacgtcgatgccgcccgccagctgattgccaatggcgtcaaggccgtggcggaaggcgccaacatgccgaccaccatcgccgcaaccgacctgttcctggaagctggcgtgctgtttgccccgggcaaagcggccaacgccggcggcgtggcgacttccggtctggagatggcgcagaacgccgcgcgcatgggctggaaagcggaaaaagtggatgcccgtctgcatcacatcatgctggatatccaccacgcttgcgtgcagtacggcggcgaagcgaagcagaccaactacgtgcgcggcgcgaatatcgccggtttcgtgaaggttgcagatgccatgctggcccagggcgtgatttaa

SEQ ID NO: 138838 - DNA, 981 bp, Enterobacter cloacae
gtgaaatatattgctatcagccaaccgggcggcccggaggtattgcagatccgcgaaggggagatccccaccatcggggagcatgaggtgctcattgaggtgaaggcggcgggcgtcaaccggccggatattctgcagcgccagggtctgtatcccatgcctgagggcgtcacccccgtgcccggcctcgaggtggcgggcgtggttcttaaggtcggcgcgcaggtcacagcgtttacgcccggcgatcgcgtttgcgcgctgaccaacggcggcggctatgccgaatactgcgccgtgccggcaggccagacgttgccgatcccggcgggcctcagctttagcgaagcggccgccattccggaaaccttcttcaccgtctgggcgaacgtcttccagctgggtaagctgcagcctggcgaaagcattctggtccacggcggcgccagcgggattggcaccaccgcggtcctgctgtgccacgcgctggggatgaccgtctatgccaccgtcggccaggacgaaaaaattgctgcactacgtccctatgctacggcgattaactacaaaacagatgattttgccgagaaaatcggccagctgaccaacgatgaaggggtggacgtcattctggatattgttggcggcccttactttaaccgcaaccttgggctactgaaaaaggatggacgactggtcatcatcggctttatgggcgggcgaatcgctcatgaggttgatattcagactctgatgctcaagcgagccaccgtcaccggctcgaccatgcgcggccggacggcggcggagaaacagcagattgccgaggcgctgcgccgccacgtctggccgctgcttgaggcagggaaatgcaagccgctgatctacgccagctacccgatggcggagattgccgaggcccatgcctgtctggacagtggtcagcatctggggaaagtggtgatcacgatgacgtcgtga

SEQ ID NO: 138839 - DNA, 222 bp, Enterobacter cloacae
atgaaaaagtatttaatcgtggcgctgctggcctctctgctggcaggctgtgcccatgactctccctgcgtaccggtttatgactcgcaaggccgcttagtccataccaatacctgtatgaaaggcacaacagaagacaactgggaaaccgcaggcgcaatcgccgggggtgcggccgcggtagccggcctcacgttagggatcgttgctctgacccgctag

SEQ ID NO: 138840 - DNA, 3111 bp, Enterobacter cloacae
atgtctaagttttttattcatcgaccggtcttcgcctgggtgctggctatcattatgatgattgccggcggcctggccatcctgcagctgccgatagctcagtacccgacaatcgcccctcctgcggtcgcgatctccgccacctaccccggtgcagatgcccagaccgtacaggataccgtcacccaggttatcgagcagaatatgaacggcatcgacaacctgatgtatatgtcgtcgaccagcgactctgccggttcggtaaccattacgctcacctttaaatcgggtaccgatcccgatattgcccaggtacaggtgcaaaacaaactgcagctggccacgccgctgctgccccaggaagtacagcagcaagggattagcgtcgagaaatccagtagcagcttcctgttggtcgccggctttatctctgataacccgaccaccacccaggacgatatctctgactatgttgcctccaatgtcaaagatcctattagccgcctcaacggcgtgggcgatgtgcagctgttcggcgcgcagtacgctatgcgcgtctggctggatggcaacctgctgaataaatacaacctgacgccggtggacgtcatcaatgcgctgcaggtccagaacgatcagatcgccgcgggtcagctcggcggtacgccagcgctgaaaggccagcagttgaacgcgtcaatcatcgctcagacacggctcaaagatccgcaggagtttggcaaggtcacgctgcgggtcaacgccgatggctctgtcgtccatctgaaagacgtcgcccgcattgagctggggggagagaactataacgtcgtcgccagaattaacggtaaacctgcctctggtctgggtattaagcttgcgaccggcgccaacgccctggataccgccaccgcgattaaagcgaagctggccgagctgcagccctacttccctcaggggatgaaggtggtctatccgtatgatacgacccctttcgtcaaaatctccattcacgaagtggtcaaaacgctttttgaagcaattattctcgtctttcttgtcatgtatctgttcctgcagaacatgcgcgcaacgctcattccaaccattgccgtacccgtggtgctgttgggaaccttcgcggtattgtcgatgtttggctactccatcaacacgctgacaatgtttggcatggtgttggcgataggtctgctggtcgatgacgctatcgtagtagtggaaaacgtcgaacgtgtgatggttgaggagaagctctcgccaaaagaagcgacggaaaaatctatgtcgcagatccagggagcgctggtgggtatcgccatggtgctctccgcagtatttgtcccgatggcctttttcggcggctcaaccggcgcgatttatcgtcagttttcaatcaccatcgtctccgccatggcgctctccgtgctggttgcgctggtactgacgccggcgctctgcgccacgttgttgaagccagcctcagctgaacaccatgagaaaaaaggatttttcggctggtttaacgcccgcttcgaccagagcgttaaccactataccaacagcgtcagcggtattttacgtggaactggccgttatctggtgatctacctgctgatcgtcgtggggatggccgtgctgttcatgcgcttgcccacgtcctttctgcccgacgaagaccagggcgtcttcctgaccatgatccagctgccgtccggtgctacccaggagcgcacgcagaaggtcctggatacggtgactgattactacctgcataacgagaaggccaacgttgaaagcgtctttaccgttaacggcttcagcttcagcggccagggacaaaactccggtatggcgtttgtcagcctgaagccctgggaagcgcgcagcggcgatgaaaacagcgtggagtccatcatcaagcgggccaccgtagcctttagccagatcaaagacgccatggttttcccgttcaacatgccagccattattgagctgggtaccgccaccggcttcgactttgaactgatcgaccagggcggactcggtcataccgctctgacccaggcgcgcaatcaactgctgggcatggtgaaacagcatccggatcagctggttcgggtacgccctaatgggctggaagatacccctcagttcaaactggatgtcgatcaggaaaaagcgcaggcgctgggcgtatcgctctccgatatcaatgaaacgatatcagccgcgctgggcggatactacgtcaatgactttattgaccgcggccgcgtgaaaaaagtgtacgttcaggctgatgcccacttccgtatgctgccgagcgacattaacaacatgtatgttcgtagcgccaacggcgaaatggtgccgttctccgcctttgtcacttcacgctggatatatggctcgccgcgcctggagcgctacaatgggttgccatctatggagatcctcggtgaagcttcgccaggcaaaagtaccggggaagccatggcgctgatggaaacgctggccagtaaactgccgagcggcatcggttatgactggaccgggatgtcttaccaggaacggctctccggcaaccaggcgcctgcgctctatgccatctcgctgatcgtcgtcttcctgtgtctggcggcgctgtatgagagctggtcgatccccttctcagtcatgttagtggttccgctgggggtcattggcgcgctgttagccgccacgctgcgtgggctgaataatgacgtttacttccaggtcggactcttgaccacgatcggtttgtcggccaagaatgcgatcctgatcgtcgagttcgccaaggatctgatggagaaagaagggaaagggatcattgaggccacgctggaggcatcgcggatgcgcctgcggcctattctgatgacctctctggcctttattctcggggtcatgccgctggtgattagccatggtgccggcagcggggcgcagaatgcggttggcaccggcgtgatgggcgggatgctgaccgcgacgctgctggcgatcttctttgttccggtgttcttcgtggtcgttagacgacgctttacccggcacgctgaataa

SEQ ID NO: 138841 - DNA, 1140 bp, Enterobacter cloacae
atgacgactcacgccagagtgacacttttatccggtttaattatctcggccttattgctaaccggttgcgataattctgacaaccagcaaccccatgcgcaggcgccgcaggtgacggtccatgtcgtgaacagcgcgccgctatcagtcaccaccgaactgccgggccgaacctctgcttttcgcgtagcggaagtccgcccccaggtgagcggtatcattctgaagcgtaactttgttgaaggaagtgatgtcgaagcaggccagtcgctctatcagatcgatccggcgacctaccaggcggcgtggaacagcgccaaaggcgatgaggccaaagccgaagccgcggccgctatcgcccatttgacggtgaaacgctacgttccactgctgggtactaaatatatcagccagcaggaatacgatcaggcagtggccaccgcccgccaggccgatgccgatgtcatcgccaccaaagctgccgtggaaacggcccgtatcaacctggcctacaccaaagtaacctcccccattagcgggcgcatcggtaaatcgagcgtcaccgaaggggcgctggtcaccaacggccagtcggatgccctggctaccgtccagcagctcgatcccatctatgttgacgtgacagagtccagtaatgacttcatgcgccttaagcaggaaagcctgcagcgcggcggtgataccaaaagcgttgagctggtcatggagaacggccaggcctatccgctcaaaggttcactgcagttttctgacgtcactgttgatgaaagtacgggctcaattactctgcgcgctatcttccctaacccgcagcatgtcctgctgccggggatgttcgtccgcgcccgcatagacgaaggcgtcgatccgcaggctatcctggtaccgcagcaaggggtgacccgcacgccgcgtggtgatgcctccgtgatgctggtgaatgacaaaaaccaggttgaaacccgggaagtggtcgcgactcaggccgttggcgataagtggcttatcaccagtgggctgaagccgggcgataaagtgattgtcagcggcttacagaaagtccgtccaggcgtcactgtcaaagcggaagtggagcgtgcggcgccggccgtgcaataa

SEQ ID NO: 138842 - DNA, 654 bp, Enterobacter cloacae
atggcaagaaaaacaaaagaagaggcgcagcgcacgcggcagctcctgattgagtccgcaatccagcagttcgccctgcgcggagtaaccaacaccaccctgacggatatcgccgatgcggcgggagtgactcgcggcgcggtgtactggcattttgccagtaagacggagctgtttaatgaaatgtggcagcagcagccgccgcttagagatttgattcagcccagtcaggccatagagtacgaacaggagccgttaaatgctttacgcgagcggtttattgcaggcctgcgctatattgctgcgaatcctcgacagcgcgctctgatgcaaattctttatcagcgctgtgagttttccagtgatatgctttcggaatacgaaattcgccaacgtattggttttaattattcactcattggcggcatcctgcagtgctgcgtgcgtaacaatatattgccagccgaaacaaacattgagatgatattaattgttttacacagtgctttttccgggctgattaaaaactggctgctcgatccgcaacgcttcgatctttatcagcaggcgcctgcgctggtggataatataatggcggtggtctgtgctgcgcgtttatcgggagggcctgcgctacggctggtgaaacagtaa

SEQ ID NO: 138843 - DNA, 1089 bp, Enterobacter cloacae
  misc_feature (326)..(335): n is a, c, g, or t
atgagcgtatttaaccccgttgaccatccacatcgtcgttataacccgttaaccggacagtggattctggtttctccgcatcgcgccaagcgaccctggcagggggcgcaggaaacgccggcaaaacagaccttgccggcccacgatccggactgtttcctgtgcccgggcaacacccgggtgaccggcgacaccaacccgaattacaccggtacctacgtatttaccaacgactttgcggccctgatgaccgacaccccggacgcaccggagagtgacgatccgctgatgcgctgccagagcgcccgcggcaccagtcgggtgannnnnnnnnnctgccagagcgcgcgcggcaccagtcgggtgatctgcttctcgccagaccacagcaaaacgctgccggaactgagccttgaagcgctggaagacgtggttaaaacgtggcaggaacagaccgcggacctcgggaaaagctacccgtgggtgcaggtttttgaaaacaaaggggcagcgatgggctgctccaaccctcacccgcatggtcaggtgtgggccaacagtttcctgcccaatgaagcggaacgggaagaccgtctgcagaaagagtattacgccgcacagggccagccgatgctgctggactatgtgcagcgcgaactggccgacggcagccgcacggtggtggacaccgagcactggctggcggtggtgccctactgggccgcctggccgttcgaaacgctgctgttgccgaaagcgcacgtgcagcgcataaccgatctcaccgacgcccagcgcagcgatctggcgctggcgttgaaaaagctgaccagccgttacgacaacctgttccagtgctcattcccctactccatgggctggcacggcgcgccgtttaacgacgaagaccataaccactggcagcttcatgcccacttttatccgccgctgctgcgctccgcgacggtccgcaagtttatggttggttatgagatgctggccgaaactcagcgcgatctgaccgccgagcaagctgccgaacgactgcgcgccgtcagcgacgtccattttcgtgaatccggagtgtaa

SEQ ID NO: 138844 - DNA, 1017 bp, Enterobacter cloacae
atgaaagttctggttacaggtggtagcggttacattggaagtcatacctgcgttcaactgctgcagcagggacacgaggtggtgatcctcgacaatctctgcaacagcaagcgcagcgtactgccggtgattgaacgtctcggcggcaaagaagccacctttattgaaggcgatattcgtaacgaagcgctgatgacggagatcctccacgatcacgccattgaggcagtgatccacttcgccgggctgaaagccgtcggggagtccgtcgccaagccgctggaatattacgacaataacgtcaccggcacactgaaattagtctctgccatgcgcgccgctggcgtgaagaactttatctttagctcctccgctaccgtctacggcgatcagccgaaaatcccgtatgtcgaaagcttcccgaccggcaccccgcaaagcccctacggcaaaagcaagctgatggtggagcagatcctgaccgacctgcagaaagcccagccggagtggagcattgccctgctgcgctacttcaacccggtcggcgcccacccgtcgggcgacatgggggaagacccgcaggggatcccgaacaacctgatgccctacatcgcccaggtcgccgttggccgtcgcgaatcgctggccatttttggtaacgactatccgaccgaagatggtaccggcgtgcgcgattacatccatgtgatggacctcgccgatggccacgtcgcggccatggaaaaactggctgacaaagccggggtgcatatctacaaccttggcgccggcgtcggcagcagcgtgctcgacgtagtcaatgctttcagcaaggcctgcggcaaacccattaactaccatttcgcgccgcgccgcgatggcgacctcccggcctactgggcggatgctgccaaggccgaccgcgagctgaactggcgcgtaacgcgcaacctggacgaaatggcgcaggacacctggcactggcagtcccgtcatccgcagggttatccagactaa

SEQ ID NO: 138845 - DNA, 1473 bp, Enterobacter cloacae
atgtcatcattgcaaatttcgcaaggcacgtttcgcctgagcgatacaaagaccttaaaaatagaccacctgagcgtggcggcgggtgaaagctgggcgttcgtcggcagcaacggcagcggcaaatccgccctcgcgcgggccctggccggcgacctgaccctgctcagcggccagcgcgaaagccacttctcccgcgtaacccgcctctccttcgagcagttgcagaagctggtcagcgacgagtggcagcgcaataacaccgacctgctcagcccaggcgaagaagacaccggccgcaccaccgcggagattatccaggatgaggtgaaagatcctgcccgctgcgcgcgcctggccgaacagtttggcatcagcgccctgctggaccgccggtttaaatacctgtcgaccggggaaacgcgtaagaccctgctgtgtcaggccctgatgaccgatccgcaactgctgatcctcgatgaacctttcgacggtctcgacgtcaactcccgccagcagctggctgccctgctggccgacctgcacagcgccggcatcaccctggtgctggtgctcaaccgtttcgatgagatcccggagtttgtgcaattcgccggcgtgctggctgactgcaccctcagtgagaccggcgagaagtcttccctgctgcagcaggcgctggtcgcccagctggcgcacagtgaaaaactggacggcatcaccctgccggagccggatgtcccaccggcccgtcatgcgctggcagactcggcgccgcgtatcgtgctcaacgacggcgtggtctcctataacgatcgcccggtcatcaatcacctctcatggaccgtgaatccgggcgaacactggcagatcgtcggtcccaacggcgccggtaaatctacgctgctgagcctggtcaccggggatcatccgcagggctacagcaacgatctcacgctctttggccgccggcgcggcagcggtgagaccatctgggatattaaaaagcatatcggctacgtcagcagcagcctgcatctggactaccgggtcagcaccaacgtccgcaacgtcatcctgtcgggctattttgactcgatcggcatttatcaggcggtctccgacaagcagcataagctggtgcagcaatggctggatattctcggcatcgataagcgcaccgccgacgcgccgtttcacagtctgtcgtggggccagcagcggctggcgcttatcgtccgcgcgctggtgaagcatccaaccctgctgatcctcgatgaaccgctgcaggggctggaccccctcaatcgccagctggtgcgtcgctttgtcgacgtgttgattggcgaaggggccacacagctgctgtttgtctcgcaccatgcggaagatgccccggactgtattacccatcgcctggcgttcgttcccagtggagacggttacacttatcagctcggccccgtggcctga

SEQ ID NO: 138846 - DNA, 789 bp, Enterobacter cloacae
atgcaggccgaaattcttctcacccttaagctacagcagcgcctgtttgccgatccgcggcggatcgccctgctcaaacagattgaccagaccggttcgataagccagggggcgaagcatgcgggtatcagctataagagcgcttgggatgccatcaatgagatgaaccagctcagcgaacagccgctggtggatcgcgccaccggcggaaagggcggcggcggcgcggtgctgacccgctacgggcagcgtctgatccagctgtacgatctgctggcgcagatccagcagaaagcgtttgatgtactcagcgatgacgatgccctgccgctggatagcctgctggcggccatctcgcgcttttccctgcagaccagcgcccgcaaccagtggttcggcaccattaccggccgcgatcgccagcaggtgcagcagcacgtggaagtactgttggctgacggaaaaacccgcctgaacgtcgccatcaccgcgcaaagcgctgagaagctgggactcgatgagggccaggaggtgctggtcctgctcaaagcgccatgggtcggcatcaccctcgatcccgcagcagcccgccaggccgataaccagctgtcgggacgtatcagtcatatcgaatgcgggtccggacagtgcgaagtactgatgaccctggcggacggtcaaaccctgtgcgccaccctgccacaggcgcaggccgctggcctggcggaaggaacggaggcgatcgcttacttcaatgccgatcgcatcattctcgcgacgttatgctga

SEQ ID NO: 138847 - DNA, 150 bp, Enterobacter cloacae
atgttagagcttttgaaaagtctggtttttgcggtcatcatggtaccggtggtgatggcggtcatcctgggactgatttacggtcttggcgaagtgttcaacctcttctccggcgtaggccacaaagatcgcagccagcaaaatcactga

SEQ ID NO: 138848 - DNA, 774 bp, Enterobacter cloacae
atggcaggttcttggttacgcggggttgtcggggtatcactcacgctgtgcgtcgcgggtcaggcgctggcggcagagggtaaagtgaccgttttcgccgccgcatcgttaaccaacgcgatgcaggatattgcccaggcgtacaagaaagaaaaaaacgtcgaggtcgtgtcgtcgtttgcctcgtcttcgacgctggcgcggcagatagaagcgggtgcgccagcggacctgtttatctccgccgatcagaaatggatggattacgcggcagataaaaaggccatcgatccggcaacccgcgccactctgcttggcaacagcctggtagtggtcgcgccgaaagccagtgcgcagggggcgataaccattgatgagaaaaccgactggaccagcctgctgaaaggaggccgtctggcggtgggcgatccacagcatgtcccggccggtatctatgccaaagaggcactgcagaaactcggtgcctgggagacgttgtcgccgaagctcgccccggctgaagacgtgcgcggtgcgctggcgctggtggagcgcaacgaagcgccgctggggattgtctatggctccgatgccgtggccagcaagggggtgaaagtggtcggcaccttcccggaagcctcgcatcagaaagtcgagtacccgctggcgattgtcgatgggcaccgcaatgcggccgtgagcgccttctatgactacctgaaagggccggaagcgtccgctatctttaaacgttacggatttaccacccgctga

SEQ ID NO: 138849 - DNA, 591 bp, Enterobacter cloacae
gtgcttcaggacaccaatatcattcatttcgatatgcctaaggtggcccatccggggcgctatcatgcaattgtcgttctgggttatcaacttgataaagaaggaaatccacaggaaccgctaaaaggtattatggcgcaagcgctaaaagtggccaaacagtatccagactcaaaaattatcgttaccggcggcgtaccccgcaataatcgtgttgaagcggaagtgatgtggaaatactttaccgaaaatggaatcgctccatcacgcatcatacctgaggtgctctcttacgacaccgtacagaacgctaattacacagcgatgatcatgcgtaatttcaatatacgggaggcgacgatcgtgacccgagcaggtcatatccgcagaggtacggtactaatgaataatgcgctaaaactgtatgttccatggcaggtaaatttgacatcaatggcatggaaagacagtaatttcgccacagaggacgacgcaaaaaaaccgccaaaactcggtagcggcgattaccgctccacctatcgggatgtattacggctttaccgtcaggaatatccaggcttcgccatgtga

SEQ ID NO: 138850 - DNA, 1146 bp, Enterobacter cloacae
atgcagaagcgtattattgcaggattaatcacaggtttaattacagcgaatagccaagccgttaccctttatgaaaataaagaacaaggagccaagcttgatcttactggttcgttacgcatgatgttagaaaatagttctaaacgcggcaggacagatggcgatagcgattcaaaattaaaagatcagggtacacgtatcgggctgaagtttaaacgtggtctgggcgatcagttcgagagcgacagctggatgaagaatctgagcgccatcgcctatttcgaatatggcggagatactcaggcagcagaagataattttcattttgacaacagacaatcttatggggggctgagttacaaaggtattggtgaactagattttggtagagtgaaatcccccttcgattatgttcatcagtctgattatagctatgaatatggcagcagcggggcactttattttggcggagggaaaatagctcgtgttggtggcggagataataattttatcaagcgagaatccaatactatacgttttatgtctgaacgctggcatggtctaaaagtggcaacatcctataccatgcagactggaacaaatatcaatgatatcgataacgcttgggcgatggcgctactttacgactcaccctgggatctgacattaaatgccggtatcgcccaacagactaccaatggttcaaccgatgccaacgtcaaaagcgggtacacagacgtgaaagcggacaaagaaaatatatggggtatagggatgaagtacaacatcccacaaattaatctctcactggctctggactatggtggttatcaaatcaagaacggtaataaaggtagcggcaaaggttataccgcttatcaggacaccatcaatgtcgatcttttcggagctggcgctaagtggacctgggataaatggggtatctacggagtctatggactgcgcgatggcgatgcggcggctgacaattatcaggaaacccgcactatttttggcaccgattataccttcaacaaacaattcatcctgtggctggagtactgcaacatgaccgtcgattccgatgatgcggacgatcggtacagtgacgacaaaattgctcttggcgcacggtattatttctga

SEQ ID NO: 138851 - DNA, 1296 bp, Enterobacter cloacae
atgaaagcttacacgctaagtcttattgcactggcgctaacctcttcactggcgcaagccgcaacagccgatctggtgctggataaagtcgtaacgctgaaccgccatggtatccgcccacagatggatacggcaaaaatccaggcaatgtcgccagaaactttcccccattttcagggcaaagatggcgagctgaccatgcacggctacgctgccgtcacacgcatgggagattatttgcgggattacctgcagcaacgccagttccttaaaaaagatagctgcctcaatgccgacgatatttttgtccgcaccagcgccaaacagcgcacccgtatgacagcttacgccctgatcgatacactgtttcccggatgtggcgtcaaagtcagctcacccgccagcaaaaaagatacactgtttaaacccattgataatggcgtcgctccgctagatgtcgccagggccagcaacagcgtcttacaaaagatgggtggcagcctggaggcggcaaaacagcgttatgccggtgacatagcagcgatgcaaaaaatcgttgaccccaactgtaaaggtgatcaatgcacctactccagcggtgaatggtcgattaagaacctgaaggatcgcaatattgagctggaagggcctctattctggggtaacgagttgggtgaaaccttccgcctgcaatatgccgaaggactgccactggaacaggttgcgtttggccacgtcaaaaatactgacgacctgacacggctcaacaaactgcatcagattaagttcgatctaatacttcatgacccgtatatcgccgcccgcgctggctcacaactactgagccagatcctctatacgctggaaaaggggtctggtttccacgaccccaacgccagcccagagattgccgccagcgcgccggatgcacggatggtcatgtatttcggccatgactccaacctgacgccactgcaaaccctgctcaatgtctcctggcatctgaagggctacccgaaagatgatacgccgcccggaagcacgctgatgtttgaacgttatcgggatagcaaaacgcatcagacatatataggccttacctttatgacgcaaagcctggatcaaatgcgtcggctggagccgctaaatgtgaagaatccaccgctgcaacaaaagcttaatctgcactgtaaaaacagtccggacggctggctgtgcccgatagatgaatttgccgcgcagattaatagccgtctcgataagactgcgatgattgcgcagaactacgcggaatag

SEQ ID NO: 138852 - DNA, 240 bp, Enterobacter cloacae
atgaaaaaactaccggaccatttatccagggaatgcatcatcgccgccattcgcgcttacgatgcaggcgttgcgcatcagtttaaaagcgcgcgtctgtatgagatcgagtttgaggggcgtcggtatccttcaaaagccatcgtcgggttagcggccacgcttgcgacaggaacggaatttatcctggaagagatgacggtccggcttcggcccgttgaatggttactgactgcttga

SEQ ID NO: 138853 - DNA, 375 bp, Enterobacter cloacae
atggcgctgaatctggcaggcaagaaagaaactctgggccggtatctatcagaaagtaaaggcgctaacttctggctgtctatattaagcgacctgcaaaactggggcattgaagacatcctgatcgcctgcgtgggcgggctgaccggcttcccggaggcgataaacaacatttatccgcagacagaggttcagttgtgcgtcattcaccaaatcagtaactcgattaaatacgtggcctcaaatgaccataaagcttttatggctgatctgaaaccggtatatcgcgcggggtcgaaagaagccgcagaaacggtgctggatgagctggaagcgaaatgggatcagcagtatccagtattgctcaagtcgtga

SEQ ID NO: 138854 - DNA, 810 bp, Enterobacter cloacae
atgaccaatatgaagttaaaatttgatttgcttctaaaatcttatcatctatctcatcgatttgtctataaggcaaaccctggtaatgctggtgatggtgtaattgcatctgcgacgtatgacttttttgaacgaaatgctcttacctatatcccttacagagatggcgagcgctacagttctgaaactgatattttaatttttggaggcggaggaaacctgatagaaggattgtattctgaaggtcatgactttatccagaataatattgggaagtttcataaagtaataataatgccgtcgacaatcagagggtatagcgatttattcatcaacaatattgataagtttgttgttttttgtcgcgaaaatatcaccttcgattatattaaatctctcaactacgaaccaaacaagaacgtattcattactgatgatatggcattttatctcgatcttaataaatacctgtcacttaaacccgtctataaaaaacaggccaactgcttcagaacggactccgaatctctaactggagactacaaagaaaacaatcatgatatttcgctcacttggaatggcgattattgggataatgaatttctggcgcgtaattctacccgttgcatgataaactttcttgaagagtataaagttgtcaataccgacaggctgcatgtggcaattttagcatctctgcttggcaaagaagtcaacttctatcctaactcatattacaaaaatgaagctgtttacaattattcactttttaatcgttatccaaaaacatgctttattacggcaagttga

SEQ ID NO: 138855 - DNA, 3498 bp, Enterobacter cloacae
atgattacgattgatggtaatggcgcggtcgcttccgtcgcgtttcgcaccagtgaagttatcgccatctacccgatcacgcccagttcaacgatggcggaacaggctgacgcctgggccggcaatgggctgaaaaacgtctggggcgatgttccccgcgtggtcgaaatgcagtcggaggcgggcgccattggcgccgtacatggcgcgctgcagaccggcgccctctccacctcctttacctcatcgcagggcctgctgctgatgatccccaccctgtacaaactggccggccagctgatgccgtttgtgctgcacgtcgccgcccgcactgtcgctacccatgcgttgtcgatcttcggcgaccattccgatgtcatggccgtccgccagaccgggtgcgccatgctgtgcgccagcagcgttcaggaagcgcaggatttcgcgctaatctcgcatatcgccaccctgcaaagccgggtgccgtttattcatttctttgatggtttccgtacttcgcacgaaatcaacaaaatcgccccgctggcggatgacactattcgcgccctgctgccgcaggataagatcgctgagcatcgccagcgcgcgctcaacccggaacacccggtgatccgcggaacctcggccaaccccgacacttacttccagtcccgggaagctaccaatccgtggtacgacgcggtgtatgaccatgtcgagaaagcgatggacgacttcgctgccgccaccggccgtcagtacaaaccgtttgagttttacggccacccgcaggcagagcgcgtgatcgtcattatgggctcggccatcggcacctgcgaagaggtggtcgatgagttgctgagtcgcggcgagaaagtcggcgtgctaaaagtccgcctctatcgcccgttctccgccgcccacctgctggcggcgctgccggagagcgcccgcgcggttgccgtactggatcgcaccaaagaacccggcgcgcttgccgaaccgctttacctcgacgtgatgaccgccctggcggaagcctttaaccgcggcgagcgcgagacgctaccgcgcactatcggcggccgctacggtctctcctccaaggagtttggtccggaatgcgtgctggcgatattcagtgaactgcaggccgcccagccgaagccgcgctttaccgtcgggatctatgatgacgtgaccaacctgtcgctgccgctgggcgaaaataccctgccggcagaggccaagcttgaggccctgttctacggcctcggcagcgacggcagcgtgtcagccaccaaaaacaacatcaaaatcatcggcaactcgaccccatggttctcccagggctattttgtctatgactcgaagaaagcgggcggcctcaccgtctcgcatctgcgggtcagcgaaaaaccgattcgttcatcgtatctgatttcgcaggctgatttcgtcagctgccaccagctgcagtttatcgataaataccagatggccgagcggctgaagcccggcggcattttcctgctcaacacgccgtacagcgccgatgaggtctggtcccgcctgccccaggaagtccaggccaccctgaatcagaaaaaagcgcgtttttacgtggtcaacgcggcaaagatcgcccgcgaatgcagcctcggggcgcgcattaataccgtgatgcagatggcctttttccatttaacccagatcctgccgggtgatagcgcgctggcggaactgcaggcagccatcgccaaaagctacagcagtaaaggtcaggagctggtggagcgcaactggcaggcgctggccctggcccgtgaatcactggcggaagtaccgctccagccggtgaacgccagcagtccgaaccgcccgccggtggtctccgacgccgcgccggatttcgtcaaaacggtcaccgccgcgatgctggccgggctcggcgatgcgctgccggtctctgccctgccgccggacggcacctggcccatgggcaccacccgctgggagaaacgcaacatcgccgaagagatccccatctggaaggaagcgctgtgtactcagtgcaaccactgcgtcgccgcctgcccgcactcggcgatccgcgccaaagtggtcgccccggaagagatggagaacgcccctgccagcctgcattcgctggatgtgaaatcccgcgatatgcgcgggcagaaatacgttctgcaggtcgccccggaagactgcaccggctgcaacctgtgcgtcgaagtgtgtccggcgaaagaccgccagaacccggagatcaaggccatcaatatgatgtcccgcctggagcatgtggaagaggagaaggtcaattacgagtacttcctcaacctgccggaaatcgaccgcagcaaactggagcgcattgatattcgcacctcacagctgatcagcccgctgtttgaatactccggcgcctgctcgggctgtggcgaaacgccgtatatcaaactgctgacccagctgtacggcgaccgaatgctgattgccaacgccaccggctgctcctccatttacggcggcaacctgccctcgacaccgtacactaccgacgccaacggccgcggcccggcgtgggccaactcgctgtttgaggataacgccgaattcgggctcggcttccgcttgaccgtcgaccagcatcgccagcgcgtgatgcgcctgctgagcgaattcgccgacaagctgccggcagagctgaacgcggcgctgcacgccgaggcgacaccggaagttcgccgcgaacaggtggcggccctgcgtcaggcgctggccggcgtggcgggagctgaagagctgctgaccgatgccgacgcactggtggagaaatccgtctggctgatcggcggcgacggctgggcttacgatatcggcttcggcggcctggaccatgtactgagcctgacggaaaacgtcaatattctggtgctggacacccagtgttactccaacaccggcgggcaggcgtcaaaagccaccccgctgggagcagtgactaagtttggcgagcatggcaaacgcaaggcgcgtaaagatctgggcgtcagcatgatgatgtacggtcatgtttatgtggcgcaaatttcgctgggcgcgcagctgaaccagacggtgaaagcgattcaggaagcggaagcctatccggggccatcgctgatcatcgcctatagcccttgcgaagagcatggctacgatctggcgctcagccacgaccagatgcgtcagctgaccgccaccggcttctggccgctctaccgcttcgacccgcgtcgggcagacgaaggcaagatcccgctggcgctagattcccgtccgccatcagacgcgctggccgagacgctgctgaatgagcaacgtttccgccgcctgaacgcccagcagcctgaagtggcggagcagaagcgctatgacttcctcgcccagctggctggcaaagcggagaaatcgccaagcgaaggttaa

SEQ ID NO: 138856 - DNA, 441 bp, Enterobacter cloacae
atgaacaaatttgcggcgcttctggcggcaggtatgctgctgtccggctgtgtctataacagtaaggtgtccaccggtgcggaacagctgcagcatcatcgtttcgtgctgaccagcgtcaacggccaggcggtcaacgccagcgaccggccgctggagctgagcttcggtgagaagatggctattaccggcaagatgtatgtatccggcaatatgtgcaacggctttagcggggaaggtaaagtgtcggacggcgagctgaaggtcaaatcgctggcgatgacccggatgctgtgccacgacgcccagctcaataccctggatgcgacgatcgacaagatgctgcgcgagggtgcgcaggtcgatctgacggaaaaccagctgacgctggcgaccgccgaccagacgctggtctataagctcgccgacctgatgcactag

SEQ ID NO: 138857 - DNA, 990 bp, Enterobacter cloacae
atgaaaatcgcggtttatagtacgaagcagtacgataaaaagtacctgcagcacgttaatgatgcatacggctttgaactggaattcttcgatttcctgctgacagcgaagactgccaaaaccgccaacggttgcgaagcggtatgtatcttcgtcaatgacgacggcagccgcccggtgctggaagagctgaaggcccacggggtgaaatatatcgccctgcgctgcgccgggtttaacaacgtcgaccttgaggcggcaaaggagcttggcctgcgcgtcgtgcgcgttccagcttactctccggaagcggtcgctgagcatgcgatcggtatgatgatgtcgctcaaccgccgcatccaccgcgcttaccagcgtacccgcgatgccaatttctccctcgaaggcctcaccggcttcaccatgtacggcaaaaccgccggggtgatcggcaccgggaaaattggcgtagcgatgttgcggatccttaaaggcttcggcatgcgcctgctggcgttcgacccgtacccaagcgccgccgcgctggagctgggggtggaatatgttgacctcgccacgctgtacaaggaatcggacgtgatctccctgcactgtccgctgaccgacgaaaactaccacctgctcaatcgcgaagccttcgatcagatgaaagacggggtgatggtgatcaacaccagccgcggcgccctgatcgactcccaggcggccatcgacgccctgaagcaccagaaaattggcgcgctggggctggacgtttatgagaacgaacgcgatctgttctttgaagacaaatccaacgacgtgatccaggacgatgtcttccgccgcctctccgcctgccataacgtgctgtttaccggccaccaggcgttcctcaccgccgaggcgctgatcagcatttcggagaccactctgggtaacctgcagcaggtcgccaacggcgaaagctgtccgaacgccatcgtctaa

SEQ ID NO: 138858 - DNA, 501 bp, Enterobacter cloacae
gtgtcgttaattatctcgctcatagagagcgcacaggaccactatccatgggtattgctgattgtttttctgcttaccttcactaaatcctgcgcattggtctcgctggcaatccccggcacctccggcctgctgctgctggggacattcgcttccgccagcctcggacatttcctgttaatgtggtccagcgccagcctcggcgccatcggcggattctggctatcgtggcggctgggcattcgctaccgtcatcgcctcacccatctacgctggctgaccgccgagcgtctggcccgcagccgcctcttctttcagcgctatggcccgtgggctatctttttcagccgctttctctctcccctgagggctacgctgcccttcgttagcggcgccagcagtctgccgctgtggtcgtttcagctggctaacgtcagctccggtctgctgtggccgcttctgctgctcgcccccggcgctttcagcctcagtttgtggtga

SEQ ID NO: 138859 - DNA, 798 bp, Enterobacter cloacae
atgctggtcggcctgctggcccccgcctgctcgccggcgatcggcggcctgttagtcgaggcgttcagctggcgctggatctttttcgccagcctgcctgtggctctgctaacctttgtgctggcggtgcgatggctgaacgacaccccccgtctggttcgcccgactcgctttcttccactgtcgctgctggccgatcccctgctgcgcttcgcgatgctgatctatctctgcgtgccggggatgtttattggcgtcaacgtggtggggatgtactacctgcaacgcgtcaccgggatggcgccgggggcaatcggtgccctgatggtgccctggtcgctggcctcgtttgccgccatcacttttaccggcagatatttcaaccgcttcgggccccggccgctggtcgtcatcggctgcctgcttcaggcgatggggatcatgctgctgctgaagatcgatgcggacagcccgctggcgctgttgattctggcctttacgctgatgggcggcggaggcagcttatgcagcagcaccgcgcaaagcagcgctttcctgcatacgcctgccgaagagatgcctgacgccagcgcgctatggaatcttaaccgccagctcagcttctttgccggcagcgccctgctcgccctgctgctgagggtattcccgccggcctacgcctggcagggggtatttattagcgccgccgtcattaccctgttgccgctgctgttttgcctgcggctgaataatcgggcgattatccatcgcctgcacaccactctggagaagtcatga

SEQ ID NO: 138860 - DNA, 993 bp, Enterobacter cloacae
atgagtcagaatacgctgaaagttcatgatttaaatgaagacgcggaatttgatgagaacggaattgaggttttcgacgagaaagccttagtagaagaggaacccagtgatagcgatctggctgaggaagagctgctgtcgcaaggcgcaacccagcgcgtacttgacgccactcagctttatcttggagagattggttattccccactgctgaccgcggaagaggaagtctatttcgcgcgtcgcgcactgcgtggtgatgtcgcttcacgccgtcgcatgattgaaagtaacttgcgtctggtggtgaagattgcccgtcgttacagcaatcgtggtctggcgctgctggatctgattgaagaaggtaacctcggcctgatccgcgccgttgagaagtttgacccggaacgtgggttccgtttttcgacctacgcgacctggtggatccgccagactattgaacgggcgatcatgaaccaaacccgtacgatccgtttgccgatccatattgttaaagagctgaacgtctatctgcgtaccgcgcgcgagttgtcccataagctggaccacgagcctagcgcggaagagatcgccgaacagctggacaaaccggtcgatgacgtcagccgtatgctgcgtctgaacgagcgcatcacctccgtggatactccgctgggtggcgattcagaaaaagcgctgctggatattctggccgatgagaaagagaacggcccggaagacaccacgcaggacgatgatatgaagcaaagtatcgtcaaatggctgttcgaactgaacgccaagcagcgtgaagttctggcacgtcgttttggtctgctgggttatgaagctgccacgctggaggatgtgggccgtgaaattggcctgacccgcgaacgcgtgcggcagatccaggtagaaggtctgcgtcgcctgcgggaaattctgcagggacaggggctgaatatcgaagcgctcttccgcgaataa

SEQ ID NO: 138861 - DNA, 1137 bp, Enterobacter cloacae
atgagcgcgggaagcaccaaatttaccgtcagccgtattgcggctctttcactggtttcactctggctggccgggtgtaccaacaccaataatccgcctgcgccggttagctctgccggcggcgccgcctcttccagcaccaactccggcatgctgattacgccgccaccctccggcgtcaagtccgctcctcaggcgcagccgattcagccgatgcagacccagaccattcagccgcagccggcgccggtggcgcaggagccggtacagacggtaaatggccggatcgtttacaaccgcaaatatggcgatattccgaaaggtagctataccggcggcagtacctatacggtaaaacgcggcgacacgctattctatatcgcctgggtcaccggcaacgatttccgcgacctggcgcaacgcaacaatatcccggccccgtacgcgctgaacgtggggcaggtactgcaggtcggtaacgcctcaggccagccgatcaccggcgaaaacgccgtttctcaggccagcgcaagagcgagcggcggtgcgacgaccagcacaacttctgcacaaaaatcgaccgcggtggttgcttcacaaccgactattacgtattctgaatcttcaggtgaacagagtgctaccaagatgttgcctaataataaaccagcgactacaaccacaacggttgtcgcgccggtgacggcaccaacaacggtgagcacaacccagccgactgcaagcagtacgtcaaccagttcgccgatctcagcatggcgctggccgactgatggcaaggttatcgagaactttagcggcgcggaaggcggcaataaaggtatcgatattgcaggcagtaagggacaggctattgtcgcgaccgccgatgggcgcgtcgtctatgccggtaacgcactgcgcggctacggtaatcttattatcatcaaacacaacgatgattacctgagtgcctacgctcataacgataccatgctggttcgggagcaacaggaagtcaaagcggggcagaaaatcgctaccatgggtagcaccggaaccagctcaacaagattacattttgaaattcgttacaaggggaaatccgtcaacccgctgcagtacttaccgcagcgataa

SEQ ID NO: 138862 - DNA, 627 bp, Enterobacter cloacae
atggtaagtaaacgtgttgaaagtttgttgaatcaactgcgcacgcagggcatcgtcgatgaacgtgtcctcgaggcgatcgcgctggtcccgcgcgaaaagtttgttgatgaagcctttgaacataaagcgtgggaaaacaccgcgctgccgattggccaggggcagaccatctcccagccgtatatggtggcgcggatgaccgagctgctgacgctgacgccggagtcgcgggtgctggagatcggcaccggttccggctaccagacggccatcctggcgcatctggtgcatcacgtatgctcggtagagcgaattaagagtttacagtggcaggcgcgtcgtcgcctgaaacaacttgatttacataatgtttcaacccgtcatggcgatgggtggcaaggttggcaggcgcgggcgccgtttgatgccattattgtgacggcggcgccaccggaaataccgaccgcgctgctggcgcagctggatgatgacggcgtgctggtgctgccggtcggcgaagagcatcagtttctcaaacggatccgtcgtcggggcaacgaatttatcattgataccgtcgaggccgttcgctttgttcccctggtgaagggggagctggcctga

SEQ ID NO: 138863 - DNA, 717 bp, Enterobacter cloacae
atgcgaatattgctgagtaacgatgacgggatccatgcgccggggatacagaccctggcgaaggccttaagggagtttgccgaggtccaggtggttgcacccgatcgtaaccgcagcggggcctcaaattcgctgacgctggaatcgtccctgcgtacgtttacctttgaaaatggcgacatcgccgtccagatgggcaccccgaccgactgtgtctatctcggcgtgaacgcgctgatgcgcctgggcgacgacgtcatctattccggcactgtggccgcggcgatggaaggccgtcatctggggttccccgcgctggccgtgtcgctgaacggctatcagcattacgataccgccgcggcggtaacctgcaccattctgcgcgccttaagccgcgagccgctgcgtaccgggcggatccttaacatcaacgtgccggatctcccgcttgatcaaatcaagggcattcgcgtgacccgctgcggcaaccgccatccggccgaccaggtgatcccgcaacaagatccgcgcggcaacaccctgtactggattggcccgccgggcgataagcgcgatgccgggccgggcaccgattttgcggcagtggatgaaggctatgtttccgtgacgccattgcacgtcgatttaaccgcccatcaggcgcatgaggtggtcaccgattggctggaacgtgtcggggttgacaggcaatggtaa

SEQ ID NO: 138864 - DNA, 1050 bp, Enterobacter cloacae
atgatcgcctttgaccaactgacctggctgcacggcaaaccgcagagcagtgggctgctgaaagccaatccggaagattttctggtggtggaagatctgggatttgccccggacggcgaaggcgaacacgtgctggtgcggatcctgaaaaacggctgcaacacccgttttgttgccgatgcgctggcgaaattccttaaaatccatgcgcgcgaagtgagctttgccgggcaaaaagataagcacgcggtcaccgagcagtggctgtgcgcccgggtgcccggcaaagagatgccggacctgagcaaatttcagctcgagggctgccaggtactggaatatgctcgccataagcgtaagctgcgtttaggcgcgctgaaaggcaaccagtttaccgtgatcctgcgcgagattagcgatcgccaggacgtggagacgcgtctgcaggccatcgctgaacggggagtgccgaactatttcggcgcgcagcgcttcggcattggcggcagtaacctgcagggcgccctgcgctgggcggagagcggcgcgccagtgcgcgatcgcaataagcgcagtttttggttgtcggcagcccgcagcgcgttgtttaatcagcaagtgagtattagattaaaaaaaacggaatttaatcaggtcgttgatggcgatgcgctacaattagcggggcgcgggagctggtttgtcgtcacaccggaagaactcgaggtttcgcaggcgcgggtgcataaccgcgaactgatgattacggccacgctgccgggcagcggcgactggggaagccagcgcgacgccctggctttcgagcaggccgcgattgccgaggaaaccgcgttgcaggcgctgctggtgcgggagaaagtcgaggcggcgcgccgggcgatgcttctctatccacagcagctcagctggaactggtgggatgacgtaaccgttgaactgcgtttctggctgccggcgggcagcttcgccaccagcgtggtcagggagcttatcaatacaacgggtgactatgcgaatattgctgagtaa

SEQ ID NO: 138865 - DNA, 480 bp, Enterobacter cloacae
atgcgaattggacatggttttgacgtacacgcttttggcggtgaaggcccaatcatcattggcggggtacgcattccttatgaaaaagggctgctggcccactccgacggcgacgtcgcgctgcatgcgctgaccgacgcgctgcttggcgccgcggcgctgggcgatatcggcaagctgttccccgataccgatccggcgtttaaaggcgccgatagccgcgaactgctgcgcgaagcatggcgccgcattcaggccaggggctatacgctcggcaacgtcgacgtcacgattattgcccaggcgccgaaaatgctgccgcatattccgcagatgcgcgtctttatcgctgaggatctcggctgccatatggacgacgtcaacgtgaaagcgaccaccaccgagaagctcggcttcaccggccgcggggaagggatcgcctgcgaagcggttgcgctgctgcgtaaggccgacaaatga

SEQ ID NO: 138866 - DNA, 1713 bp, Enterobacter cloacae
atgagcgaaaaacatccggggcctttagtggtcgaaggtaaactgagcgatgccgagcgcatgaagcttgagagcaattacctgcgcggcaccattgcggaagatttaaacgacggcctgaccggcggttttaaaggcgataacttcctgctgatccgtttccacggcatgtaccagcaggacgatcgcgatatccgcgcggagcgcgccgcccagaagctggagccgcgtcatgcgatgctgctccgctgccgtctgccgggcggggtgatcaccaccacccagtggaaggcgatcgataagtttgccgctgagaacaccatttacggcagtattcgcctgaccaaccggcagacctttcagttccacggcattctgaaaaagaacgtcaagccggtgcatcagatgctgcactcggtggggctggacgcgctggccaccgccaacgatatgaaccgtaacgtgctgtgcacctccaacccctacgagtcgcagctgcacgctgaggcctacgagtgggcgaaaaagatctccgagcatctgctgccgcgtacccgcgcttatgccgagatctggctggatcagaaaaaggtcgccactaccgacgaagagccgatcctcggccagacctatctgccgcgtaagtttaaaaccacggtggtgatcccgccgcagaacgatatcgatctgcacgccaacgacatgaacttcgtggcgatcgccgaaaacggcaagctggtgggctttaacctgctggtgggcggcggtctctctatcgaacatggtaacaaaaaaacctacgcccgcacggcgagcgaattcggttatctgccgctggagcatactctggcggtggcggaagcggttgtgaccacccagcgcgactggggcaaccgtaccgaccgtaagaatgcgaaaaccaagtacacccttgagcgcgtcggtgtcgaaaccttcaaagcggaagtggagcgccgggcaggcattaagtttgagccgatccgcccgtacgaatttaccggccgcggcgatcgcatcggctgggtgaaggggattgatgataagtggcacctgacgctgtttattgaaaacggccgcattctcgattatccgggtcgtccgctgaagactggcctgctggagattgctaaggtccatcaaggcgaattccgcatcaccgctaaccagaacctgattgtcgccagcgtaccggaagatcagaaggcgcggatcgagaagctcgcgcgggatcatggcctgatgaatgccgtcaccccgcagcgcgaaaactcgatggcctgcgtctccttcccgacctgcccgctggcgatggcggaagccgagcgtttcctgccgtcctttatcgacaaggtggaaggggtgatgagcaagcacggcgtgagcgatgagcatatcgtcacccgcgtcaccggctgcccgaacggctgcggccgcgcgatgctggcggaagtgggactggtgggcaaagcgccgggccgctataacctgcacatcggcggtaaccgcaacggcacccgcatcccgcggatgtaccgtgagaatattaccgagtcggaaattctcgactcgctagacgaactggtagggcgctgggcgaaagagcgcgaagcgggtgaaggcttcggcgattttacggtgcgtgcgggcatcattcgcccggtgctcgacccagcccgcgatttctgggaataa

SEQ ID NO: 138867 - DNA, 735 bp, Enterobacter cloacae
atgtccgtactcgatctaaacgcgcttaatgcattgccgaaagtggaacgcattctggcactcgcggaaaccaacgcccaactggaaaagcttgacgccgaagggcgtgtggcgtgggcgctggaaaatctgccgggaaactatgtgctgtcgtcgagctttggcattcaggcggcggtaagtttgcatctggtgaatcagatccgcccggacattccggtgatcctcaccgataccggctacctgttcccggaaacctatcagtttattgacgagctgacggacaagctcaagctgaacctgaaggtctaccgcgcggctgaaagcgcggcctggcaggaggcgcgctacggcaagctgtgggagcagggcgttgagggcattgagaaatacaatgagatcaacaaggttgagccgatgaaccgggcgctgaaagagctcaacgcgcagacgtggtttgccggtctgcgccgcgagcagtcgggcagccgggctacgcttccggtgctggcggtccagcgcggggtgttcaaagtgctaccgattatcgactgggataaccgcacggtgtatcagtacctgcaaaagcacgggctgaagtaccacccgctgtgggatcagggctatctgtcggtaggcgatacccacaccacccgcaaatgggagccgggcatggcagaagaagagacccggttcttcgggcttaaacgcgagtgcggattgcacgagggttaa

SEQ ID NO: 138868 - DNA, 885 bp, Enterobacter cloacae
atgctctcagctgactatctgcgccagcagttcgccctgatggggtatcagagcgacgtgcgaagcttcaatacccgctatatctataccgacagcaatcagcgcaagaactggcataacgccaccggcagtacggtgatcgccgcccatgaaggtaaagtgcgccagcagattattatcatggcacacctcgacacctatgcgccgcagagcgataaagacgtggagaacaacctcggcggcctgacgctgcagggcatcgacgacaacgcgatgggacttggcgtgttgctggagctggcggagcatttaaagaacgtccctacccgctatggcatccgctttatcgccaccagcggtgaagaggaaggccgtctcggcgcgcaaaacctgctgcagcggatgagcgaagcggaaaagaaaaataccctgctggtgatcaatctcgataatctggtggtgggcgataagctttacttcaacagcggccgcagcacgccggcctcggtgcgcaagctgacccgcgatcgcgcgctggctatcgctcgcagcaagggcatcgccgcctacaccaacccgggactcaacccggcttatccgaaaggcaccagctgctgcaatgacgccagcgtcttcgacaacgccgggatcccggtgctgtcggtcgaggcgactaactggtcactcggcaaaaaagatggctatcagcagcggagcaaatcggccagtttcccgcagggaaccagttggcacgacgtccagctggataatcagcagtatatcgaccacgcgctgcccgggcgcatcgaacaccgcggacgcgaggtagtgaaagtcatgctgccgctggtgaaagagctggcgaaggtggagaagaaaagctaa

SEQ ID NO: 138869 - DNA, 513 bp, Enterobacter cloacae
  misc_feature (498)..(507): n is a, c, g, or t
gtggattacttgcccctttttgccgaactgaaacaaaggcccgtgctggtgatcggcggcggcgagattgctgaacgtaaaatcaagttcctgctgcgcgcccaggcgcaggtgcaggtggtcgctgaaacgctgtcaccggcgctggccgatctggctgcgcgccaggcactcagctggcgggcgacggcattcagcgactcgctggtggatgatgtctttctggtgattgcggccaccgaggatgaggcgcttaaccagcgggtatttgcggcagctaacgcgcgctaccggttggtcaacgtggtggataaccaggcgctgtgctcgtttgttttcccttctatcgtcgaccgttcgccgctgctggtggcgatctcctccagcggtaaagcgccggtgctgtcgcgcattctgcgtgaaaaaatcgaagcgctgctgccgacgaatctcggtcggctggcggaatcagcaagctactggcgcaaccatctgaannnnnnnnnnatctga

SEQ ID NO: 138870 - DNA, 846 bp, Enterobacter cloacae
atggtggcgggcaactctgcggaggcggaaaaagcgctgcaggatgagctcgacaaacctgaacgcgagacgggagaaattattctggtcggcgccgggccgggcgatgccgggctgctgacccttcgcggtctgcaggcgatccagcaggcggacgtggttttccacgatcatctggtgactcagccggttctcgagctggtgcgccgcgatgccgaacttatttgcgtcggcaaacgcgccggcgagcattcggtgccgcagcatgaaaccaatcagctgctggtggaggcggcgaaggcggggaaaaccgtcgtgcgcctgaagggcggcgatccgtttatttttggccgcggcgcagaagagctgcaggctgccgccgaggcggggatcccgttccaggtggtgccgggcgtcaccgctgccgccggggcgacggcctacgccggtattccgctgacccatcgcgattatgcgcaaagcgccgtctttgtcaccggccactataagccggacagcgcccccttcgactggtcgctgctggcgaagagccaacagacgctggcgatctacatgggcaccatgaaggcggcggaaatcagcgcccagctgatcgcccacggtcgcgacagcgacacgccggtggcggtgatttcccgtggcacccgtgacgatcagcagacgataaccggcacattgcaacaactcgaacacctggcgaaagacgccccgatgcccgccctgctggtggtaggcgaagtggtgcagctgcatcagcagctcgcctggtttcaacatacatcatccgccgaggggtttaacgcttcggtggtcaatctggcttaa

SEQ ID NO: 138871 - DNA, 909 bp, Enterobacter cloacae
atggaccaaaaacgactcactcacctgcggcaactggaggcggaaagcatccatattattcgtgaggtggccgccgaattttctaacccggtaatgatgtactccatcgggaaagattccagcgtaatgctgcatctggcgcgcaaagcgttttatccgggaaccctgccgttcccgctgctgcacgtcgataccggctggaaattccgtgagatgtatgagttccgcgaccggaccgctaaagcctacggctgtgaactgctggtgcataaaaacccggaaggggtggcgatgggcatcaacccgtttgtccacggcagcgccaagcataccgatatcatgaaaaccgaaggcctgaagcaggcgctgaacaaatacggctttgacgccgcgttcggcggcgcgcgtcgcgacgaagagaaatcccgcgcgaaagagcgcatctactccttccgcgaccgcttccaccgctgggacccgaaaaatcagcgtccggagctgtggcacaactacaacggccagattaacaaaggcgaaagcatccgcgtcttcccgctctccaactggacagagctggatatctggcagtacatctatctggaaaatattgaaatcgtgccgctgtatctggccgctgagcgtccggtgctggagcgcgacggtatgctgatgatgatcgatgacgaccgtatcgatctgcagccgggcgaggtgattgaaaaacggatggtgcgtttccgtaccctcggctgctggccgctgaccggcgcggtggagtctgaagcgcagacgctacccgaaattattgaagagatgctggtatcgaccaccagcgaacgtcaggggcgcgtcattgaccgcgaccaggccggctcgatggagctgaagaaacgtcaggggtatttctaa

SEQ ID NO: 138872 - DNA, 291 bp, Enterobacter cloacae
atggaatataaagatcccgtgtttgaactgctgagcagcctggaacacatcgtttttaaggatgataatcagaaacttacctcaaaccgtaagtccactgtgtttagtgaatttgaacagctgcgtaaaggcactggacttaagattgacgactttgccaacgtcatgggcgtgagcgtcgccatggtaagagagtgggagtcgagacgggtcagaccgtctcccaccgagctgaaattgatgcgcctgattcaggccaatccacagctttcacgacaattactcgattaa

SEQ ID NO: 138873 - DNA, 1356 bp, Enterobacter cloacae
atgactaagacaaccatcgacattcaggcctttatcaacgagcaccccttcacccgctaccagtggatgatccttgcgctctgctttatcaccgtcgcgatggacgggttcgataccgcaattatcgggttcatcgcctccgacctggtgcaagagtggggcgtggaaaaatcggccctcggcccggtgatgagcgccgcgctggtgggcctggcggtcggcgccttaaccgcagggccgctggctgaccgcatcggccgcaaaaaagtgctgatcatgtcgatcgtggtgttcggcggattcagcctgctcaccgccttcgccaccagccttaatcagctgacgctgctgcgcttcctgaccggtctgggccttggcgcggcgatgccgaatgccgcgacgctaatgagtgaatatgcgccggagcgccgtcgggcgctgctggtgaacctgatgtttgtcggctttccgatgggatcttcgctgggcggctttttatccgcctggatgatcccgcactatggctggcagagcgtgctggtgctgggcggcgtgatgcccctcctgctggcggtggcattaatattcctgctgccagagtccgtccgctatctggtggtgaagcagcacccggcgcagcgcattgctgctatcctgcgccgtatcgcgccgctgccgaaggcggtggaatttgtactacgcgaagcaggccaggtgaaagagaaatccgctatcggcgtcattttctcccctcgctacgcggtgggtaccgtgatgctgtgcctgacctactttatgggtctgctgattttctatctgctgaccagctggctgccgctgctcatccgtgaaaccggcgcctcgatgagtcaggcctcaattatcaccgccctgttcccgctcggcggcgggattggcgtgctgatcctcggcgccctgatggacaagatcaaccccaataaagtggtggccgtcggctggctgctgaccggcgtttttgtctgcctggtggggttctccaccagcagcctggcgctaatgggagtgatggtctttatcgccggcagcattatgaacggcgcgcagtcgtcgatgccggcgctggcggctggcttctatccgacgcaggggcgcgccaccggcgtcgcctggatgctgggtatcggccgcttcggcggcatcctcggcgcgttcagcggcgccttcctgatgcaggctcagctctcctttgagaccattttcaccctgctggccatcccggcgttcctgtcagcctttgcgctgctgatcaagtaccgggtcagtaaatccgtgccggcgacgacagatgaggcgagaagcctgcagaaagcctaa

SEQ ID NO: 138874 - DNA, 711 bp, Enterobacter cloacae
atggcgacaggaaagtcctgctctcgctggtttgcggctatggcggccttattgatggtggttagcctgagtgggtgttttgataaagagggcgatcagcgcaaagcgtttatcgacttcctgcagaatacggcgatgcgtagcggtgaacgtctgccgacgctgaccgccgatcagaaaaaacagtttgggccttttgtctctgactacgcggtgatctacggttactcgcagcaggtgagccaggcgatggacgctggtctgcgcccggtggtggacagcgtcaatgcgatccgcgtcccgcaggattatatgacccagcgtgagccgctgcgtcaggcgaacggcgcgctgggcgtgctcagccagcagctgcagaatgcgaaaatgcaggccgatgccgcgcatggcgcgctgaagcaggctgacgatctcaagccggtcttcgatcaggtttacgccaaggtggtgacggcgccagccgacgcgctgcagccgctgatcccggccgcgcagatctttacccagcagctggttcaggttggggattttgtcgctcagcaggggacgcaggtgagctttgtcgccaacggcattcagttcccgacctcccagcaggccagccagtacaatgcgctgattgggccgctggcggcgcagcatcaggcgtttaatcaggcatggacggcggcggtgaacgccacccgttaa

SEQ ID NO: 138875 - DNA, 972 bp, Enterobacter cloacae
atgaagccgtctgtcattctctataaaacgcttcccgacgacctgctacagcgtctggaggagcacttttccgtcactcaggtgaaaaacctgcggccggagaccgtttcgcagcacgctgaggccttcgcccaggctgaaggcctgctgggctccagcgaaaaggttgacgccgcgctgctggagaagatgccgaagctgcgtgcgacctccaccgtttccgttggctatgacaacttcgacgtcgaggcgctgaacgcccgccgggtgctgctgatgcataccccgaccgtgctgaccgagaccgtcgccgatacggtcatggcgctggtgctgagtaccgcgcgtcgggtagtggaagtggcggagcgcgtcaaagcgggtgaatggacgaagagcattggtccggactggttcggcacggatgttcaccataaaaccttaggcatcgtcggcatgggccgcatcggtatggcgctggcgcagcgcgcccacttcgggttcggcatgccgatcctgtataacgcgcgtcgccagcatccgcaggcggaagaacgcttcaatgcccgctattgcgatctcgataccctgctgcaggaggctgactttgtctgcctgatcctgcccctgagcgaagagactcaccatctgttcggtcaggcgcagtttgccaaaatgaaatcttccgccatcttcattaacgccgggcgtggcccggtagtggacgagcaggcgctgatcgccgccctgaagaacggtgagatccacgctgccggtctcgatgtgttcgaacacgaaccgctggccaaggactcaccgctgctgagcctgccgaacgtcgtcgcgctgccgcatatcggctccgccacccatgagacgcgctacaatatggcggcctgcgcggtggacaacctgatcgacgccctgaacggcaacgtagagaaaaactgcgtcaatccgcaggtaaaataa

SEQ ID NO: 138876 - DNA, 1281 bp, Enterobacter cloacae
atgaatagctcaacaaatgcaacgaaacgctggtggtacatcatgcctatcgtgtttatcacgtatagcctggcgtacctcgaccgcgccaacttcagcttcgcctccgcggcaggcattaccgaagacctgggcatcaccaaggggatctcctccctgctgggggcgctgttcttcctcggctacttcttcttccagatccccggcgctatctatgcggagcgccgcagcgttcgcaaactgatctttatctgcctgatcctgtggggcggttgcgcctccctgaccggtattgtgcataatattccggcgctggcggcgatccgctttatcctcggcgtcgtcgaagccgcggtgatgccggcgatgcttatctatatcagcaactggttcaccaaatcagagcgctctcgcgccaacaccttcctgatcctcggtaacccggtgacggtcctgtggatgtcggtagtctccggctacctgattcaggccttcggctggcgggaaatgttcatcatcgaaggggtgccggcggtgatctgggccttctgctggtgggtgctggtgaaagataagccgtcgcaggtgtcctggctggcggagagtgaaaaagcggcgctgcaggaacaactggatcgtgaacagcaaggcatcaaagcggtgcgtaactatggcgaagccttccgctcccgcaacgtgatcctgctctgcgcgcagtattttgcctggagtatcggcgtatacggctttgtactgtggctgccgtcgattatccgcagcggcggtgaaaatatggggatggtggaagtgggctggctctcttctgtcccgtacctggcggccaccatcgccatgatcgtcgtctcctgggcctcggataaactgcaaaaccgtaagctgttcgtctggccgctgctgctgattggcggactggccttcatcggttcctgggcggtcggcgccaaccacttctgggtctcctacaccctgctggtggtagccggggcggcaatgtatgcgccatacggccccttcttcgccattattccggaaatgctgccgcgcaacgtcgccgggggcgccatggcgctgatcaacagcatgggcgccctgggctccttctgcggctcgtggtttgtcggctacctgaacggcgccaccggcagccccgcagcgtcctatatttttatgggggtagcgcttttcgcctcagtatggctgactttgattgttaagcctgctaataatcaaaaccttccacttggcgctcatcacgcctga

SEQ ID NO: 138877 - DNA, 696 bp, Enterobacter cloacae
gtggccatcgacaaccgcttcgctaccggtttccagatgaaatcgaaagtcgaaaatggaaccgatcccattgtggagtatttccgcaaaggatccgcagccagccatctttcgccggacgattttcgcgccgactacttcaccagcgcccgccatctgcacctgagcggcgtcgcggcggccctttctgagagctcttacgcgttgctggagcatgcggcgaaggtaatgaaagccgaaggaaaaaccctctctttcgaccccaatctgcgcccggtgctgtggaaaagcgaagccgagatggtggagaaactcaaccgtctcgccttccaggctgactgggttttgccaggcttaaaagagggcgtgattcttaccggccagcagaccccggaagggattgccgatttctatctctcccgcggcgtcaaggcggtagtcattaaaaccggctgcgacggcgcctggttcaagagcgccagcggcgaacagggaacggtcgatgccattaaagttgataacgtcgtcgataccgtcggcgccggcgacggctttgccgtcggggtgattagcgccctgctggaaggcaaaaccctgcttcaggcggtgaaccgcggcaataaaatcggttcgctggcgattcaggtccagggcgacagcgaggggctgcccactcgcgacgcgctgggcgagtaa

SEQ ID NO: 138878 - DNA, 612 bp, Enterobacter cloacae
atgcagggtgaggaaaaggccaaggcgctgcaggtgctgcgcgacgtactggcccgtgaacaaggcgaaccgtggcagacaatccgcctgatcgcggaattctatccggacgacagcggcctcttctccccgctgctgctgaacgtggtgaagctgaacccaggcgaagcgatgttcctgtttgctgaaacgccgcacgcctatctgcagggggtggcgctggaggtgatggccaactcggataacgtactgcgcgccggcctgacgccgaaatacattgatattcctgagctggttgctaacgtcaagttcgaggctaaaccggcgggtgagctgttgacccagccgcagcgtcacggcgcggaactcgacttcccgatcccggtggaagattttgccttctccctgcatgacctctccgccgagggcagcgatctggcccaggcaagcgcagcgatcgtgttctgcgtcgacggcgaagccgtactgcgcaaaggcgaccagagcctgaccctcaagccgggcgagtcggccttcgtggccgccagtgaatcgccggtgcaggtcagcggccgcggccgcgtggcgcgcgttttcaataagctccagtaa

SEQ ID NO: 138879 - DNA, 1524 bp, Enterobacter cloacae
gtggcgctgggcgtggtatggacaggcggcgcctggttcaccggtaaacagctggaaggccggatcgccgatatggtgcagcaggcaaacgcccagctgcgcagcagcgcgccggagtcaggtctggagctgagctatcaggactaccagcgcgggctgttcagcagccatctgcagctggtggtgaagccgatcgccggtcaggctaacggctggctggccgccgggcagagcgtggtgcttgacgaagtggtcgatcatggccccttcccgctggcctcgttaaaagcctttaatctggcgccggcaatggcttccgtccacaccacgctggtgaaaaacgacgccagccaggcgctgttcgagatagccaaaggcgacaccccctttaccgtcgatacgcgcattgcctacagcggcgacagccagtcggctatcgtccttaacgccctcgactacgctaaaggcgatgagaaagtcaccttcagcggcggtcagttccagctcgacgccgaccgcgacggcaaaaacatcagcctgaagggccaggccggcagcgggcagatcgatgcgctcaacgaatataaccagaaggtacagctgcgcttcgtcaacctgaccaccgacggcgccaccgagctggccagcttcaacgaacgtatcggccagcaaaaaatgaccctcgataaactggccatcagcgtcgaaggcaaagagctggcgctgatcgacggcatggcgctggacggcggctcgacgctgacccaggacggcaaaggcgtgaacagccaggtgaactacaccgtcaacagcctcaagctgcaggggcaggatatgggcagcggcaaactcacgctgaaagtggataacgtcgacggtcaggcgtggcaccagttcagtcagcagtacagcgcgcagtctcaggcgctgctggcgaaaccggagctggcgcagaatccggagctgtatcagcaggccctcaccgaaacgctgttcaatgcgctgccgatcctgctcaaaggcaacccgtcggtgaccatctctccgctgagctggcgcaatgccaaaggcgaaagcaccctcaacctctcggttctactgaaggatccggcccaggtgaccgctccgccgcagaccctggcggacagcctggacggcaaagtggtgatcccggtggatatggcgacggagtttatgactaagatcgccggtctggaaggctatcagccggccgatgccgccaaactcgccgatcagcaggtcaaaggcctggcggcgatgggccagatgttccgcattaccaccatggaagataacgccatcagcagcagtctgcagtacgcgaacggccaggtgacgctgaacggacagaaaatgccgctgcaagactttgccgcgatgtttggtctggaagcgccttcgctgccggacagcgcgccgcaggaaggccagccgcagcaggaaggccagccgcagcaggatgacgccgctcctcagcaggacgacgccgccccgcagccgtaa

SEQ ID NO: 138880 - DNA, 1029 bp, Enterobacter cloacae
atggcaatcgcaaaaaagatcaccatcaatgatgtggcgctggctgccggcgtctccgtgagtaccgtttcactggtactgagcggcaaagggcgcatctccagcgccaccggcgagcgggttaatcaggctatcgaacagctgggatttgtgcgcaaccgtcaggcggcctcgctgcgcggtgggcagagcggggtgattggccttatcgtcagcgacctgtcaaaaccgttttatgctgaattaaccgccggcctcaccgatgccctggagaggcaggggaaaatggtatttctcacccagggaggccgcagcggcgagaagatggcccagcggtttgatacgctggcggcgcagggggtggacggggtgattatcgccggggcgatcgaccgcgggagcgagctgcgcgagcgtgcggcggaggcgggggtgccgctggtgtttgcttcccgcgccagctatcttgacgatgtcgacctgatccgcccggacaacatgcaggcggcgcagctggtgacggagcatcttatccgccgcggccatcagcggatcgcctggctcggcgggcagagtgcttcgctgacgcgcgccgagcgggtcggcggctattgcgccaccttgctgaaatacggcctgccgtttcacagcgaatgggtgctggagtgcgagtccagtcagaagcaggcggcggaggcgatgaccggcctgctgcgccagaatccgaccattaccgcggtgctgtgctacaacaacgtggtagccaccggcgcgtggttcggtttgttacgggctggaagacagagcggggaagatggcgtcgagagctactttgagcagcgggtggcgctggcggcgtttgccgacgtgccggaggccgccctcgacgacctgcccctcacctgggtgaccaccccggcgcgggagatggggaaaagcctggcggattcgatgctgcggcggctggaagaggggactggcgagacgcgaaaccagattatgcccccgcggctggtgacgcgaaaatga

SEQ ID NO: 138881 - DNA, 1593 bp, Enterobacter cloacae
atgacggcgaaaacagcaccaaaaatcaccttatgggaatttttccagcagctgggaaaaaccttcatgctgcccgtagcgttgctctcgttttgcgggatcatgctggggatcggcagctcgctaagcagtcacgatgttttgactctgctgccgtggctggatatgccgctgctgcaggccatctttatctggatgagcaaggtcggctcctttgccttcagcttcctgccggtcatgttctgtatcgccatcccgctgggtctggcgcgagagaacaaaggcgtcgccgccttcgccggcttcgttggctacgcggtcatgaacctggcggtcaacttctggctgaccgcgaagggtattctgcccaccaccgacgccgcgatcctgaaggccaacaatatccagaacattatcggcattccgtcaatcgataccgggatcctcggggcggtgatcgccggaattatcgtctggctgctgcatgaacgcttccataacattcgcctgccggacgccctggccttcttcggcggcacccgcttcgtgccgatcgtcaccaccgtggtgctggggctggttgggctggcgatcccgctggtgtggccagtcttcgctatggggatcaacgccctcgggaagatgatcaacagcgccggggattttgggccgatgatctttggcaccggcgagcgactgctgctgccgtttggcctgcaccatattctggtggcgctgatccgctttaccgaagccggcggcaccctcgacgtctgcggccacagcgtcagcggcgcgctgaccatcttccaggcgcagctgagctgtccgacgacccacggcttcgccgaaagcgccacccgtttcctgtcgcagggtaaaatgccggcattcctcggcggcctgccgggagccgcgctggcgatgtaccactgcgcccgtccggaaaaccgacataaaattaaaggcctgctgatctccggggtcatcgcctgcgtggtcggcggcaccaccgagccgctggagttcttgttcttgtttgtcgcgccggtcctgtatgtcatccacgcgctgctgaccggtctcggctttaccatcatggcggtgctcggggtaaccatcggcaacaccgacggcaatatcatcgacttcgtggtgtttggcattctgcatggcctggcgaccaagtggtatctggtgccggtggtggcggctatctggttcgcggtctactatgccatcttccgcttcgccatcacccgcttcaatctgaaaacgccgggccgcgacatcgacactgccgccagcgtggagaaagccgtcgccggtaccatcggcaaatccgggtataacgtaccggcgattctggcggcgctcggcggcgcagagaacattgtttcgctggataactgcattacccgtctgcgcctgtcggtgcacgatatgagcaaagtggacgccgccgcgctgaaagcccatcgcgccatcggggtggtacagctcaaccagcataatctgcaggtggttattggcccgcaggtacagtcggtaaaagatgagatggccacgctgatgaataccgtgcaggcctga

SEQ ID NO: 138882 - DNA, 1173 bp, Enterobacter cloacae
atgtttgattttgccacccctatcgatcgccacggcacctggtgcacgcaatgggactatgtcgccgaccggtttggcgccgccgatctgctgccgttcactatttccgatatggatttcgccaccgcgccctgtattctcgacgccgttagccagcggctggcccacggggtgttcggctacagccgctggcgcaacgaggcgtttctcggggcgattgcccactggtacgccagtcgctttaacagcgacatcgatccgcaatctgtggtctacggaccgtctgttatctacatggtggcggaaaccatccgccagtggtcgaaagaaggcgacggcgtcgtggtccacacccctgcctacgatgcgttctataacaccatcaccgctaaccggcggcggattgccccggtgccattgatcctgaaggataatcggtggcgctgcgatatggaccgcctggaggcggcgctggcggagccaaagaataccctgctgctgctgtgcagcccgcacaacccaacggggaaagtctggcgtcgcgaggagctggagaccatggcggccctgtgtcaaagacatggcgtcagggtgattagcgacgaaattcatatggacatgacctggagcgaacaccgccatatcccgtggagcgaggtcgctcagggaccatgggcgctgttcacctccggttcgaagagcttcaatattccggcctttaccggggcctacggctttatccccgaagagaacgagcgcgacagctacctgcaggcgctaaagggtcgcgacgggctctcttccccttccgtgccggcgctggtcgcccatatcgccgcctaccgcgacggggctccctggctcgatgccctgcgcgactacctgcaggcgaatatgcgctatgtcgccgacacgctcaacaacgccttccccgcgctctgctggcagccgccggaggccacctacctggcatggatcgacctgcgcccgctcaacgttgacgatcgcgcgctacagcaggcgctgatcgccgaacagaaggtggcgattatgccgggttatacctatggtcctgagggcaacggctttctgcgactcaacgtcggctgcccgcgcgagaagctggaacgcggtgtcgaaggactgattgccgccctgcgcagcctcagctga

SEQ ID NO: 138883 - DNA, 174 bp, Enterobacter cloacae
gtgatcaccgtcctcgcgctgccgattaacatcgtcgccggtttcttcggcatgaacgtcggtgggatcccgctggcaagcaaccaccacgggtttatcctgctggtggtgattgtcgctgtctttaccctcggcgccggttatctggcgtttcgccggcgcgatgacctgtag

SEQ ID NO: 138884 - DNA, 531 bp, Enterobacter cloacae
atggtttcaatcgccccggcggccgccgctttctccttcggcgctgccgccataatcgcggaactggaggccagcagcgcgctggccacgctaaagcccagcagcgtcatcagcccccaggccagccactgctgggtactgaaatcggtcaacgccgggccaagaaagctgaaggcgctcagggtaatcagggccgtcatcgccatcatcaccccgcttaagattatgcgatgggtgaacaggcgcatatccaccatcgggcgggccgccgacagctgcttgcggataaaccaggttaacatcgccgccccgccgagcgccaccagcgcggtgagccacagcgccagctggcccttcagcgccgatttcgcgctaaacaccagcatcaggatcgcggcaatcaaaacgagcgcctgcagtagattgagcggctgttcgcggcgcgcgggctggcgcggcaccactttcgcgttaatcgcgataaccaccagcacgatcggcacattgatcaggaacaccgacccccagtag

SEQ ID NO: 138885 - DNA, 537 bp, Enterobacter cloacae
atgcaggccgccatgcgcctggcgctgcgcggcggctttgccgccatgaccgtgcggcagatcgcccgcgaagcccaggtggccgccgggcagctgcaccaccacttcacctccatcggcgagctgaaagcgcaggttttcatccgcctgatccgcgagatgctcgacatgccgctggtggctgaggacgccagctggcgcgagcgcttgttctcgatgatcggcagcgaggatggccgactggaaccctatatccgcctgtggcgcgaaggccaggtgctggccgacagcgatccggacatcaaagcggcctacctgctgaccatgaatatgtggcatgccgagaccgtcgccatcatcgagcagggcctcgccagcggcgaatttcggtcggctgagcctgcggcggatatcgcctggcgctttatcgccctggtgtgcggcctcgacgggatttatgcgctggacgcgcaggccctggatgaggcggcgtttagccgctatgtaaataagatgattacgctggagttgttttag

SEQ ID NO: 138886 - DNA, 1383 bp, Enterobacter cloacae
atgtcggtgcagaatgataaagataatcattaccttttgaacaactggcggcctgaaaacaaggcgttctgggaaaataaaggccaagccattgcgcgaagaaatctatggatatcagtgacctgcctgctgcttgctttctgcgtatggatgttattcagcgccgtagcggtgaatctcaataaggtcggttttcatttcaccaccgaccagctttttttattaaccgccctgccttcactttccggcgcgatattacgggtcccctactcctttatggtacccctttttggcgggcgctactggaccgtattaagtaccgttatcctgatcgtgccttgtatttggttaggggtggcaatccagaatattactactccgttctgggtatttattattattgcgctgctgtgcggttttgccggagcgaattttgcttccagcatgggaaatatcagtttctttttccccaaagcgaaacagggcagcgcgctgggagtcaacggcggccttggcaatctgggcgtaagcgtgatgcagatggtcgccccggcggtcatcttcctgccgctcttcacctttctcggcgtccatggcgtcacccagcccgatggttcgacaatcaccctgagtaatgcggcgctcgtctgggtaccgctgctgctgctcgccaccgtcgcggcatggttcggcatgaacgatatcgccggttcaaaggcctcgattcgcgatcagcttcccgtgctcaagcgaccgcatatgtggctgttaagcctgctctatctggcgacgtttggctcgttcatcggcttttccgccggctttgccatgctggcgaaaacccagtttcccgcggtcgatatcctcaagctcgccttctttggaccgttcatcggcgcgctggcgcgctcgttcggcgggatcatctccgaccgtctcggcggcgtgcgggtgacgctggttaacttcgtcctgatggcgctgtttaccggcctgctgtttctgaccctgccaggcagcggctccggcagctttctcgctttctacgtggtgtttatggggctctttttaaccgccggtctgggaagcggctccaccttccagatgatcgccgtcatcttccgccagctcaccatcgacagcgtaaaacagcgcggcggcagcgatgaagaagcgcagcacgaggcggtgaccgataccgctgccgcgctgggctttatctcggcgatcggcgccatcggcggcttctttattccgaaagccttcggcacctcgctggcgatgaccggctcaccggttggcgcgatgaaagtcttttttgtcttctatgtggtttgcgtgctggtgacctggctggtctacggccgccgtaaatccgcttaa

SEQ ID NO: 138887 - DNA, 618 bp, Enterobacter cloacae
atgtttgatggtccagacgttggcggcggcgatgagctggttcagctctttccagctggagcggacaaaaccgcctttgccgcgcgccgctttatagctgcgggtttttgccggatcctgcatgatgctatcccatgccagcaccgggtcgggatgctgcgccagggcttcgcgccacagctcaatcagtcgtttacgcgccagcgggtacttcaggcggttggcgctgtagagataccaggagtagctggcgccgcgcgggcagccgcgcggttcgtgatttggcagatccggccgggtgcgcggataatcggtctgctgggtttcccaggtaacgagaccgtttttgacgtaaattttccagctgcaggagccggtgcagttcacaccgtgcgtggagcggacaattttgtcgaactgccagcgttgacggtagctatcttcccagtcacggttgttgttgtagacctggccgtggccgttggcaaaggtctcgcccttctgcttaaagtagcgaaagcgatccagaagtttactcatgacatttctcctgctccgatgatgtccggcatcgtgccacccggccggatgagcgaacgaactcgtaaggccggataa

SEQ ID NO: 138888 - DNA, 705 bp, Enterobacter cloacae
atgcgggttttcgttgccgccaaagtaggggaagcccaccgacaccacgctgtcgcgaatatccagcagcgacagcttaagctcgacatctttgccgtctgcccgttgttcgagattccatttgcctttttcgccccagcgaaagccgatggagccgttcggcgccaccagttcgccgtcgctgttataggccacggttttccattccgggttattactttccccgagaccgtcaagcaggtcggaagcacgcagcatacggcccggcgtatagctgccgtcgtcgcgcggctcgagtatcaccagcatcggcatgtcggtgtaggtccggcagtagttgagaaagtaatcgctcgggttatcgaggtggaaggctttgaggatcacatggcccatggccatcgccagcgcgctgtcggtgccttgcttcggcgccagccactggtcgcagagcttagcgacttccgaatagtccggcgtgatggcgatagttttggtgcccttgtagcgcacttcggtaaagaagtgggcgtccggggttcgggtctgcggcacgttggagccccaggcaataatgtagctggagttgtaccagtcggcggattccggcacgtcggtctgttcgccccaggtcatcggcgaggcggggggcagatcgcagtaccagtcataaaagctcaggcaggtgccgccaatcaacgataa

SEQ ID NO: 138889 - DNA, 228 bp, Enterobacter cloacae
atgcgccgtatcggcaaactcgcgggcgatttgttcgatatgttgacgcggtacgccggtgatctgctccgcccatgccggggtataggctttgacctcggcgaaatccttcgccgcattgacatcatcaagcccgcgatccagaccgtagttggccagaatcaggtcatagacgctgaccaccaggccgctttcgccactggccagcgtcagctgtttagccggtag

SEQ ID NO: 138890 - DNA, 813 bp, Enterobacter cloacae
atgggtatgatcgcggccggtaaactctcccagcgcctgccaggctttcaccgccacctggccgttggtttccggggcgaggctaagaataacttcggaggcgtcaatggcgctgtcgatccgcggccggcctttggccggaccgtcgggcttgacgtagttaagcttgccgaggaaatcgacttcgctttgcgtattccacgaaatgcctttcccgccgttgccaagcttatcgagcagcgggccgagagaggtgaagcgttcccaggtggcaggatagtcgcgttccaccagggcaatcgacggtgcggttttcccggggatcagatcgcattcgcccttgcgccagtcaagcacctcgaacggctgcgacagttcgccgggggaatcatgctgcagcgggaccagcaccacatcggtctctttgccgagatggccaacacagacctgcgagaaggatttagcgatatccttgtagatctcccagtcgcttttcgcctcccaggccgggtcgacggcggcggagagcgggtggataaacgggtgcatgtccgaggtgttcatatcgtctttttcataccaggtggcggtcggcaggacaatatcggagaagagacaggtactggacatgcggaaatcgagggtcaccagcaggtcgagtttgccctcaatcgccgcggtctgccactcgacttcctcaggttttacctcatcgctggcgcccagttcatcaccctgaataccactgtcggtcccgagcaggtatttcaacatgtactcatgccccttaccggacgatcccagcaggtttga

SEQ ID NO: 138891 - DNA, 975 bp, Enterobacter cloacae
  misc_feature (672)..(681): n is a, c, g, or t
atggacaatccgcagcagctcgccaccattcgcaccacctcgattgtcccggtcgatctcaatgccctgatgttccatctggagaaaaccctcgcccgcgccagcaaggcatccggggacagcgctggcgctacgcagtacgatgcgctggctaacgcccgccagcaggccatcgagaaatacctgtggaatgataaagagggatggtacgccgactacgatctgaaaacccacaaggtgcgcaatcaactgaccgcggcggcgctgttcccgctgtacgtcaatgccgcgtcacgcgagcgggcgacgaaagtggccgccgccgccgagtcgcgcctgcttaaacccggcgggctgaccaccaccaccgtcaacagcggccagcagtgggacgctcccaacggctgggcgccgctgcagtgggtggcggtcgaggggctgcaaaactatggtcagcagaagatcgccatggaggtcacctggcgcttcctgaccaacgtgcagcatacctatgacagtaagcaaaagctggtggagaagtatgacgtgagttcgaccggcaccggcggcggcggcggggaatatccgctgcaggacggctttggctggaccaacggcgtcaccctgaagatgttggatctgatctgcccgcaggagaaaccctgcgatgcnnnnnnnnnngcgatgcgctgcccgctacccgtccggcgacaaccccttcaccgcaggacaaacctgttgcggcgcccgcggctaacgaccccgcccctgcggaaccgcaaaagaccggctcctgacgcttcgccgccccctaccaaaatcggtagggggaagcggtctccctggtcactaccgtcccgtgcagacccattctgcggctcgcgggaaacacttccccaccccctcgcgttgaacaggtcaccttttcgcttgatcgcacaaatacaaacaataataattcgcattactttttaa

SEQ ID NO: 138892 - DNA, 2121 bp, Enterobacter cloacae
atgaacgtggctatttctcgaaaacgcccggggctgctgtatgcccttgcggtcacactccccttcaccgcgcaagccgaagagacggtggtggtcactgccaccccgccggcgtccgccagcgcgccgacggagggctacagcgccagcacctcgctcggggcgacgaaaaccgaccagccgttaatcactaccgcccagtcggtgtcggtggtcacccgccagcagatggcggatcagggggcgaataccatcagccaggcgctggaatataccccgggggtctactccagcttcggcggcggcgccacccggttcgacgccatctccctgcgcggctaccacggcggcgacgtcgataacctgttcctcgacggcatgcgcctgatgagcgacggcggcagccataacgtactgcaaatcgacccgtggtttatcgaacgcgtggatgtgatccgcggcccctcctccgcgctctacgggcagagcgtgccgggcggcgtggtcaacctgacttccaaacgtccgcagttcagccagcagggccacatccgcctgaccggcggcacgcaaaataccaaaggcgcggccttcgattacaccgacgccattaatgaccagtgggcatggcggctgatcgggatgacccgcagcagcgatacgcagtatgaccatacccgcgaagagcgctacgcgatttcgccttccctgctgtggcagccggacagcgacacctcgctgctgctgcgcgcctatctgcaaaaagatccttccggcggctaccacggctctttgccgctggacggcacccgctacgcgcacaatggccgtaagctctcccccagcaccaacgaaggcgatccgggagatggctatcagcgccgccagcagatctacagctatgagtttgaccaccagttcaccgacgtctggtcggtctattccgccgggagctacacccataccaacgtctccctcgatcaggtctaccaggtcggctggatagatgacagcgacatgctggcccgcggctacagcggttcgcgcggttcgctggacggctggtcaaccgataaccgcctgcgcgccgatttcaatacaggcgacctggcacacaccctgatcctcggcgccgaatatcatcgcttccgtaacgacctgtggaccggcgccggcggcgcggcgccccttaacccgtttagcggctataccgcgcagaccggacataccgttacctacagcgacgacaataatcgccgctattaccagaccgggctgtatctgcaggatgagatggtctggaaccgctggcatgtggatgtttccgcccgctacgaccgtatcgtttcccagcaggtcagcgatacccaggggacctcaaaccgccgttcagacgaccatatcagcggccgcgcctcgctgttgtacgccctggacaacggtctgtcgccctacctgagctacagccaggcgatcactccggcgatgctgccgggcgcggacggcaaaccgttgaaaccgaccaccgccgaacaggttgaagccggcctgaagttccagccgccgggcagcagcgatctctatagcatcgcggtttacgacctgacgcaaaaggatgtcgccactcgcgacccgaacatcgccaccgccacctatattccggcgggtaaggtccattcccagggcgttgagctggaagcacaccaccagatcaccccgcagctgagtactatcgcctcgtatacctggaatcgtctgcgtttccaggacaccaaagacgggaccgacaataacacgccgcagctgaccccggatcagatggcctccttctgggcgcgctatcagttcccggcggggatctccgttggcgccggcgtccgctacatcggtaaacagtgggcggatgatgccaacaccgcgcggctgccgtcggtcacgttgatggacgccatgatgcgggccgacctcggcgtctggtcgccaacgctgaaaggcgcatatgtgcaggttaacgccaacaatatcggcgaccgcgagtatatttccggctgctatggcaccggcaactgttactggggagcagagcgcagcgttatagccaccgtgggctacgatttctga

SEQ ID NO: 138893 - DNA, 612 bp, Enterobacter cloacae
gtgaaattgagatggttgcttattttagtcgtttttctggccggttgtagttcgaaacatgattacactaacccgccgtggaaccccgaggtcccggtgaagcgggcgatgcagtggatgccgatcagtgaaaaagccggcgccgcctggggcgtggatccgcagctgatcacggcgatcatcgccatcgagtcgggcggtaatcctgcggtggtgagtaaatccggcgccgtcgggctgatgcagctcaagccgtcgacctccggacgcgatgtctatcggcggatggggtggcgcggcgagccgtcggtcagtgagctgaaaaacccggaacgtaatatctcgatgggggccgcctatctgagcattctggagaacggtccgctggcggggatcaaagacccgcaggtgatgcgctatgcggtggtggtctcctatgccaacggcgctggcgcgctgctgcgtaccttctcctcgaaccgccaggacgccatcgaggagattaacgatctcgacgccgatgagttcttcgagcatgtggtgaaaaaacacccggcaccgcaggcgccgcgctatatctggaaactccagaaagcgctggacgccatgtaa

SEQ ID NO: 138894 - DNA, 363 bp, Enterobacter cloacae
  misc_feature (42)..(51): n is a, c, g, or t
gtgaaatcgctgtggccgcaaatcagcagcgggtcgcgctgnnnnnnnnnngtcgcgctgctggcgggcaaccagtccctgccagtcgatatgcggcagcaggcgactggcgccgtagccgccgcgcacggcgaggacgatccggttgcggccgggcaactgggccagctggttaatatcggccagccgttcatgttcagtcccggcgaaacgctgctgccggcggggaatgacctgctggtgggccacctcgtgtccggcctgctgcagacgctcgacgccgcgggctgccgcctgctggttgatgcaatacccggatggcgcgaccagataaaactgagacatgataattccttgctatga

SEQ ID NO: 138895 - DNA, 564 bp, Enterobacter cloacae
atgggcaacgtcatcaccttcagcgggccaatgctcgccggcaacttcggcgcggagaccctcgacccgtttaccgagcaccatttctggcaggcgctacgccagccggaattcaccctcgaatggccgggcgaagggccgaactgcagggtggaaggcaccctgtgggggggaaatctggcgatgctgacctcgcttatcggcacgccgtggctgccggtggtccgcgacggcatcctggtggtggaggatatcaacgagcacccgttccgcgtcgagcgcatgctgcttcagctgttgcacagcggcgtgctggcggcgcagaaagcggtgatcttcggcagcttcaccggcagcgcgccgaacgactatgacgcgggatacgatttgccgcaggtctttgattatctgcgccagcagctatccctgccgctgattagcggactggagtttggccacgagcagcgcacggtgaccctgccgctgggcgcccgcgcgcgcctggtgaatcaggcggcggccaccaccctgacgatcggcggccatccggtgctgacagaataa

SEQ ID NO: 138896 - DNA, 324 bp, Enterobacter cloacae
gtgccggttgcggatcggccggttgcccagcagaaagccgcagagatagacggcgaggataccgctgccgtcgagggaggtggtgacggcaaaaatcatgatcccgccgctcagcgccagcagcggatagaggccggcgggcagcacgatgcggttaatcatctgcagcagcaggtagccgccgccgaggccgatggcgatcccgaggccgaactgctgaatgatatgcacggcgaacatccagctgaggccggtttggtgctgctggatcatttcgatcagggtgatggtcaggaagaccgccatcgggtcgttactgcctga

SEQ ID NO: 138897 - DNA, 528 bp, Enterobacter cloacae
atgaaccgtttcattatcgccgatgcgagcaaatgtatcggctgtcgcacttgcgaagtggcctgcgtggtatcccatcaggaacatcaggactgcgcctccctgacgcctcacacctttcagccgcgtattcacgtgatcaaaggggtcaatgtttccacggcgaccgcctgccgtcagtgtgaagacgccccctgcgccaatgtctgcccgaacggcgccatcagccgcgataaaggctttgtccatgtgatgcaggagcgttgcatcggctgcaaaacctgcgtcgtcgcctgcccgtacggggcgatggaggtggtggtgcgcccggtgatccgccatagcggcgccggattgaacgtcgtggcggaaaaagccgaagccaacaagtgcgatctctgcttccaccgcgagagcggcccggcctgcatggaagtgtgcccgacgcacgccctcgtgtgcgtggaccgcaacaaacttgagcagatgaatatcgagaaacgtcgccgtacggcgctggcctggtaa

SEQ ID NO: 138898 - DNA, 1425 bp, Enterobacter cloacae
atggcgagtttcccacagggatttttatggggcggcgcactggccgccaaccagtctgaaggcgcttatcttgaaggcggtaaggggctgaccaccgtggatacccttccccacggcgcccatcgcctgccggtaaaattaggcctggagaagcgctttacgctgcgtgaagacgaattttaccccagccaccaggcgatcgatttttaccatcgctataaagaagatatcgccctgatggccgagatggggttcagcgtctttcgcacctccatcgcctggagccgcctgttcccacgcggcgacgaacagcagccgaatccgcagggcatcgccttctatcgctcactgttcgaggagtgcaaaaagcacggtatcgagccgctggtcaccctgtgccattttgacgtgccgatgcatctggtgatggagtacggctcctggcgcaaccgcaaaatggtggattttttcagccactacgcccgcacctgctttgaagcttttgacggcctggtgaaatactggctcaccttcaatgaaatcaacatcatgctgcacagcccctactccggcgccggtctggtgtttgaggagggagaaaatcaggagcaggtgaagtatcaggccgcgcatcacgagctggtggccagcgcgctggcgacgaaaatcgcccatgagattaacccgcaaaatcaggtcggctgtatgctggccggcggtaatttctacccttactcctgcaagccggaagatgtatggatggcgctggagaaggaccgcgaaaacctgttctttatcgatgtccaggcccgcggcgcctatccggtgtgggccgcgcgggtgttccgggaaaaaggggtcacgattgcgaaacagccgggcgatgacgagatcctaaaaaacaccgtcgatttcgtctcctttagctactacgcgtcgcgctgcgcctcggcggagatgaacgccagcaacaccaatgccgccaacatcgtcaagtcgctgaagaacccgcacattccggccagcgaatggggctggggcatcgacccgctgggcctgcgcatcaccatgaacatgatgtacgaccgctatcagaaaccgctgttcctggtggaaaacgggcttggcgcccgcgatgagatcgatgccaatggggacatcaatgacgactatcgcatcagctacctgcgcgagcacatcagggcaatgcgcgatgctatcggcgacggcattccggtaatgggttacaccagctggggctgcatcgatctggtctcggcgtccaccggcgagatgagcaagcgctacggctttgtctatgtcgatcgcgacgatgccggcaacggctccctggcgcgtaagcgtaaaaagtcattcttctggtaccagaaggtgatagccagtaacggcgccgatctcgactaa

SEQ ID NO: 138899 - DNA, 309 bp, Enterobacter cloacae
atgagcgcacagcaccctaccgcagccagagggatagccagggccattcgccagttaaccgtgggatatgtcagaaaacgccatgaggaccgcaaaacgcgggagacgcggcgctacacccgccacgcggcattaagcttaaacggcgactggctggagcaggcggggtttccggtcggcacgcaggtcagagtctcggtgtcgcccggtaaattagtgatagagaatcttgagctggcagcgccgggaacggggctcccttccggccagtcgtgcgccggcggagagcccggttcgccgcagggctag

SEQ ID NO: 138900 - DNA, 369 bp, Enterobacter cloacae
gtggtcatcgacggcggcagcgcgccggaaaacgacatcgtggcgatccgcgaattacgccccgaacgcctgctgattgtcgatgccaccgatatgggcctaaaccccggcgacattcgcatcatcgatcccgacgacatcgccgagatgtttatgatgaccacccataacatgccgctcaactatctggtcgatcagctgaaagaagacgtcggcgaggtgattttcctcggcattcagccggatatcgtcggtttttattatccgatgacccagccggtgaaagaggccgttgcccgggtgtatcagcagctggcaggctggcagggcaagggcggctttactcagctggaggccgcggacgactag

SEQ ID NO: 138901 - DNA, 471 bp, Enterobacter cloacae
ttgaccgttgccgagcgctggctgcgccaggcgcagttgaccccgggagcggaggcggtatgtgctcagccgctgctgatcccgctgcggttaaaagttacggaaggggaaaagcaggcgctggccgccgctcagccggcgctggcgcagctagggatcgatgtgcataccgatgccctgcacgtgacggtgcgcgcggtccctttacccttaagacaacaaaatttacaaatcttgattcctgaactgataggctacctggcgcagcaaaacgcattcgacgtcggcaatatcgcccaatggatggcgcgtaatctgacgagcgaacagacgtcatggaatatggcgcaggcgattgcgctgctggcggacgttgagcgtctttgcccgcagctggtgagaacgccgccgggtggcctgttacaacctgtagatctccattcggcgatgaatgccctgaaagatgaatga

SEQ ID NO: 138902 - DNA, 951 bp, Enterobacter cloacae
atgaatgatgtaaccgaggcgagcctgcccaaggcaatttttttaatgggcccgacggcctccggcaaaaccgcgctggcgatagccttacgtaaagttttgccagtagagttgattagcgttgattccgccctcatttatcggggaatggatattggcaccgccaaaccggatgctgcggagcttagcactgcgccgcatcggctgctggatattttggatcctgcggaggcctattccgcggcggattttcgccgcgatgcgctggcggcgatggcggatattgtcgccgccgggcgaattccgctgttagtcggcggaacgatgttgtatttcaaagcgttgctggaaggattgtcgcctttaccgtcggctgacccagaggtcagagcgcggattgagcagcaggccgcagagcaggggtggaatgcgttacatcagcaattacaggagatcgatcccgtggctgctgcgcgtattcatccaaatgatccgcaaaggctttcccgggcactggaagtttttttcatttcgggtaaaactttaacggaactgacgcaaacgtcaggagacgctctgccatatcaggtgcatcagttcgccatcgccccggcgagccgtgaactgctccatcaacgcatagaacagcgttttcatcagatgttagcttcaggttttgaagcagaagtacgggcgctttttgcccgcggagatttgcatacggacatgccttccatccgttgtgtcggataccgccagatgtggtcatatctcaatggcgagatcccgtatgatgagatggtttatcgaggtgtttgcgccacgagacagttagccaaacgtcaggtcacctggctgcgcggttgggaaggtgtgcactggttagacagtgaacaacctgaacaagcgctcaacaaagtattacaggttgttggtgcgagccagaactga

SEQ ID NO: 138903 - DNA, 309 bp, Enterobacter cloacae
atggctaaggggcaatctttacaagatccgttcctgaacgctttgcgtcgggaacgcgttccggtttctatttatttggtgaatggtatcaagctgcaagggcaaattgagtctttcgatcagttcgtgatcctgttgaagaacacggtcagccagatggtctataagcacgcaatttctactgttgtcccgtctcgcccggtgtctcaccacagcaacaatgctggcggcggttccagtaactatcaccacggtggtagcgcgcagggttcttctgcgccgcaacaagacagcgacgacgccgaataa

SEQ ID NO: 138904 - DNA, 1281 bp, Enterobacter cloacae
ttgtttgaccgttatgacgccggtgagcaggcggtactggtacacatctatttttcgcaagacaaagatatggaagatctccaggagtttgaaactctggcctcttccgccggtgtcgaagcaatgcaggtgattaccggtagccgtaaagcaccgcacccgaagtattttgttggtgaaggtaaggcagtcgaaattgcggaagccgttaaagcgaccggcgcttcggtcgtgctcttcgatcatgccctgagtccggcgcaagaacgtaacctggaacgcctgtgcgaatgccgggttatcgatcgcaccggtcttattttagatattttcgcccagcgcgcgcgcacccatgaagggaaattgcaggtcgagctggcgcagctgcgccatatggcgactcgccttgtccgcggttggacccaccttgaaagacagaagggcgggattggtttgcgtggcccgggtgaaacccagctcgaaaccgaccgccgtttattgcgtaaccgtatcatgcagatcctgtcgcggctggaaaaagtcgagaaacagcgcgagcaggggcggcggtcgcgtgcgaaagccgatattcctaccgtgtcgctggtgggctataccaacgccggaaaatcaacgctctttaaccagatcactgccgccgaggtctatgccgcgaaccagttgttcgccaccctggacccgacgctgcgccgcattgacgtccctgacgtcggcgaaacggtgctggccgataccgtcggctttattcgccacctgccgcacgatctggtagccgcgtttaaagcgacgttgcaggagacgcgtcaggcgacgctgctgctgcatgtgattgatgcggcggatgtccgcgtgcaggaaaacattgatgcggtaaatacggttctcgctgaaattgaggccgatgagatcccggcgctgctggtgatgaacaaaatcgacatgcttgacgattttgaaccgcgcatcgatcgcgacgatgaaaataaaccgattcgggtctggctttcagcccagaccggggttggcgtaccactgctttttcaggcattaacggagcgtctttccggtgaagtggcccagcatacgctgcgcttaccgccgaaagaagggcgactgagaagccgtttctatcagcttcaggcgatagaaaaagagtggatggaggatgacggcagcgtgagtctgcaggtgcgcatgccgatcgttgactggcggcgcctctgtaagcaagagccaacgcttgttgactatgtggtttaa

SEQ ID NO: 138905 - DNA, 1263 bp, Enterobacter cloacae
atggcgtggaatcagcccggtaataacggacaggaccgcgacccgtgggggagcagcaaacctggcggcaactctgagggaaatggcaataaaggcggtcgcgagcaggggccgccggatctggatgatatcttccgcaagttaagtaaaaaacttggcgggctcggcggcggcaagggcggactgggcggcggcaatagcgcgcaggggcctcgcggaccgatgggcgggcgtattgtcggcatcgttgccgcggcggcagtgattatctgggcggccagcggtttctataccattaaagaggccgagcgcggcgtggtcacccgttttggcaagttcagccatctggttgagcctggcctgaactggaaaccgacctttatcgataacgttcaggcggtgaacgtggagtcggtgcgcgaacttgcggcttccggcgtcatgctgacctctgacgaaaacgtggtgcgcgttgagatgaacgtgcagtaccgcgtcaccgatccggagcgctatctgtttagcgtgaccagcgcggacgacagtctgcgtcaggccaccgacagcgcgctgcgcggcgtgatcggcaaatataccatggatcgcattctgaccgaaggtcgtaccgtgatccgtagcgatacccagcgtgagctggaagagacgattcgcccgtacaacatgggtatcactctgctggacgtcaacttccagacggcgcgtccgccggaagaggtgaaggccgcgtttgacgatgccattgccgcgcgtgagaacgagcagcagtacattcgtgaagcggaagcgtataccaacgaagtccagccgcgggcgaatggtcaggcgcagcgtatcctcgaagaggcacgcgcctataagacccagaccgttctggaagcccagggtgaagtggctcgctttgcgaagatcctgccggaatacaaagccgcgccggaaattacccgcgagcgtctgtatatcgaaaccatggaaaaagtgctgagccacacccgtaaagtgctggtcaatgacagcaaaaacggcaatctgatggttctgccgctggatcagatgctgaaaggcgccgctgcgccggcagcaaagagcgatagcagtgacgccagcgatctgctgcgcctgccgccagcatccagctcaagcagcgccagcacctcatcaacctcgagctcaaccgggggtagcattatggaccaacgccgcgctaacgcgcagcgtaacgactaccagcgtcagggggaataa

SEQ ID NO: 138906 - DNA, 1005 bp, Enterobacter cloacae
atgcgtaaatctgttatcgcgatcattgtcatcgtgctggtagtgctctacatgtctgtctttgtcgtaaaagaaggcgagcgcggtatcacgctgcgtttcggtaaagttctgcgcgacgacgaaaacaagccgctggtgtatgcgccaggcctgcacttcaagatcccgtttatcgaatcggtgaagatgctggatgcgcgtattcagaccatggacaaccaggctgaccgtttcgttactaaagagaagaaagacctgatcgtcgactcctatatcaagtggcgcatcagcgacttcagccgttactacctggcaaccggcggcggcgacgtctcccaggccgaggtgctgctgaagcgtaaattctctgaccgtctgcgttctgaaattggtcgtctggatgtgaaagatatcgtcaccgactcccgtggtcgcctgaccctggaagtgcgtgatgcgctgaactcgggttcggccggtacggaagatgaggttagcaccccggcggctgacgacgcgattgctaaagcggcagagcgtgtagaagccgaaaccaacggtaaagtgcaggtgatcaacccgaacagtatggcggcgctgggtatcgaagttgtcgacgtacgtatcaaacagatcaacctgccggcagaagtgtcggaagcgatttataaccgtatgcgcgcggagcgtgaagcggttgctcgtcgccatcgttcacagggtcaggaagaggcggaaaaactgcgcgcgactgcggactatgaagtcaccaagacgctggcggaagccgagcgccagggccgtatcctgcgtggtgaaggtgatgcggaatcagcgaaactgtttgccgacgcgttcagccaggatccaggcttctactcctttatccgtagcctgcgtgcctatgagaagagcttccagagcaatcaggatgtgatggtcctgagtccggacagcgatttcttccgctatatgcgttcaccggattcggcgcgtaaataa

SEQ ID NO: 138907 - DNA, 294 bp, Enterobacter cloacae
atgatgagagaattaaccgcatttgaaatcgaaaatgtgagcggcgcaggctggttacaggatggtctggcggccttaggcagcaaggtcggcgcagccgcatggacgatgggcactgatgccctgagcattaacctgccactgcttggcaccctcaatctggccgacctggcgccggacctgggcaaaaccctgggcgaaagcgttgggtcgactatcggcggcaccatcgaaagtgcgctggcaggcctgccggtgatcggcggcctgctgaacaagctactcggcaactaa

SEQ ID NO: 138908 - DNA, 198 bp, Enterobacter cloacae
atgaactccaccatttggctggcgctggcgctggttttaatacttgaagggcttggcccgctgctttatccgcgcgcctggcgcaagatggtcgccagcctgagccagctaccggataatttattgcgtcgttttggcggcggacttgtggttgccgggattgtgatctactacatgttgaggaaatcgattggctga

SEQ ID NO: 138909 - DNA, 636 bp, Enterobacter cloacae
atgatggcaggcagcattattgttgtgctgagtctgctggggtttctggtgctgcttctgaaaggacgggccgtaacgaagacatctccggtcctgatgtcactgaaagccctggggattcgcccctcagaggccgaacagcgattgtgtcgccagcgggtctgggtgggaaatgacacgctgatgacaccacgggaacaacacttttaccgggcactgctgaggcataccagccgtaagcgctggctgttatgcccgcaggtccgggtggcggatattgccacactcgctccccacatccggccacgttcccggacctggtggcaactcttccgcatggcgtctcagtggcactgcgacgtggtcatcgttgatatccgcacctttgctatcgttggcgcgattgaacttgatgacgcctcacatctgaaaaaacagcgtatccggcgcgatatcctgctggaagaggttctgaggcaggcgggtatcccgctgctgcgtgaccgggactcagagaaactggtcaggagagtcagtgagtttctgaaataccgtgaagctgaaaccgacgaaatatctgcatccggcacagctttaccgacagcgcatactgaacgcagggaggacgaaaaatga

SEQ ID NO: 138910 - DNA, 309 bp, Enterobacter cloacae
atgattgtgcccgtagaggttgatcgcgatgcgcggggctactggacacacccggcgttaatccggagttgctgccagaccacgccacagctgatgtggtggctgcgcgtccagaagctggagtgcttcgtgatgagtatgcgtgacgaggctacagaagcattctgtgccggatgggatgatggcccgccagacgcttctgcatgggagctggttcctccgcccggaaagggctggtttctcggttcagtacatccacgggaggaggggccggagtgctactggttccgtcataccacaaaagcctga

SEQ ID NO: 138911 - DNA, 558 bp, Enterobacter cloacae
gtgaaaacaaatcgtactctccgcaaatggtgtctgcccgggctggtcagcctgagcctgttcgcccccttaccggccgtgtatgccgcaagcatcgagaccgggttttccccggaaggaacgggcctgcagctggttctgaaaaccattacgaccgcacaacaggaaatccggctgatgggctattcgtttacgtctccggaggtggccggcgcgctggtcagggccaggcagcggggcgtggatgtgaaggtggtactggaccacaaagccaataccggcgagcgcaacaaggccagtcgggccgccatgaacctgctggtcagcgcgggtataccggtccggacggtggatacctacaagatcctccacgacaaagtgatcatcgccgatggccgcaacactgaggtcggttcgttcaactttagtcgcgcggccgatcgcgccaattcagagaacgtgctcgtcgtgtgggatgaccctgttgttgctcaacgctatctgcagcactggtcatcccgctggtcgaagggaacggactggaaacagacgtactga

SEQ ID NO: 138912 - DNA, 255 bp, Enterobacter cloacae
atgtcgcagattgataatgcagtaacttcctcttcgaaacccaaaaggccttaccgtaaggggcaacctttatcagtaagcgagcgaaaattgcgctctgtatccagaaaaagggatacgcataaagccgttactgtgttcatacagaatgctaaaaaggcgatgctggacgatctttgctcgaaatccaatatgactcaggcagaaatcattgagttactaattgagcgagaatcagagcaacggaacaaatag

SEQ ID NO: 138913 - DNA, 1020 bp, Enterobacter cloacae
gtgactgaacagcacaatccgcaacactggagtcagctggatacggaagaacagatccgtttctggcagggcattgataatggtcacgtcgggtcttttctggtttctccggagaagaaacgtacccgtcgccgtcgcggtgaacattccactaaacccaaatgcgaaaacccgtcctggttccggccgcctcactataaggcgctgggtggccagctggggcacgcctataaccgtctggtggaaaaagatccggccacgggtcagtgcaggcttcgcatgcacatgtcactgcatcctttctacgtccaggaacggcagcgcgcggggcgcagatatgctttccgcccggaaaaacaacgtcttctcgatgcgctctggccggtactggtcagcttctgcgatgccggtaaacacacggtaggaatgagtgtgtccagactggccagagaactcagcccgaaagatgcccggggggaagtgatttccggtacggaagtcacggtacgccggatttcggcattaattgccgagcaggtccgctttggtgtacttggcgtatcagaagaaactctgtgggacagggaatcacggaagcgactgcctaaatacgtctggatcacgcccgttggctggaaaatgctgggtgttgatttgatgaagctgcaggagcagcagctgaaaaaactacgtgaatgcgaggaacgtcaggcgctcattaaagaggggctgttaggcgagcatgaggagatttctgttctgagggcgcgtaaacgctggtatgagcagcgcagtcgtgaagccctgcagtatcgccgtgcaaaaggggccgcacgtaagcgtgcaaaccgtctggccagaatgccccgcgaccgtcaggtctacgaaatgacctgctggctgaagaaaacgctgccggcagatgagctctatggttattctaaagataaacttgagcagctggctgtccggcatctgtaccagctggagttgtcactgaacccttctccgcctcattag

SEQ ID NO: 138914 - DNA, 636 bp, Enterobacter cloacae; identical to SEQ ID NO: 26189

SEQ ID NO: 138915 - DNA, 996 bp, Enterobacter cloacae
atgtttccagtcggcattgacgtaagtaaaaacaccctggatctttgcatgctttatgacggtatcaaaggacgcataaaaacccgtaacatccaaaataacagacattcagttgaaaatattcttcgctggctcaggctccagcactgcggtccggaagatgttcatgtggtgatggaggctaccggggtttatcacgaacggctggctactgagttacatgatgctggtttctatgtctctctggccaaccctcaccgtagcagagagtttgcacgcggcatgggaataatgacaaaaacggataaggtggatgcgtatatgctggcctgctacgcattccttaagaaccctcaccgctgggagccgccggcacccgaaatcagatatctcggtgcactcctgcgacggcgggatgttctgctgggtgatgccctgcgtgaggagaacaggctggagaaatacctgtccacagacacacctgcagatattatcagttcctgcatgcatatggcgcagctgctgcgcgacgaggtaagcaatatcgagcggcagattaaagcgcatatcaaagccagccctgcactgaggcgtgattatacacttctgacctcaattaaatctgttggcccccagctgggaatgcatatgctggtcgtgcttcgcagccatgacttttcatcagctgagcaggctgccgcctttctgggcgtggtgccgatcgagaaacgttcaggcacatcggtccggagccggccccggatgtcgaaaatcggtccgcctcagttgagagcgaagctttacatgtctgcgctgtgcggaaaaatctacaataagcggatgcgtaatatttacgacgagatgtgcctgcggggtaaacctaaaatggtggccattggtgcgcagatgcggaaactggtgcactggtgttatggcgtcctgaagaccggaatcgtttttaatgatgaaggcctgaaacaagtactgtcaacctga

SEQ ID NO: 138916 - DNA, 231 bp, Enterobacter cloacae
atgccctatcgcagtaaacaagaactccccgacagcgttcagcatgtactgcctgcccatgcgcaggaaatttataaagaagcgtttaacagcgcctgggatcaatataaagataaagacgagcggcgcgatgacgccagccgcgaagagacggcgcacaaagtcgcctgggcggcggtgaagaacagctatgagaaaggcgatgatgataagtggcataagaaaaaataa

SEQ ID NO: 138917 - DNA, 681 bp, Enterobacter cloacae
gtgttaactcgtgatttcttaatgaatgcggattgtaagacagcgtttggcgctattgaggaatcgctactctggtcggcagaacaacgtgcagcctcgctggcggcgacgctggcctgccgcccggatgatggctcagtatggatctttggctacggttcgcttatctggaacccggcgctcaattatcgcgagtcctgcaccggcacgctgccgggctggcaccgcgcgttttgcctgcggttgaccgccgggcgcggtagtgcctgccagccgggacgcatgctggccctcaaagagggcggccgaaccaccggcgtcgcctatcgtctgcctgacgacacgctggaggaggagctgaccctgctgtggaagcgggagatgatcaccggctgctatctgcccacctggtgcaagctggagctggacgacggacggacggtgaatgccctggtgtttattatggatccgcgccatccactgtttgaaccggataccagtgcccaggttatcgccccgctgatcgcccgggccagcgggccgctcggcaccaacgcccagtatctgttttcgcttgagcaggcgctgcgcaagctgggcatgcacgatgccagtctcgatgacctggtggccagcgtccgcgcgctgttgggcgagagtccgacgccgggcctggcctga

SEQ ID NO: 138918 - DNA, 243 bp, Enterobacter cloacae
atggcgatggttaaagcaagtttgacgttatttggtggtgacacgctggtggtgcggtgctcagagcgctgccatattcatctgatgagcgcgaaggtcccgggcgacagtcatgcggatattctgagcgtacaggatcgggacagcgcctatctgacggtgccctacagcggcacctggaacgtgcttatcgacagtcacagccagtcgctggagcactccatcagctacgtgccggcctga

SEQ ID NO: 138919 - DNA, 354 bp, Enterobacter cloacae
atgcaacgtattgtgatcatcgccaacggcgccgcctacggcagcgaatccctgttcaacagcctgcgcctggccattgccctgcgcgagcagcagtccgacctcgatctcaagctgtttctgatgtccgacgccgtcaccgccgggctgcgggggcagaagccggcagaagggtataatgtgcagcagatgctggagatcctcaccgcccagcaggttcccgtgaagctgtgtaaaacctgcgcggacggccgcggggtcagcgcactgccgctggttgacggcgtggaggttggcactctcgttgagctggcccagtggaccctggcggcagataaagtgctgaccttctga

SEQ ID NO: 138920 - DNA, 1182 bp, Enterobacter cloacae
atgaataatacgactggtcatgcgcacgatgcgacggcctggctgcagctggcgcgtcgcctgcaaaaacaacagcttcagcagcttagccaactgggggaactggccagccagctcagcgcgctggtgcatatgctgcagtgtgagcgcggggcgtcgaatatctatctttgctcgggcggcttgctgtatacagcggagtgtcgggcgggaggggcgctggttgacgagcggctagccctgttttatgccagcctcgaacgggcgcgcgcggtagccggcagcgcgctgtgctggcgtatcgccagagcggttgacgagctggcgcagctcccggcgctacgcgcgcagatcggccgccggcaaattgccgctgaagccgcgacggagcagttcagccgcgtcatccgccatctgctgaacatcgccccgcagctcaatgacagcattgacgatccgccggtggctggtcggttggtcgccctgtacagctttatgcagggaaaagagctggtgggccaggagcgcgcgctgggagcattgggctttacccgcggcgagttcagcgacagcctgcgccagcagctggtggaccgtattgacggtcagcagccctgcttcgacagctttcaggcgctgggcagcccggcgaccgtccagttgttcagaacccagtgccatgccggtctggatattgaacagctgcggcggatcgcctgtacccgccagccggctgccgacggcggggaaacggcactgcgctggtttggtctgcaaacccaacggcttgagcaactgcgcgaagtggaagagcaactgatcgacgacctgctggatgccaccgacgcgctgttagcagacgacgcgcctggctggcaggccggagaggaagacgatagcgtgacgccacggctcgataaacagctactgccgctggtgcgccagcaggcctatgagctgcagcagctctccagccagctggcctcgctgaaagacgcgctcgaagagcgcaagctgatcgaaaaagcgaaaagtctgctgatgacgcaccagggaatgcaggaggagcaggcctggcagacgctgcgcaagatggccatggacaaaaatcagcgcatggttgagatagcccgcgcgctgctgatggtgaaggcgatttggccgctaacaccaaaggagtag

SEQ ID NO: 138921 - DNA, 990 bp, Enterobacter cloacae
  misc_feature (841)..(850): n is a, c, g, or t
atgggcgacaaattttcaatttcccggcggcgcttgctgcaggcaggggccgcgctgggcggcgcgatgctgctgccgggcgtgatgcaggccgcctgggccggcggctcggacaaaccggagcaaacccgcgtgcgggtcggatttattccgctgaccgattgcgcgccgctggccatcgccgcggcgaaggggtttgaccaaaaatatggcatcaccctggtggcgagtaaggaagccagctgggcggcggtgcgcgacaagctggtggccggcgagctcgacgcggcgcatattctctatggcctgctgtacggcctcgaactggggatcgccagcaagccgcaggcgatggccaatttgatgaccctcaaccgcaatggccaggcgattaccctctccagcgagctgcaggagaaaggggtgaccgacctcggcgggctgaagcggctgatcgaccgcagcgcgccgggccgttacaccttcgcgcatacctttcctaccggcacccatgccatgtggctttactactggctggcgagcgccggcatcgatcccttcaacgatgtgcgcaccgtcgtggtgccgccgccgcagatggtgatgaacatgcgcatcggcaatatgagcggcttttgcgtcggcgagccatggaacgcccgcgccattaacgaccgtatcggcttcaccgcggccacttcccaggatatctggcccgagcatccggaaaaggtgctgggcacccgtcgcgactgggtggaacgcaacccgaacaccgcccgcgcgctggtggcggccctgatggaggcgcagcgctggatcgccgcctcgccggagaacnnnnnnnnnnccgcctgctcgccagacgcggctggctcaataccaaggagcaatacctcaccggccggatgctgggagagtatgacaacggccttggccgccgctggcaggatgcccatccgatgcgcttctgggccgggggcgaggtga

SEQ ID NO: 138922 - DNA, 291 bp, Enterobacter cloacae
atgcgcttctgggccgggggcgaggtgagtttcccgtggctgtcggacgggatgtggttcctcacccagttccgccgctgggggttgctgaagcaggcaccggattacctcgcggtggcgtcgcgcattaaccgcatcgatgtctggcaggctgccgcccaggcggtaggagggatcagcgcgccggcagccaggatgcgcagcagcacactaatggacgggacggtatggaacgggtccgacccggaaggctacgcccgccatttctctattcaacgtaagggggcatga

SEQ ID NO: 138923 - DNA, 723 bp, Enterobacter cloacae
gtgctgctgctggcctggcagctggcggcgatgcatagcaaaggctttcccacgccgctgagcacgctggactcggcgctgaccctgtttgccgatccgttctatcaggacgggcccaatgacatgggcatcggctggaacgtgctggcctccctgcagcgcgtggcggtgggcttcggcctggcggcgctggcgggcattccgctggggtttttgatcggccgttcgctgttcttcgcccgcatgtttaatccgctgattgctctgctgcgcccggtcagcccgctggcctggctgccgattggcctgctgctgttccagaaggcggagccggcttccagctggaccatttttatctgctccatctggccgatggtgatcaacaccgcggagggtgtgcggcggatcccgcaggactatctcaacgtcgcccgcgtcctccagctctcggagtggacggtgatgcgcaaaatcctctttccggcggtgctgccggcggtgcttaccggcgtgcgcctctccatcggcatcgcctggctggtgatcgtggcggcggaaatgcttaccggcgggctggggatcggcttctggatctggaacgagtggaacaacctcaatgtggaaaacatcatcatcgccatcgtcattatcggcgtcgtcggcctgctgctggagcagggcctgatgctgctcgctcgccgctttagctggcaggaaaaataa

SEQ ID NO: 138924 - DNA, 789 bp, Enterobacter cloacae
atgaaaccattaattcaggtgcaggccgtcagccaacgcttcaacaccgccagcggcgagttcctggcgctgcagaatgtctccttcgatatcgtcgaaggggagaccattagcctgatcggccactcgggttgcggaaaatcgaccctgctgaacctgatcgccgggatcaccacccctaccgagggcggactactgtgtgataaccgggaaatcgccggtcccgggccggagcgggcggtggttttccagaaccactcgctgctgccgtggctgagctgtttcgacaatgtggcgctggcggtggatcaggtgttccgtcgcaccatgagcaagagtgagcgccgggagtggatcgaacacaacctggcgcgcgtacagatgggtcatgcgctgcacaaacgtcccggggagatctccggcggcatgaagcagcgggtgggtatcgcccgggcgctggcgatgaagccgaaagtgctgctgcttgatgagcccttcggcgccctggatgcgctgacccgcgcccacctccaggacacggtgatgcatatccagcaggagctcaataccaccatcgtcatgatcacccacgacgttgatgaagcggtgctgctctcggatcgggtactgatgatgaccaacggtccggcggcgacggtcggcgagatcctcgcggtcgatctgccgcgtccgcgccaccgcgttcagctggcggacgacagccggtatcaccatctgcgccagcagatcctccatttcctgtatgaaaaacagccgaaagcggcgtaa

SEQ ID NO: 138925 - DNA, 639 bp, Enterobacter cloacae
gtgttctgctatagccagcacctgcgcggcctgatccgcacccgcgtgcagcagatgatctccgaatgtatcgaactgcgtctctccagtacccgccaggataccgggcgcttcaaagcgctgcgcgtctccggccagacgtgggggctgttcttcgagcggcttaacgtttcggtgcagaagctggaaaacgccattgagttctacggcgctatctcgcacaacaagctgcacgggctgtcggtgcaggtggaaaccaatcacgttaagctgccggcggtggtggatggcttcgccagcgaagggattattcagttcttctttgaagacgcggataacaacgacagcggctttaacatctatattcttgatgagagcaaccgcgccgaggtctatcatcactgcgagggcagtaaagaggagctggtgcgcgacgtcagccgcttctattcgtcatcgcacgatcgtttcacctacggctccagctttatcaacttcaacctgccgcagttctatcagattgtcgaggtagacgggcgcacccaggtgatccctttccgcactcaggcgattgccgccgcgatacccaccagccaggacgttaccgcctcgccggtgctgcagcagcgctactcgtag

SEQ ID NO: 138926 - DNA, 321 bp, Enterobacter cloacae
atgaacgacagtgaattccatcgcctggccgatagcctgtggatgaccatcgaagaacgtctggacgactgggacggcgatagcgacatcgactgcgaaatcaacggcggcgtgctgaccatcagctttgaaaacggcagcaaaatcattattaaccgtcaggagccgctgcaccaggtgtggctggccaccaaacagggcggctatcacttcgatctcaaaggcgacgagtggatctgcgatcgcagcggcgaaaccttctgggatctgctggagcaggcggcgagccagcaggccggtgagacggtgaagttccgttaa

SEQ ID NO: 138927 - DNA, 204 bp, Enterobacter cloacae
atgaaaaacgtttttcctacgcttgccgttttgtttgcgatcttcagcctgaccggctgcggtctgaaagggcctctctatttcccaccggcggacaaaaccgcgccgccgccgaccaaaccggttaaccctggcattcagagcgcaacgccggatcgtaacgatcgtggcgataccggtggtccgagccaggtcaattactaa

SEQ ID NO: 138928 - DNA, 825 bp, Enterobacter cloacae
atgcagttctctaaaatgcatggccttggcaacgattttatggtcgttgacgcggtaacgcagaatgtttttttctcgccggagctgattcgccgcctggcggatcgccaccttggcgtcgggttcgatcagctattggtcgtcgaaccgccctacgatccggatctggatttccactaccggatctttaacgccgacggcagcgaagtgtcgcagtgcggcaacggcgcgcgctgttttgcccgcttcgtccggctgaaaggcctgaccaataaacgtgatatccgcgtgagtacggccaacgggcgtatggtattaagcgtaacggaagacgatctggtgcgggtgaacatgggcgagcccaacttcgagccgtcccaggtgccgttccgcgccaacaaagcggaaaagacctatatcatgcgtgccgccgagcagacagtattgtgcggcgtggtgtccatgggaaatccgcactgcgtcatccaggttgatgatgtggatacggcggcggtggaaactctcggcccggtgatggaaagccatgagcgttttccggagcgcgccaatatcggctttatgcaggtggtcggtcggtctcatatccgtctgcgcgtctacgaacgcggcgcgggggaaacccaggcctgcggcagcggcgcctgcgccgcggtggcggtggggatccagcaggggctgctggcggaaacggtacgcgtggaattacccggcggtcgtcttgatatcgcctggaaaggcccgggccagccgctgtttatgaccggcccggcggcccatgtctatgatggatttattcatttatga

SEQ ID NO: 138929 - DNA, 708 bp, Enterobacter cloacae
atgaaaccaatcggggaagaacagcaggaggttgccagcgcgttgaacgatcgcgcagtggtggactatctgttgcaacatcctgaattttttattcgtaatgccgcccaggtcgaacatctccgcgtcccgcatccggtacgtggtacgatttcgctggtggagtggcacatgatgcgggcgcgtaaccatattcatgtgctggaagagaatatgtcgctgctgatggagcaggcggtcgctaatgaaagcctgttccagcgcctgctgcagctgcaaacgcggctggcggcggcggagagcctcgacgatatgctcaaccgccttcaccgctgggcacgcgagctggggctggcgggcgccacggtgcgcctgtttcctgactgctggcgcctcggcgcgccctcgaagtttacccatctggcattaaaccggcaggcgtttgagccgatccgtattcaacgtctgggccaggcgcgccactatcttgggccgctgaacggcccggagctgctggtggtgctgccggaggcgaaggccattgggtctgtggcgatatcgctgctggggggcgataatgccccgggggtgatgctcttcagcagccgcgatgcgcagcattatcagccagggcaggggacgcagctgttgcaggagattgcccagatgctgcccggcctgctggagcgctggattgaacgcgcatga

SEQ ID NO: 138930 - DNA, 903 bp, Enterobacter cloacae
atgaccgattctcctctcttctccgccgtcgcccgctttcttcgccatcttggcgttgaacgccagctcagcccgatcacgttactgaattaccagcgacagctggacgcgctgatcgccctggcggatgaggcgggcctgaaaagctggtcgcagtgcgatgccgctcaggtgcgaagctttgcggtgcgtagtcgccgcgcggggttaggcccggcaagcctggcgcttcgcctgtcggcgctgcgcagtttcttcgactggctggtcggccagggcgagctcagcgccaatccggcgaaggggattgccgcgccgaaaattccccgccacctgccaaaaaatattgacgtcgatgacgtcaatcgactgctggatatcgatctcaacgatccgctggcggtgcgcgatcgggcgatgctggaggtgatgtacggcgcgggattgcgtttgtccgaactggtcaacctggatatcaaacacctcgatctcgaaagcggtgaggtctgggtgatgggcaaaggcagcaaggagcgtcgtttgccgatcggtcgcaacgcggtggcatggattgagcactggctggatttgcgcggcctgttcggtaccgacgacgacgcgctgtttttgtcgaagctgggcaaacgtatttcggcgcgcaacgtacagaagcgattcgccgagtggggcattaagcaggggctgaacagccatgtgcacccgcacaagctgcgccactcctttgccacccatatgctggagtcgagcggcgatctgcgcggcgtgcaggagctgctggggcatgctaacctctccaccacccaaatctatacccatcttgattttcaacaccttgcctcggtgtacgatgccgcgcatccgcgcgctaaacgggggaaataa

SEQ ID NO: 138931 - DNA, 717 bp, Enterobacter cloacae
atgcgtttttaccgacctctgggccagatttccgcgctgacgtttgacctggacgataccctttacgataaccgcccggtgattgaccggacgatgcacgagtcgctggcctttgtgcgcagctaccatccttcgctcagccagttcgacgcccatgagcttaatcagctgcgtcagacgctgctggctgctgaacctgagatttatcatgacgtgaccgtctggcgccaccgtgcgctggagttaggtatgcgtaatgccgggctctccgccgaagcggcgaaagcgggggccgatgcggcgatggaacacttcgctcactggcgcagccgcgtcgatgtcccgcaggaaacgcacgatacgctggcgaagctggcgaagaagtggccgctggtggcgattaccaatggcaacgcccgcccggaactgttcggtctgagcgactatttccgcttcgtgctgcgcgccgggccggatggccgctccaagccgtttgccgacatgtaccaccttgcggcggagcgtctgaatgtgccgctcgggcagattctgcacgtcggcgatgatctgaccaccgacgtggccggcgctattcgctgtgggatgcaggcctgctggatcaaaccgcaaggcgcggacctgatgcacaccgcggacagccgcctgctgccgcatattgaaatttcacggttggcatctctgacctcgctgatataa

SEQ ID NO: 138932 - DNA, 1089 bp, Enterobacter cloacae
ttgctccagcgcgccgccgttctcctgccaggttttaattcggttcaccacaaagcgcgcttcgtcgagatcgttgaaggcgcagtacagcgaaatcggctcgccgtcggcgccgtcggtccacagctttttgcccaggcgcccgttgttgttttcaatcagggcgttggcagcgctgagaatattgctggtcgagcgatagttctgctccaggcggatggtttccgcgccggggaagtcgttaaggaagcgctgaatgttctcgacctgcgcgccgcgccagccatagatagactgatcgtcatcgccgacgatcatcaccttgccggtatcgcccgccagcaggcggatccaggcgtactgaatgttgttggtatcctggaattcatcgacaaggatattggtgaagcgctcgcggtagtgctgcaggatatgcggtttgttcagccacagctcatgggcgcgcagcagcagctcggcgaagtccaccagcccggcgcggtcgcaggcttcctgataggcctgatagaccttctgccaggtctgctcgaccgggttgccgtagctctgaatatgatgcgggcgcagcccttcatctttctggctgttgatgtaccacatcgcctggcgcggcggccactgtttctcatcgaggttcatcgccttaatcagacgcttcagcagacgcagctggtcttcgctgtcaaggatttggaagtcctgcggcaggttggcatccagatggtgcgcgcgcagcaaacggtgcgccaggccgtggaaggtgcccacccacatgccgccctgggtggtgcccatcagctggccgatacggtgacgcatctccgccgccgctttgttggtaaaggtcaccgccataatggaatacggggaacagttctccacgctcagcagccaggcgatacggtgcaccagaacgcgcgtcttaccactgcccgcccctgccagaaccagcatattggtgcgcgaggccgctacggcttcacgctgtttgtcattaaggctgtcgagcaggtaagaaacgtccattggcaccgccggaagagaaggggttccacgaacccctgttaa

SEQ ID NO: 138933 - DNA, 2640 bp, Enterobacter cloacae
atgaagggtaaatataaagccgccatcgcgctggtgttagttctggtgttattgccgctaaccctgctgttgacgctaacccactgggtgccgacgctggcgggcatctggctgcccgtgggcacgcgtatctctttgcaggagagcccgcgcctgacgcggtcggccctgctgatccccgatctgcgttatctggtgggcgactgtgaaatcgcccgggtgaccgatgcccgtctctcgcgtcccagccgctggcggctgcatattggccagctggagatcaacagcgcctgcctgagcaaactgccggccagcgatccctctcccggttcaccgcgcacgcttgccgaatggcaatcgatgttgccctatagctggttaaccattgacaatctgcggctgtcgccgtgggagaaatggcaggggcggctggtaatgtcattaacgcctgcgcagcaggatatcggctttgccgggaaggaactgagtctgcaggcgcgcctgcgcggccaggcgctcaccgtcagccagttcagcgcccggctgactgacgatcagccgccggtgaagctggtggggaccttccatctgccgctggtgccggatggtctgccggtcgacggccagatgcagggcaccttcgaattcccgcagactgcggaatggatcgatgctgagctcgagtggcagcacaatcgcggccagctgctggtcaccccgcggggtgaggtagagcctattctggacctgccgtgggagatcaccccggagcggatcactatcagcgacggccgctggcgcacccgttacgaggcgtatccgctacgcgggcgggtggcgctgtcggtgggtaactggcagcagggcaccgaacagatgatcgtcagcggtcgcctgaatgttctcaccgaggggcatgccgggaagggcaatgcggtactgaatattggtccgggcaagctgagcatggataacagcgatctgccgctgcggctcaccggcgaggccaagctgggggagatgatactatacgcggcgctgccggctcagctcagcgggccgctgatcagcccgcagctggcttttcaccccggtgcgttgctgcgctcgcgcgggcgggtgatcgacgcgctgaatattgacgaaatccgctggccgctggccggggttaaggtcactcagcagggcgtcgatggccgcctgcaggcgatccttcgcgcccatgagcagcagatgggcgactttacgctgcatctggacggtcaggcgagcgattttctgcccgacagcggccgctggcagtggcgctactggggcgagggacattttaccccgatgcaggcgcgctgggatgtgaagggcagcggggagtggcgcgacaatgctattaccctgagcagcctctccaccggcttcgataagcttgagtacggcacaatgcgggtcagcaccccgcgtctgaccctcgagcagccgatccgctggctgcgcgatgctgagcatccgcggttgaccggcgcgctgtcgctggacgccgccaaaaccaccttctccggcggcagctatctcccggcctcaacgctgaaattcgccctcgacggtcgggacccgacgtggttccagttcaccggcgccctgcatgccgaggctatcggtccggtgcgtctgtccgggcgctgggatggcgaacggctgcgcggccaggcgtggtggccaaaacagtcgctaacggtgttccagccgctggtgccgccggactggaagatgaacctgcgcgaaggcagtctctacgcgcaggtggccttctcggcggcagccgggcagggatttgaggcgggcggccatggcgtcctgaagggcggcagcgcctggatgccggataaccagatcaacggcgtcgacttcgtcctgccgttccgcttcagcgacggtcactggcagctgggcatccgccgcccggtctccctgcgcattggcgaaatcgtcaaccaggtcacagcgcgtaatctgacggcggacctgcagggcacctggccgtggagcgaggccaatccgctgcagctcagcgacgtcagcgtcgatctgttaggcgggaaactgacactgctgcagctgcgtatgccgcagcgcgacccggcgttgatccgcctgcagcatatctccagcagcgaactgaccagcgccgtcaaggtgaaacagttcgccatgtccggcgcggtgagcggcgcgctgccgctgtggctggagaataatcaatggatcatccacgacggctggctgcgcaatgacggaccgatgaccctgcggctggataaagacaccgccgatgcgctggtggcggataacgtctccgccggggcggcgattaactggctgcgctatatggaaatctcccgctcgtggacgcagattaacctcgataatctgggcgtgttgacgcttaaggccagcatcaacggcaccagccgggtggaagggaaaagcagtaccgtgcatttaaactacgctcatgaagagaatattttcgacctgtggcgcagcttgcgcttcggcgacaatttacaggcgtggctcgagcagaatgctacgctgcccgtacggcgctgtacggacggtaagacatgtaaggaacctaaatga

SEQ ID NO: 138934 - DNA, 186 bp, Enterobacter cloacae
atgaagaagctgttactggccatggcggcgtcgatgctgctcgccggctgtacgccgcgcatcgaaatcgcggcgtcgaaagagcccatcaccatcaatatgaatgtcaaaattgagcatgagatccatatcaaggtcgataaggatgtggaaaacctgctcaaatcccgcagcgatttgttctga

SEQ ID NO: 138935 - DNA, 324 bp, Enterobacter cloacae
atgagaaaacgactgttaaccgcggcgctgacgctggctttactcagcgcgcccgcgctggcgttgaccctgagcgaagcgcgccagcagggacgagtgggggagacgctgaacggctatctcgcgccgctgcgtcaggataaagagacgctggcgctggtaaagcagattaacgccgcgcgcagcgaaagctaccagcagctggcggatgacaacaatctgccggtggatgaagtggcgaaaatggccgggcagaagctggtggcccgcgcgcagcccggggagtacgtccagggattgaacggccagtggctgcgcaaataa

SEQ ID NO: 138936 - DNA, 903 bp, Enterobacter cloacae
atgatgaccacggcagagggagggctggcgtatcagcgctggctggcgacgatcaatcaggtctgcggccatttcgccgcccggccgttggaggagagtttccacggcgagattgacgcccgctacgccggcagcctcaaggtcagtaccgtcaccgccgccggcgtcaatctctaccgcacgcgcaatgagataaaacgcgataacgacgcctggttctataccgtgtttcagctcgccggcgaagccatcctcgaacaggacgatcgccaggtgacgctggcggcaggcgatatcacgttaatcgacgccgcccgcccatgctccatcgtctggcagcagacctcgcgtcaggcctcgctgctgctgccgcgccagcgggtggcgcccacaggggacatcactaccgcctgccggctggacaaatctctgccaatggtccagctcagccagcgactgctgctggaaagcatgggcggcacgacgctctccgccagcgagagcgaagccgcgctggaggcgatcgcctgcctgttgcgcccggtgctgcatcagcgcgatcctgccccttcccggcgggaaaagcagtttcagaagattattgcgttaatcgatgcgtccattcagtcggagcatctgcgtccggagtggctggccagcgagacgggcatgtcggtacgcagcctgtaccggctgtttgccgatcaggggctggtggtggcgcagtatattaagaaccggcggttggatctgtgtgcccaggcgttacagaatgttcatgacgatgaaaagctggcggggatcggctaccgctggggcttcagcgaccacagccatttctccaccgcctttaagcagcgctttggcgtcaccccgggggaataccgcaagcgctgtcgctaa

SEQ ID NO: 138937 - DNA, 1500 bp, Enterobacter cloacae
atgtccacctcacagatagcgctgcttgccagcgtccagcagtttttagaccgtcagcatggcctgtatatcgacggcgccccctgcgccgcgcagagcgaaaaccggttaaccgtctgggatccggccaccgggcaggcgattgccaccaccgccgacgccagcccggcggatgtcgaccgggcggtgatgtccgcctggcgcgcttttgtcgatcgccgctgggccgggcgcaccccggctgaccgtgaacgcatcctgctgcgttttgccgatctggtggagcagcacggcgaagagctggcgcaactggaaaccctcgagcaggggaaatccattgccatctcccgcgcctttgaggtcggctgcaccctgaactggatgcgctacaccgcggggctgaccaccaagatcagcggccggacgctggacgtttcgatcccgttcccgcaaggggcgcgttaccaggcgtggaccaaaaaagagccggtcggggtggtggcgggcatcgtcccgtggaatttcccgctgatgatcggcatgtggaaggtcatgccggccctggcggcgggctgttcgatcgtcatcaaaccctcggaaaccaccccgctgaccctgctgcgggtggcggagctggcgacccaggcgggcgttcctgacggggtgttcaacgtggtcaccggcagcggcgccggctgcggcgcggcgctgaccgcccatccgcaggtggcgaaggttagctttaccggctcgacggcgaccgggaaacagattgcccgcgtggctgccgaccgcctgacccgcgtgacgctggagctgggtggcaagaatccggcgattgtgctcaaagacgccgacccccagtgggttattgaggggctgatgaccggaagcttcctcaatcaggggcaggtctgcgccgccagctcgcggatctacatcgaagcgccgctgtttgacaccctggtcagcggcttcgagcaggcggtgaaatcgctgcaggtggggccggggatgcaggagacggcgcagatcaacccggtggtctcccgggcccactgcgacaaggtggcggcctacctcgaagaggctcgccagcagaaggcagagcttatcagcggcagcgccggaccagacgcgggagggtactatattccgccaacgctggtggtaaaccccgacgccggactgcgtctcagccgtgaggaggtttttggcccggtggtgaacctggtgcgagtggccgatggcgaggaggcgctgcgcctggccaacgacagcgattttggtctgaccgccagcgtctggacccgcgatctgacccaggccctgaactacaccgaccgtctgcaggcgggaacggtatgggtcaacagccataccctgattgacgccaacctgcctttcggcggcatgaagcagtctggtaccggccgcgatttcggccctgactggctcgacggctggtgcgaaaccaaatccgtctgcgtgcgctactaa

SEQ ID NO: 138938 - DNA, 261 bp, Enterobacter cloacae
atggcctccgtctgggtagttttcaccgcgacaaagaccaggtcgaagggggcggctatcgccatcgggtcggtgtgcaccgggccgggcaccacgatctcaccttcgtcagtgcgcagcaccagcgccgaatgggcggtacgcccgcagaccatcggcgccctccccctctcaaacagggcggcggcaatcgtggtgccgatggcgccgggaccaattagcgcaaccttaggaaatgctgtcatgccgaagacctcctga

SEQ ID NO: 138939 - DNA, 1479 bp, Enterobacter cloacae
atgagtctgtggattaacggcgagtggcggcccggccgtgggccaggtttcagtaaacaggatccggttaacctgaaggttgtctggcagggagaagcggcggatgccgggcaggttgccgaggcggtggcggctgcccgccaggcgttcccgtcctgggcgcggctgccgtttgccgcccgtcaggcgatcgttgaaaagtttgccgctctgctggaagccagtaaggcggagctgacggcggttatcggcgccgagaccggaaagccgcgctgggaggcggccggggaagtgacggcgatgatcaacaaggtggcgatctcggtgaaggcctaccacgtccgcaccggcgaacagcacagcgacctgcccgacggcgccgccacgctgcgtcaccggccgcacggcgtactggcggtgtttggcccctataactttcccggccatctgccgaacgggcacatcgtgccggcgctgctggcgggcaataccgtggtctttaaacccagcgaactcaccccgcgcagcggcgaagcggtggtgaaactatggcagcaggccggcctgcccgccggggtgctcaacctggtgcagggcggtcgggaaaccggcgaggcgctcagcggccaggcggatatcgacggactgctgtttaccggcagctcaaccaccggttttcatctgcatcgccagctggccgggcaaccgcagaagatcctcgcgctggagatgggcggcaataacccgctgatcgtcgacgatccgcgggacgtggatgccgcggtgcatctgaccatccagtccgcctttattaccgctggccagcgctgcacctgcgcccggcgtctgctggtccgacgcggagaggcgggcgatgccttcctctcccggctggtgacggtgagccaacggctgatcccggcggcgtgggacgccgagccgcagccgtttctcggcgggcttatctctgaacaagccgcgcagaaagtgcatcaggcctggctgcagcgggtcgccgctggcgcggtcaccctgctggagccgcggttattgcaggccgggacgtcgctgctaacgccggggattgtcgacatgagcgacgtggccaatgtcgaggatgaagaggtgtttggcccgctgcttggggtctggcgctacgacacgttcgaggaggggattgccttagccaacgctacccgcttcggcctctcctgtgggttaatctcaccggaacgggagaagttcgatcgactgctgctcgaggcgcgggcagggatagttaactggaacaaaccgctgaccggggcggcgagtaccgcgccgttcggcggcaccggggcgtccggtaaccatcgtccgggggcctggtatgccgccgattattgcgcctggccgatggccagccttgaatcgccgaccctgacgctgcccgccagcctgagcccggggctcgactttctggccagggaggcgtcatga

SEQ ID NO: 138940 - DNA, 1035 bp, Enterobacter cloacae
atgatggttattcgaccggtggagccgggcgatttgcccgggctgctgaagctggcagcggagaccggcggcgggctgacctcgctgccggtggatgaagcgaccctcgcggcgcggatcgcccgctcgcagcagacctggcgcggcgagctaccgaaaagcgagcagggctatgtctttgtgctggaggagagcgaaagcggcgcggtggtgggcatctgcgcgatcgaggtggcggtggggctcaacgatccctggtataactaccgggtcggcacccaggtccatgcctcaaaggagctcaacgtctatcaggcgctgccgacgctgtttctcagcaacgatcataccggcagcagcgagctgtgcaccctgttcctcgacccgcagtggcgcaaagagggcaatggctatctgctgtcgaaatcacgcttcttatttatggccgcctttcgcgagcgcttcaatgagaaggtggtcgccgagatgcgcggggtgattgacgagcagggctactcgccgttctgggagagcctgggcaaacgctttttcgccatggagttttcccgtgccgactacctgtgcggcaccggacagaaggctttcattgccgccctgatgcccaagcatccgctgtatatcgatttcctttcccctgaggcacaggcggtgatcggcaaggttcatccgcagaccgccccggcccggacggtgctggagaaagaggggttccgctacctgaactacatcgatattttcgacggcggcccgactctggagtgcgacatcgaccgggtgcgggcgatccgcaaaagccgtctggtgaccaccgaggccggcgaaaccccgcccggtgactggccgctgtgcctggtggcgaatgaacagtatcaccagttccgcgctctgctggtacatgccgatccggatggcgacaccctgaccctcagcgcccgcgaactggatatgctgaagtgtcatgctggcgaccaggtgcgcatggtgcgcctgatccctgaggagaaaactgcatga

SEQ ID NO: 138941 - DNA, 132 bp, Enterobacter cloacae
atgattctgatcgccggcgccaacgtggtgcgtttcgcgccagcgctgaacgtcagtgaagaagaggtgaacagcgggctggatcgcgtcgagcgggcctgcgcgcgtttcgtggcaggagtctcatcatga

SEQ ID NO: 138942 - DNA, 1095 bp, Enterobacter cloacae
  misc_feature (1040)..(1049): n is a, c, g, or t
atgtctcagtcaattacgcgtaaccactttgatgaatggatgatgccggtctacgcgccagcggcgtttattccggtgcggggcgccgggtcacggctgtgggatcagcagggcaaagagtatatcgattttgccggcggcatcgccgtgaacgcgctggggcatgcccatccgcgtctggtgcaagccctgaccgaccaggccggcaagttctggcataccggcaacggctacaccaatgagccgatcctgcgtctggccaaaatgcttatcgatgctaccttcgccgaccgggtcttcttctgtaactccggcgccgaggccaatgaggcagcgctcaagctggcgcgtaaatatgcccacgatcgctttggcagcgagaaaagtggcatcgtcgcctttcagaacgctttccacgggcggacgctgttcaccgtctcggcgggcggtcagccggcctattcccgggatttcgccccgctgccgccgcagatccagcatgccgtatttaacgatctcgagtcggcaaaggccttaatcaatgaccagacctgcgcggtgatcgtcgagccggtgcagggcgaagggggcgtggtgccggccagcgtcgagtttttacgcggcctgcgtcagctttgcgaccagcacaacgccctgctggttttcgatgaagtgcagaccggggtcgggcgcaccggcgagctgtatgcctatatgcactacggcgtgacgcccgatgtgctgaccaccgccaaagcgctgggcggtggtttccctatcggtgcgctgctggcgacagaggcctgcgccagcgtgatgaccgtcggcacccacggcaccacctacggcggtaacccgctggccggggcggtggccggcgaactgctgtcgatcgtcaacaccccggaagtgctctccggcgtcagacagcgccatcagtggttttgtgaacgcctgcaggcaattaacgcccgctatggcctgttcaaggagatccgcggcctgggactgctgctcggctgcgtgctaaacgacgcctnnnnnnnnnngggaaggcgaaaaccctcagcaacctggcggcggaagagggggtga

SEQ ID NO: 138943 - DNA, 807 bp, Enterobacter cloacae
atgaaattcgtctcttttaatatcaacggcctgcgtgcccgcccacaccaactggccgccatcgtcgaaaaacaccagccggacgtgattggcctgcaggaaaccaaagttcacgacgacatgttccctctcgaagaggtcgccaggctcggctataacgtcttttatcacgggcagaaaggccattatggcgtcgcgctgctgaccaaagagacgccgattgccgtccgccgcggtttcccggacgatggcgaagaggctcagcgccgcatcattatggcggagatcccgtcgcccttcggcaacgtcacagtgattaacggctatttcccgcagggtgaaagccgcgatcatgaaaccaaattcccggccaaagcggcgttctatcagaatctgcagaactatctggagaccgagctcaacaaagagaatccggtgctgatcatgggcgatatgaacatcagtcctaccgatctggacatcggtatcggtgaagagaaccgcaaacgctggctgcgcaccggcaaatgttccttcctgccggaagaacgggaatggatggaccgcctgctgggctggggcctggtggatacctggcgtcaggctaaccccgacaatcatgagcatttctcgtggtttgattaccgctccaaaggcttcgacgataaccgtgggctgcgcatcgatctgctgctggccagccagcctctggcgcagcgctgcgtggaaaccgggatcgattacgagatccgcgggatggaaaaaccgtccgaccacgcgccggtgtgggccaccttccggccataa

SEQ ID NO: 138944 - DNA, 657 bp, Enterobacter cloacae
gtggccacgctggccgttatcagccaccgcgtcggtctccacgatctgctgactcacctgcatctgcttcaggacaccctccgccatcagggcgcctggggatatctggtctatgctgcgctgtttatcattgccaccctgtgtctgatccccggcagcctgctggtgatcgccggcgggatgctcttcggcccgctaacaggctccttgctctcgtttgccgccgccaccctcgcctcttcgctgtcgtttttaatcgcccgctggcttggacgcgatctgctgcagcgctatgtcggccataccaccgtctttcaggcgattgagcgcggtatcgcccgcagcggctgcgatttcctgatcctcacccgcctggtgccgctctttccctacaacattcagaattacgcctacggcctgacggcgatccgcttctggccctttaccctgatctcggccgtgaccaccctgccgggtctggtcatctattcggtgatggccagcgaactggcccgcgagggggtgaccctcgccttcgcgctcaaactgagcctcgccggcgggctgctgtttgccctggtgcagataggtaaacggtttgcccgcgcccgtcgcgtggcggcgtgcagtgaggaggtgcgctatgacccaacctga

SEQ ID NO: 138945 - DNA, 321 bp, Enterobacter cloacae; identical to SEQ ID NO: 103996

SEQ ID NO: 138946 - DNA, 828 bp, Enterobacter cloacae; identical to SEQ ID NO: 103997

SEQ ID NO: 138947 - DNA, 864 bp, Enterobacter cloacae; identical to SEQ ID NO: 103998

SEQ ID NO: 138948 - DNA, 828 bp, Enterobacter cloacae; identical to SEQ ID NO: 103999

SEQ ID NO: 138949 - DNA, 1011 bp, Enterobacter cloacae; identical to SEQ ID NO: 104000

SEQ ID NO: 138950 - DNA, 870 bp, Enterobacter cloacae; identical to SEQ ID NO: 104001

SEQ ID NO: 138951 - DNA, 636 bp, Enterobacter cloacae; identical to SEQ ID NO: 104002

SEQ ID NO: 138952 - DNA, 1281 bp, Enterobacter cloacae
atgaaactgtataacttaaaagatcataacgagcaggtcagctttgcgcaggccgtcacccagggacttggcaagcatcagggcctgttctttccgcacgatctgccggaattcagcctgactgaaatcgacgacatgctggcgcaggactttgtcacccgtagcgccaaaattctatccgcctttatcggcgatgagatcccgcaggatgtcctgcagcagcgggtgcgcgcggcgtttgcgtttccggcgccggtaagcaaggttcaggaagatgtcggctgtctggagctgttccatggccctacgctggcgttcaaggatttcggcggccgctttatggcgcagatgctgacccacatcgcaggcgataagccggtcaccatcctcaccgcgacctctggcgacaccggggcggcggtggcgcatgctttctacggcctgccgaacgtcaaggtagtgatcctctatccgcgcggcaagatcagtccgctgcaggagaagctgttctgtaccctcggcggcaatattgaaaccgtggcgattgatggcgactttgatgcctgccaggcgctggtgaagcaggcgtttgacgatgaagagctgaaggcgacgctgggtctcaactcggctaactccatcaacatcagccgcctgctggcgcagatctgttactacttcgaagcggcggcgcagctgccgcaggaagcccgcaatcagctggtgatttccgtgccgagcggcaacttcggcgatctgaccgccggtctgctggccaagtcgctggggctgccgatcaagcgctttatcgccgccaccaacgccaacgacaccgttccgcgctatctgcagggcggcgagtgggcgccaaaagccacccaggcgacgctgtccaacgccatggacgtcagccagccgaacaactggccgcgcgttgaagagctgttccgccgtaaaatctggcgcctcagcgagctgggctatgccgcggtcgatgatgagaccaccaaagcagcgatacgcgagctgaaggccatcggctacatctctgaaccgcatgcggcgattgcctggcgcgcgctgcgcgatcagctgcagccgggagagtacggcctgttcctcggcaccgcccatccggcgaagttcaaagagagcgtggaggagatcctgcaggagactctgccgctgccgaaggagctggccgaccgcgccgacctgccgctgctgtctcacaacctgccggcggatttcgccgcgctgcgtaagctgatgatgggctaa

SEQ ID NO: 138953 - DNA, 930 bp, Enterobacter cloacae
atggtcaaagtatatgccccggcttccagtgccaatatgagcgtcgggtttgatgtgttgggcgcggcggtcacgccggtcgatggcacgctgcttggcgacaacgtcactgtcgaagcggcggagcaatttagcctgcagaatcttggacgcttcgccagcaaactgccgacggcgccgcaggagaacattgtttaccagtgctgggaaagcttttgccgggagatcggcaagacggtgccggtggcgatgacgctggaaaaaaacatgccgattggctccgggctgggttccagcgcctgctcggtggtcgctgcgctggtggccatgaacgagttctgcggcaagccgctgaacgagacgcgcatgctggcgctgatgggagagatggaagggcgtatctccggcagcattcactacgacaacgtggcgccgtgctatcttggcggcatgcagttgatgatcgaagagaatgggattatcagtcagcaggtgcccgggtttgatgagtggctgtgggtgctggcctatccggggattaaagtctctactgctgaagcgcgggcgattctgccggcgcagtatcgccgccaggattgtatcgcccatggtcgccacctcgcgggctttattcacgcctgctacacccgccagccgcagctggcggcaaaattgatgaaagatgtgattgccgaaccgtaccgaaccaaactgctgccgggctttagcgaagcgcgtcaggcggccatggagatgggcgcccaggcttgcggcatctccggctctggcccaacgctgttcgcgttgtgtgataaaccggataccgcacagcgcgtcgccgactggcttggcgcgcactatctgcagaatcaggaaggctttgttcatatttgccggctggacacggcgggcgcacgcgtagtgggataa

SEQ ID NO: 138954 - DNA, 309 bp, Enterobacter cloacae
atggcccgcctgccgtcgctggacgatggttttgcctcgcgggttgctaaggcgcgcgatgaaggtaaagtcttgcgctacgtcggtaacatcgaagaggatggtacctgccgggtaaaaatagccgcggttgacggcaacgatccgctgttcaaagttaagaatggtgagaacgcgctggctttttatagccattattatcagccattgccgctggtgctgcgcggctatggcgccgggaacgacgtcacggcggccggcgtattcgccgacttgctgcgcaccctgtcctggaagttaggagtttaa

SEQ ID NO: 138955 - DNA, 2223 bp, Enterobacter cloacae
  misc_feature (2159)..(2168): n is a, c, g, or t
atgcgagtgttgaagttcggcggtacatcagtggcaaatgcggaacggtttctgcgggttgccgatattctggagagtaatgccaggcaggggcaggtagcgacggtcctgtctgccccggcgaagatcactaaccacctggtagcgatgattgaaaagaccattggcggccaggatgccctccccaatattgccgacgccgaacgcatttttgccgaacttcttcagggccttgccgacgcccagcccgctttcccgcttgcccagttaaaagccttcgtggagcaggaatttgctcagattaagcatgttctgcacggcatcagcctgctgggtcagtgcccggacagcgtcaatgccgcgctgatctgccgcggcgaaaagctctccatcgccatcatggcgggtctgctggaagcccgtggacataaagtcagtgtcattaacccggtcgaaaaactgctcgccgtgggccactatctggaatccaccgtcgatatcgccgaatccacccgccgcattgccgccagccagatcccggcagaccatatgatcctgatggccgggtttaccgccggcaatgagaaaggcgagctggtggtgctggggcgtaacggctccgactactcggctgcggtactggccgcctgcctgcgcgctgactgctgcgaaatctggaccgatgtcgacggagtgtacacctgcgatccgcgtcaggtgccggatgcgcgcctgctgaaatcgatgtcttatcaggaggcgatggagctctcctactttggcgcgaaagtgctgcacccgcgcaccatcgcccctatcgcccagttccaaatcccatgcctgattaaaaataccggcaacccacaggcgccgggaacgcttatcggcgccagccgcgacgaggacgatttgccggtgaaaggcatctctaacctcaacaacatggcgatgttcaacgtctccgggccggggatgaaagggatggtcggcatggcggcccgcgtcttcgccaccatgtcccgcgccggcatctcggtggtgttgatcactcaatcttcttcggagtacagcatcagtttctgcgtgccgcagagcgactgcgcacgtgccaaacgggcgatggaagatgagttttatctggagctgaaagaggggctgctggagccgctggcgattatggagcgtctggcgatcatctccgtggtgggcgacggaatgcgtaccctgcgcggtatctcggcgaaattctttgcggcactggcccgcgccaatatcaatatcgtggcgattgcccagggctcttccgagcgctcaatttcggtagtggtcagcaatgacgacgccaccaccggcgtgcgcgtgacccatcagatgctgttcaacaccgaccaggtgattgaagtgtttgtcatcggcgtcggcggcgtcggcggcgcgctgctagagcagatcaagcgccagcaagggtggctgaagaacaaacatatcgatctgcgcgtctgcggtgtagccaattctcaggcgctgctgaccagcgtgcatggcctgaatctggaaaactggagtgcggaactggcggaggcgaaagagccgtttaatcttggccgcctgatccgcctggtgaaagagtaccacctgctcaatccggtgatcgtcgactgtacctccagccaggcggtcgccgatcagtatgccgacttcctgcgcgaaggtttccatgtggtgacgccgaacaaaaaggccaatacctcttcgctggattactatcaccagctgcgccatgcggccagcagctcgcggcgtaagttcctctatgacactaacgttggcgcgggcctgccggtgattgagaacctgcagaacctgctcaacgccggcgatgagctgcgccacttctccgggatcctgtccggctccctgtcgtttatcttcggcaagctggacgagggggtgagtttctccgcggcgacggcgatggcccgtgagatggggtataccgagccggatccgcgcgacgatttatccggggtggatgtggcgcgtaaactgctgattctggcccgtgagaccgggcgtgaactggagctggcggacattatcgtcgagtcggcgctgccgccggacttcgacgccagcggcgatgtcgagacctttatggnnnnnnnnnncctttatggcccgcctgccgtcgctggacgatggttttgcctcgcgggttgctaa

SEQ ID NO: 138956 - DNA, 687 bp, Enterobacter cloacae
atgcgtttaacgattattttagtcggtcctgcccgggccgagaacgtcggcgctgccgccagggcgatgaaaaccatggggtttcgcaaactacggatcgtcgatagcgaagcccacctggcgccgccggcacgctgggtggcgcatggctcaggcgacatcctcgatggtatcaccacctatcccacccttgccgaggcgctgcatgacgttgattttaccgtcgccaccaccgcccgcagccgcgcgcgttttcactattacgccacgccgcagcagctgttgccgctgctggaggagaaggcgcagtggatgacgcacgcggcgctggtttttggccgtgaagactccggattgaccaatgaggagctggcgttggctgatgtgttgaccggtgtgccgatggctgcggattatccgtcgctgaatctcggccagtcggtgatggtctactgttatcaattagcatcgctaatgcaacaaacggcgcccgccgccgctgcggcagaccatcatcagctgcaggccttacgtactcgtaccctggcgttactttcgcgtttgggcgtggaggatgatgccaaactggccgactggttgtcgcaacggctgggcctgctgcagcagcgcgacacggcaatgttgcatcgtttgctgcatgatattgaaaaaaacctgccagaataa

SEQ ID NO: 138957 - DNA, 339 bp, Enterobacter cloacae
atgcggcggctgacagcgcgcaatcacatcggggagattggcgacctcgagcagcgcccgggtgcgaaagatcgcctgggactcttccacgctcgggctggtgacgtgtgcaccacgtttgggcgtcaacgtgaccagttgcacagcggcgagtcgttgcagcacctttctgatgccggtgcggctcacggcgaacacctccgccagcgcctcttccggcaatttgctgcccggcggcagctgatgttcgacgatagccgtcatcagcgcctggtaaatgctttcgtccttgtcctgcagcgctggcgcggcctggagacgatgttcattattcattaa

SEQ ID NO: 138958 - DNA, 1497 bp, Enterobacter cloacae
atgccacattcatcccacacgcagcagacgaagactcacgaggcggccgccggctacagtccgcggctatgtaatgacgatctggcgccgacccgcgaccagaactggagctggtacaatatcttttcattctggatgtcggacgtgcacagcatgggcggctacgtagtggcggcgagcttctttacgcttgggctggccagctggcaggttctgctctgcctgctggtgggcatctgtattgtccagctgtgcgccaacctggtggcgaagccgagccagatggccggggtgccttacgcggtgatttgtcgtcaggcgtttggcgttttcggcgccaatatcccggcggtgatccgcgggctgatcgcctttgcctggtatggcattcagacctatctggcggcaaatgccctgatgctggtcctgctcaagttctggccctcccttgcctcgctgaccagcagcagctttctcgggctgtcgcccctaggctggctgagcttcgccactatgtggctgctgcaggcgatggtgttctggcatggcatgaacgccatcaaacgctttatcgatatcgccggtccggcggtttatgtggtgatgctggcgctggccggctggattgtatacaagactggtctggacggtatctcctttaccctcgccagcaaatccctgagcgccggcgagcagacctggcagatgatcaccgccacggcgctggtggtctcctacttctccgggccgctgcttaacttcggtgacttttcccgctacggcaaaagcatgggcgagatccgccgcggtaaccgctggggactgccgtttaactttctgctattctcggtggttaccgtggtgattgtctccggcacccagtcgctgtttggcaaaatgatcaccgacccgatcgaaaccgtcagccgcgtgggtaacgatctggcggtggccatcggcctgctgaccatgatcaccgccaccatcggcattaatatcgtggctaacttcgtctcgccggccttcgatttttccaactgcgccccgcagaaaatcagcttccgtaccggcgggatgattgccgcggtgggctcgatactcctgacgccgtggaacctgtttaactccccggagctgatccactataccctcgacgtgctgggcgcctttattggcccgttgtttggcatcctgatcgccgacttctacctgatcaaacgcggccgggtgtcagtggacgatctgtttgacgatacgccgcagggtaaatactggtaccgcaacggctttaacccgaaagcgattgccgccctgctgccgtcggtgggcctggggctgattatcagctttattccggccctgcatgaagtggcgaacttcagctggtttatcggcgtcttcctcggcgccaccacctaccgctggctggctcgcgacgagcgcgaagtgcaggcgaaagccgccttccgctccggcgcggtggcgcaaaaagagtaa

SEQ ID NO: 138959 - DNA, 1311 bp, Enterobacter cloacae
atgatggattaccagaccgcggtgcgcggtgcattttttgatatcgccggcgtggcagagaccccggatgaggtggccgcccaggcccgctatctcgatgatggcctgttgttcctgcaggaggggaaaattatcgccctgctgccatggcatgagggggaagcctttctgcatcccctgaagggctgtgtcgatctgaggggtaagctgctgctgccggggttcgttgatgcccacgttcactatccgcagaccgagatgatcggcgcctttggcgaacagctgctggagtggctcaccacctacaccttcccggtggagagccagtttgccgatgcggagtatgcccaggagatagcgcagttttttgtaaatcagctgataagccatggcaccaccaccgcgctggtgttttgtaccctgcatccggcatcggtggaggcgttattcagcgaagcgctgcgcctcaatatgcgcctgatcgccgggaaagtgatgatggatcgccatgtgcccgactacctgtgcgaaaccgccggggagagctacgagcagacccgggcgttgatccgccgctggcatcagcgcggcaggctgggctatgccatcaccccgcgctttgcccccacctcaaccccggggttgctggaggcggtgcagcgcctgcgggccgagtttcccgacacctggctgcagacgcatctcagtgaaaaccgggaggagatcgcctgggttaaacagctgtggcctgagcatgcgcgctatctggatgtctatcatcaatatcagctcaccggcgaacgcagcgtcttcgctcacgggatccatctcgatgatgccgagtggcagtgcctgcatgacaccgggtccgcagtcgccttctgcccgacgtcgaatctgtttctcggcagcgggctgttccgcctgcccgcctgctggcagcaccaggtgcggatgggcatcggcagcgacgtcggagccgggaccaccttcagcatgctgcggacgctgggcgaggcctacaaggtaggacaactgcagagctatcgcctgcgcgccagcgaggccttctatcacgccaccctcggcggggcgcgcgccctgcggctggaggagaaaattggcaatttccagccgggcaaagaggcggattttgtggtgattgacccggcggtcaccccgctgcagcgcctgcgcataggccgctgccatgacatttatgagcagctgttcgtgctgatgaccctgggtgatgaacgcaatatcagcgagacgtgggtgaatggcgagcgggtgtggtgtcaggactga

SEQ ID NO: 138960 - DNA, 1140 bp, Enterobacter cloacae
atgtcgctcaatgagatgcgtaacggtatttattccacctgtccggaaacgcaactgcagcactaccttcgctatctcgacaccatgagcgagatattcgaagtctggacgttacccaccgccaatgggttgcagtcggtgtattgcaaaaccaccctgattgataccgaagactgtggttgcttgctgctgtttgaagccgtgaagctgctggcgcaaaatcagtcgattcataccggctcccgccgctaccagcggcgtaacaatggctttttcgctcgcttttttatgaccaataccgcgccgatgctgttgatcgaccctcataaagatggccggattgtcgatgccaatattgccgcgctacgtttttatcattattccgatgaggaaatgcgcaccaaacatacctggcaaataaataccctgggccgggacgttatccccattatgaataatattgccagtctgcctggcggtcataaaccgcttaattttacgcatattctggctgacggctcgctacgccatgtccaaacttatgccgggccggtggtgctgtataatattcgactgatgctatgcatcattcacgatatcaccgaagaagtgcatctgaaaaaagagctggaattttccgccgcccacgatccgttaaccggcttgcttaatcgccgggagtttcaccgtctggttgaggcgccaacttttatcccccggggttattgtctgctgttaatcgatatcgatcatttcaagagcattaatgatattcacggccatcaaaaaggcgatgaggtcctgctggtgctctctcgtattctggaaacgtcggtcgaccgcgaagataaaatttatcgctggggtggagaagagtttctgctttttttgccccattcgccgatcggccgcgcgctgatactggcggaggggatccgccaggcggttagcgaataccagacgctgtcggtgaccgtcagcatcggcgtggctgaacatcatgacggcgaaacggttgatcaactgttttcccgcgtcgataaagcgctgtatgcggcaaaaaatgacgggcgtaatcgggtgacgcgcatgccttttgacagctctgagcgacggcgcagtagagatggcgccgcctga

SEQ ID NO: 138961 - DNA, 831 bp, Enterobacter cloacae
atgggctttatcctgctgcaggagagccactccttctacctgccgttggcccgggcgctgacgcgcgaggctgccccgtggctaccggcgggccaggcgccggtgatactgcattttgccatcgatgcggtggaagcgatggctcaggccattcaccgactcagcgatgaagtggaggtgctcggcctggtggcgctggatcacccgctgattcgccacgcggtggcccgggccgccgcccgcggcgtgcgcgtgttcaccctgctttccgatctatcggccccccagcgcagcgggtatatcggcctcgataatcataaagccgggcgcaccgccgcctggtttatcgagcgcttatgccgggggaatggcgaaattggcattatcattggcgataatcgttttacctgccaggaaagctgtgagatcagctttcgctcctgcctgcgagaacagggcaaggggcaacagatccttgagccggttcgcagtcatgaacgggcggatatcgccaggaccgtgacggaacagatgctgactcagtacccggccctgcaggcgatctacgccccctgcggcggcgtcgaagggatcgtcgacgcgctgcgcgacagcggccgtcagcaggagatcgctctggtctgccacggtccgctcagcgacagtgaactggccctgatcgatggcaccatcgacatcatgcttaaccaccggctggatgagtttgccgccgttacgctgcgcgccatggcggacgccgcttcacgcccccatagcgaggtgatttcactccctcagcctttcgatatcatcaccaaagaaaatatgtaa

SEQ ID NO: 138962 - DNA, 684 bp, Enterobacter cloacae
atgacggcgaatattccggtaatcaccattgatgggcctggcggtgcgggtaaaggtacgttgtgcaaggcaatggcggaagcgctgggctggcatctgttagattcaggcgcgatctaccgcgttctggcgctggcggcgctgcatcatcatgtcgacgtggagtccgaagaggcgctggtgcccctggctgcccatcttgacgtgcgttttatttctactgacggcaacctggaagtggtgctggaaggggaagatgtcagtagcgaaattcgcactcaggaggtcgcgaacgcggcctcgaaagtggcggcttttccgcgcgttcgcgaagcgctgctgcgccgccagcgcgccttccgcgaactgccggggcttatcgccgacggtcgcgatatgggaacggtagttttcccggacgcaccggtgaaaattttcctcgatgcctcggccgatgagcgggcgcatcgccgcatgcggcagttgcaggaaaagggctttgatgttaactttgaacgtcttttgtccgagataaaagagcgtgacgatcgcgaccgaaatcgcgccgtggcgccgcttgtcccggctgccgatgcattagttctcgattcaaccgaactaaacattgagcaagtgattgaaaaagcgctacaatatgcgcgcgaaaaattggccgttgcgtag

SEQ ID NO: 138963 - DNA, 1284 bp, Enterobacter cloacae
atggaatccctgacgttacaacccatcgcacgcgtagagggcaccgtgaacctgccaggttcgaaaagcgtctccaaccgcgcgctgctgctggctgccctggcccgcggcacgacggtgctgaccaacctgctggacagcgacgatgtgcgccatatgctgaatgccctgagtgcgctgggggttcaatataccctgtctgccgaccgcacccgctgcgaagtgaccggcaacggcggcccgttgcgctctgccgcggcgctggagctgttccttggcaacgccggtaccgcgatgcgtccgctggcggcggctctgtgccttggcagcaacgatatcgtgctgaccggcgaaccgcggatgaaagagcgtccgatcggccatctggtggatgccctgcgtcagggcggcgctcagatcgactatctggagcaggaaaattatccaccgctgcgcctgcgcggcggttttcagggcggcaacgtcgaggttgacggcagcgtctccagccagttcctgaccgcgctgctgatgaccgcgccgctggcgccgcaggataccgtcatcgtcattaagggcgatctggtgtcgaaaccctatatcgacattacgctgcacctgatgaaaaccttcggcgttgaggtggacaatcagtcttatcagcgatttgtggtgcgcggcaagcagcagtatcagtcgccgggagattacctggtggaaggcgatgcttcctcggcctcgtatttcctcgccgctggcgccattaagggcggcacggtaaaagtcaccggtatcggccgcaacagcgtacagggcgacatccgtttcgccgacgtactggagaaaatgggcgccaccgtcacctggggcgacgatttcatcgcctgcacccacggcgagctcaaggcggtcgatatggatatgaaccatatcccggacgccgcgatgaccatcgccaccgccgcgctgttcgcgcaagggaccactaccctgcgcaatatctacaactggcgggtcaaggagacggaccgtctgttcgccatggcgaccgagctgcgtaaagtgggcgccgaggtggaagagggggaagattatatccgcatcaccccgccggcaaagttgaagtacgcagaaatcggcacctataacgaccaccggatggcgatgtgcttctcgctggtagcgctgtctgatacgccggtgaccatccttgatcccaaatgtacggccaaaacgttccctgactactttgagcagctggcgcggatcagtaccctcgcctga

SEQ ID NO: 138964 - DNA, 1089 bp, Enterobacter cloacae
atggctcaggtctataacttcagttcgggcccggcaatgctgccggcggaagtactcaaactggcgcagcaggaactgtgcgactggcacggtctggggacgtcggtcatggagatcagtcaccgtggtaaggagtttatccaggtggcagaagaggcagaacaggacttccgcgctctgctgaacatcccttccaactataaagttttattctgccacggcggcggccgcggccagttcgccgggatcccgctgaacatcctcggcgataaaaaggtcgctgactatgtggacgccggttactgggcggccagcgcggtcaaagaggcgaagaaatactgcacgccgaacgttatcgacgcgaaaatcaccgtcgacggcaagcgcgctgtgaagccgatgagcgagtggcagctgaccccgggagcggcctacctgcactactgcccgaacgaaaccattgacggtatcgcgattgatgagacgccgaacttcggcgacgacgtcatcgtgaccgccgatttctcctccaccattctttcccgcgaaattgacgtcaaccgcttcggcgtaatctacgccggcgcgcagaaaaatatcggtccagctgggctgacgctggtcatcgtgcgtgaagatctgctgggcaaagccagcgtggcctgcccgtcaattcttgactacaccgtgttaagcgagaatgactcgatgtttaacacaccgccgacgttcgcatggtatctggctggactggtgtttaagtggctgaaacagcagggcggggttgccgcgatggataaaatcaaccagcagaaagccgaactgctctacggcgtgatcgataacagcggcttctatcgtaacgatgtggcgcaggccaaccgttcgcgtatgaacgtaccgttccagctggcggacagcgccctggacaaactgttcctcgaagagtcgtttgctgccgggctgcacgcgctgaagggccaccgggtggtgggcggcatgcgtgcttccatctacaacgccatgccgctggacggcgtgaaggcgttaaccgactttatgctggacttcgaacgccgccacggttaa

SEQ ID NO: 138965 - DNA, 693 bp, Enterobacter cloacae
atgaaagcctttgactggcagcggatggcgctcgataaagtaccggtggaattcctggcggaggtggcgttgcgcagcctctataccttcgttctggtctttattttcctcaagattaccggacggcgcggcgtgcggcagatgtcgctgttcgaggtgctgattattttgaccctcggctcggcggcgggtgacgtggcgttttatgacgatgtgccgctgctgccggtgctggtggtcttcgttacgctggcgctactgtatcgcggcattatgtggctgatggggcatagcgaaaagctggaggatctactggaggggaaacctatcgtagtggtggaagaagggcagttggcctgggagaagctgcatgcggaaaacatgaccgaattcgaattttttatggagctgcgggtcaacagcgtcgagcagcttggccaggtccggctggcaattctcgaaaccaacgggcagatcagcgtgttttattatcccgatgaagaggtgagggccggattatcgatccttccagcgcattgtaccacacgctataccaccattccgcaagaggggatctatgcctgcgtgcgctgcagcatcgtaatggcgatgcaggcgggagaaaaacgaatatgtccgcgctgcgcaaatgcagaatggtcgaaggccagccgggcgaaacggcttacctga

SEQ ID NO: 138966 - DNA, 1761 bp, Enterobacter cloacae
atgacccaaacgtttattcccggcaaagatgccgccctggaagattccatcgctcgcttccagcagaaattgctcgacctcggatttgatatcgaagaggcctcgtggctgaacccggtgccgcacgtgtggtccgttcacattcgcgataaagcgtgcgcgctgtgctttaccaatggtaaaggcgccaccaaaaaggcagccctggcctccgcgctgggcgaatatttcgaacgtctgtccactaactatttcttcgccgacttctggttaggcgacactatcgctaacggcccgtttgttcactacccgaacgaaaagtggttcccgctgactgaggatgatgaagtcccggaaggtctgctggatgcccgcctgcgcgcgttctacgatcctgacgatcagttaacggccagtatgctggtggatttgcagtcgggtaacgatgagcgcggcgtgtgcggtctgccttttacccgccagtccgacggcgaaaccgtctatattccgatgaatattgtcggcaacctgtacgtctccaacggcatgtccgccggtaacacccgcaacgaagcgcgggtacaaggtctgtcagaggtctttgaacgtcacattaaaaaccgcatcatcgctgaaagcatcagcctgccggagatcccggcggaagtcatggcgcgctatccgggcgtcgtggagtcgatcgccaaactggaagctgaaggtttcccgatctttgcctatgatggctcgctgggcggcaaatatccggttatctgcgtcgtgctgtttaacccggctaacggcacctgcttcgcctccttcggcgcccacccggactttggcgtggcgctggagcgaaccgtcaccgaactgctgcagggccgcagcctgaaagacctcgacgtcttcacgccgccaaccttcgatgacgaagaggtcgccgagcacgcgaacctcgaaacccactttatcgactccagcggcctgatctcctgggatatgttcaagcaggacgccgactatccattcgttgactggagcttctctggtactaccgaagaagagttcgccaccctgatggccatcttcaaggccgaagataaagaagtgtacatcgccgactacgagcacctgggcgtttacgcctgccgtatcatcgtcccggggatgtcggacatatacccggcggaagacctgtggctggcgaacaacagcatgggcgctcatctgcgggacaccattctgtccctgccgggcagcgagtgggataaagaagattacctggcgctgatcgagcagatggacgatgagggtctggatgatttcacccgcgttcgcgaactgctggggctcgccaccggaaaagacaacggctggtataccctgcgcgtcggcgagctgaaagcgatgctggccctggccggcggcgatctggaacaggcgctgatctggaccgagtggaccatggaatttaatgcttcggtcttcagcgcggagcgcgcgaactactatcgctgcctgcaaaccctgctgctgctgagccaggaagaagagcgtcagccactgcagtacctgaacgccttcatccgtatgtacggcgccgacgcggtcgaagccgccagcgcggcgctgagcggggaagcgccgttctatggtctccaggcggtcgatagcgatctgcaggccttcccggcccatcagtcgctgctgaaagcctatgaaaaactgcagcgggcgaaagcggcgttttgggcaaaataa

SEQ ID NO: 138967 - DNA, 930 bp, Enterobacter cloacae
atgagtattcgcataatcccgcaagacgagctgggttcgagcgagaaacgcacggcggaagcaattccgccgttactgttccccaggctgaaaaatctgtataaccgccgcgctgaacgcttgcgcgagctggccgctaataacccgctaggcgattacctgcgctttgccgcgctgattgcccatgcccaggaagtagtgctgtacgaccatccgctgcagatggatctcaccgcccgcattaaagcggccagcgaacagggcaagccgccgctggatatccacgtcctgccgcgcgacaagcactggcacaagctgttgcactcgctgattgccgagctgaagccggaaatgagcggcccggcgctggcggtcattgagaatctggaaaaagcctctgagcaggagctggagcagatggccagcgcgctgtttgtttccgatttcgcctccgtcagtagcgacaaagcgccgttcatctgggctgcgctgtcgctctactgggcgcagatggccagtctgatcccaggaaaagcgcgcgccgaatacggcgaacagcgccagttctgcccggtgtgcggctcgatgccggtctccagcatcgtgcaaatcggcaccactcaggggctgcgctatctgcactgcaacctgtgcgaaactgagtggcacgtagtacgcgtcaagtgcagcaactgcgagcagagccgcgacctgcactactggtcgctggacaacgagcaggcggcggtgaaagccgaaagctgcggcgactgcggaacctacctgaagattatgtatcaggagaaggatccgaaagtcgaagccgtcgccgacgatttggcctccctggtgctcgacgcccgcatggaacaggagggcttcgccagaagctcaattaacccgttcatgttccccggcgaaggggagtaa

SEQ ID NO: 138968 - DNA, 384 bp, Enterobacter cloacae
atgacctccggatctgcgctttttgataccaatattcttattgatttatttagcgggcgtcgcgaagccaaacaggcgctggaggcctggccaccgcagaatgcgatcagtctgattacctggatggaggtgatggttggcgctaaaaaatatcaccaggagcagcgcacgcgaatggcgctgagcacctttaatatcattaacatctcacaggatattgcagagcgaagcgttgcgctgcggcaggagtataagcttaagctgccggatgccatcattctggcgacggcgcaactccatcgtctggaactaattacgcggaatacgaaggattttgccggtattcctggcgtagtcacgccgtacgaaatccaccctgaataa

SEQ ID NO: 138969 - DNA, 249 bp, Enterobacter cloacae
atgagcatgatggctgaaagggatatgggcagaattcttctcgatttatcagacgatgtcattcaacgtctcgatgacctcaaagtgcagcgtaacattccgcgagcggaactgttacgtgaagcggttgaacaatatctggagaaacaagatcgagctaaagataccatctccagtgcgctgggtctgtggcaagactgcgaagaagacggcatggaatatcaacgtcagctacgcaaggagtggtaa

SEQ ID NO: 138970 - DNA, 918 bp, Enterobacter cloacae
atggcgctggaaaaagggattgcttcgctggttgaggcatttattgcggcaggtcgtccgtcatcacgcgatcagcatattgatgatcggagggccggctatatcgccagtgcggtactcgccggggagacggaaacgcgagtgcgggtggaggatatcaccctggagggtatgcacttccgcgtcgtttcaccgcccactgccgacggcctgctacccacgcttatctactaccacggcggctgttttgtcagcggcggctttgccacccatgacaatcaattgcgccagcttgcctggttcagtgggtgccgggtgatcgccgtgcagtatcgtctggccccggagtacccttttccggcggcgcacgatgatgcagaacgaggtgccacgattattcaccagcacgcaaaacagcttggcgtggatgcttcgcgcatcaccctggccggcgacagcgccggcgggcacctcgctctggtcacggccctgcgcctgaaagcggcgggagcatggcaacctgcacagcttatcctgatttacccgatgctcgacgctaccgccagcatggcaagctacgccagcaacggcgaggattacatcattacccgggacacgctgcttagcggctacgaaatgtatttagcggccacacccgctacccatccggatgccagtccgctgtggcgcgaagattttcacgggttgccaccggtacacattctgacggcggagttcgatcctttacgcgatgagggcgaagtgctgtaccgaaggctgacggagcaaggggtggagagttcctgtcagcgctatctgggggtgatccacggcttctttcagctgggaggcgtcagcaacgccgcgcgtgatgccatgcgggatatcgcctggcgtgtggcatcgccaggacgataa

SEQ ID NO: 138971 - DNA, 990 bp, Enterobacter cloacae
atgacccagcttccgggcaggctgcgggtaacaaaagagagtacgactatgtatcaccttcgtgtaccgcaaacagcagaagagttagagagctactaccagttccgctgggagatgctgcgtaagccgctgcatcagcctaagggatcggaacgtgacgcctgggatgcgatggcgcatcatcagatggtagtggatgaagagggcaacctggttgccgtcggccggctatatatcaatgcggagaatgaagcctccatccgctttatggctgtgcatccctcggtgcaggataaagggctgggtacgctgatggcgatgaccctggagtccgtcgcgcgtcaggaaggggttaagcgggttacctgcagcgcgcgcgaagatgcggtggaatttttcgccaagctcggatttgtcaatcagggtgagatcaccaccccgaccaccacgccgatccgtcattttctgatgatcaaaccggtcgcgtcgctggacgatattttgcaccgcggcgactggtgcgcacagctccagcaggcgtggtatcagcatattccgctgagtgaaaaaatgggcgtacgtattcagcagtacaccgggcagaaatttattaccaccatgccggaggcggggaaccagaatccgcaccatacgctgttcgccggcagcctgttttcgctcgctaccttaaccggatgggggcttatctggctgatgctgcgcgagcggcacctgggaggcaccattattctggcggatgcgcatatccgctacagccagcctattagcggccgccccagcgccatcgccgacctcggttctctgagcggcgatctcgaccgactggcgcgcgggcgtaaagcccgcgtgcaaatgcaggtggagctttttggcgacgataaacagggcgctgttttcgaggggatctacatcgtgttgccggcgaagccctttggctcgtacgaagagggcggcaacgaggaagagtaa

SEQ ID NO: 138972 - DNA, 438 bp, Enterobacter cloacae
atgattgcattaattcaacgcgtatcccgtgcaagcgttaccgtggcggacgaggtgacgggcgaaattggcccggggcttctggtgctgctgggcgtcgagaaagacgatgatgaacaaaaggcgaatcgcctttgtgaacgcgtgctgggctaccgcatcttcagtgatgcggaagggaaaatgaacctgaatgtccagcaggcgggcggcagcgtgctggtggtttcgcaatttacgctggcggccgataccgagcgggggatgcgaccgagcttctcgaaaggcgctgcccctgaccgcgctgaggcgctgtatgagtatttcgtcgcccgctgtcgccagcaggaaatgcacacccagaccggaagattcgctgcggatatgcaggtttctttggtcaatgatggtcccgtgaccttttggttgcaggtatga

SEQ ID NO: 138973 - DNA, 861 bp, Enterobacter cloacae
atgctaaaaaccgttcatcaaaaattactccaccatacccggccgctgctggcgtggctaaagctgctgtggcggcgcattgatgaagaccatatgaccaccctggcggggaacctcgcctatgtgtcattactgtccctggtgccgctgattgccgtcgtgttcgcgctgtttgcggcctttcctatgttctccgaagtcagcgtgcagatccgtcattttatcttcgccaattttattccggcgaccggggatgtaatccagggatatatcgagcagttcgtggccaactccagccgcatgaccgccgtaggcgcctttggcctgatcgtcacctcgctgctgctgatgtactcgatcgacagcgcgctaaacaccatctggcgcagcacgcgcagccgccccaaagtttattcctttgccgtttactggatgatcctgaccctcggcccgctgctggcgggcgccagcctggcgatcagttcctatctgctgtcgctgcgctgggcaagcgacctggacggcgtaattgataatctgctccgcctatttccgctgatcctctcctgggcagcgttctggctgctctatagtattgtaccgactacccaggtacgtaaccgcgacgcggtgatcggggcgctggtggcggcgctgctgtttgaggcaggtaaaaaggcgtttgccctctatatcaccacctttccgtcctatcagctaatttatggcgtgatttcggtggtgccgattttgttcgtctgggtgtactggacctggtgtatcgtcttgcttggcgctgaaattactgtcactctcggtgaataccgcaaacttaaaacagaagaaacagaacaaccatga

SEQ ID NO: 138974 - DNA, 600 bp, Enterobacter cloacae
atgctctatatctttgatttaggtaatgtgattgtcgacattgacttcaaccgggtattgggagcctggagcgatttaacccgcatcccgctggcgacgctgaagcagcatttcaccatgggtgaggctttccatcagcatgagcgcggcgagctcagcgatgaagactttgccgccgccatgtgccatgaaatgaatatgcccctcagctatgaacagtttgctcacggctggcaggcggtgtttgtcgcgctgcgcccggaggtgattaccatcatgcataaacttcgtgcccaggggcatcgggtggtggtgctctctaataccaatcgtctgcacaccacgttctggcccgatgaatacccggaagtgcgcgcggccgccgatcgcatttatctgtcgcaggagatgggattgcgtaagcctgaagcgcaaatttatctgcgagtactggaagaagagggtttttccgccgcagatacggtcttttttgatgataacgtcgataatatagcaggggccaagcggttggggatcaccagtatcctggtgactggtaaggagaccatccctgactatttcgcgaaacagctatgctaa

SEQ ID NO: 138975 - DNA, 1140 bp, Enterobacter cloacae
atgtcacagcccctcgatctcgttcagttagcgcaacaaatcaaacaatggggcacagagcttgggttccagcaggtggggatcgccgataccgacctcagcgccagtgaacccaaactgcaggcatggctggataaacaataccacggcgaaatggaatggatggcccgtcacggtatgatgcgcgcccgtccccacgaactgctgcccggtacgttacgcgtcatcagcgtgcggatgaactatctgcccgctaacgccgcctttgcccgcaccctgaaagatcccacgctgggttacgtcagccgttatgccctcgggcgtgattatcataagctgctacgtaatcgcctgaaaaagctgggggagaagattcaggaacagtgtgcttcgctcaattttagaccttttgtcgattccgcgcctatcctggaacggccaatcgcagaaaaagcgggcctaggctggacaggtaagcactcacttatcttaagccgcgacgccggatcgttctttttcctcggcgaactgctgattgatctgcccctgccggtcgacagcccggtcgcggaggagtgtgggcgctgcgtcgcctgcatgaccatctgtcccaccggggccatcgttgagccctataccgtcgacgcccggcgctgcatctcctatctcaccattgaactggaaggtgcaatccccgaggagttccgtccacttatcggcaaccgtatttacggttgtgatgattgtcagctgatctgcccgtggaaccgtttctcacagctcaccgatgaagaggatttcagcccacgcaaagcgctgcatgccccgccgctggtggagctgttcgcctggagcgaagcgtggtttctgaaggtgaccgaagggtcggcgattcgtcgaattggccacctgcgctggctgcgtaatatcgccgtcgcgttgggcaatgcgccctgggatgaagcccatcttcgcgccctggagagccgccggggcgagcacccgcttctcgacgaacacattgagtgggcgattgcccagcaactgaaaaagcggaacgccgacgccgttgaagtacagctgccgaaaaaattacgtctggtcagagtggtagagaaaggcttgccgcgcgacgcctga

SEQ ID NO: 138976 - DNA, 1524 bp, Enterobacter cloacae
atggaccatacaatgacgaaaaaccctgacagtataccatacaacatttggcctgcggaggcgctgcgcctggccgaacgagaggcggcggacagcctggggctgacgctgttcgaactcatgcagcgcgcgggcgaggcggcgttccagctggccagcggtgcttatcctgccagcgcgcactggctgatcctctgcggacatggcaacaacggcggcgacggatatgtcgttgcgcgtctggcacaggccgcggggcggcgggtgacgctgctggcggtggagagtgacagcccgctgccggaagaggcgcaggcggcgcgggaggcatggcttaacgccggcggcgtgatccatgcggcgactatcccatggcccgacgatatctcactgattattgatggcctgctcggcaccggtctgcgcagcgcgccgcgcgatcccgttgcggcgctcatccaccaggcgaaccaccacccggcgccggtggtggcgctggatatcccttccggcctgaatgcgcagacgggcgcgacgccaggtgcagtggtacaggccgaccatacgctgacctttatcgccctcaagccggggctgctgaccggcaaggcgcgggatgtcgtcgggcaactccaccatcatgcgctggggctcgaacgctggctcgccggacaaagcactcctctgacgcggttttgcgccgcccacctcgccgactggctgccgcctcggcgggccacctcccataaaggcgatcacgggaagctggtgattgtcggcggcgatcgcggcacggcaggcgctatccgtatgtgcggtgaagcggccctacgcagcggcgcgggactggtgcgagtacttactcacccggagaacgtggcgcccattgtcaccgtgcggccggaattaatggtagatgaactgacgccgcagactctgaaagccgcgctggagtgggctgatgtggtggcgattggccctggcctggggcagcgcgaatgggggcgcagcgccctgcgcacggtggaaagttttaacaaaccgatggtctgggacgccgacgcgctgaacctgctggcattcaatcccgataaacgtcacaatcgcgtgctaacgccgcaccccggcgaagcggcccgtttgctgaacgtcagcgtggcagaaattgaaagcgatcgcttactttctgcgcagcgtctggtaaaacggtatggcggcgtggttgtgctgaaaggcgcgggcacggtggtggctagtgaaagcggggcgatgggcattatcgatgccggcaatgccgggatggccagcggcgggatgggcgatgtgctcaccggcatcatcgccgcgttgttaggacagcacctgacgccgtatgatgctgcctgtgccgggtgcgtcgctcatggcgatgccgccgaccgactggccgcccgcgagggcacccgcggcatgctggcgaccgatctcttttccacgctcaggcgtgttgttaacccggatgtgattgacgtagaccatgattaa

SEQ ID NO: 138977 - DNA, 462 bp, Enterobacter cloacae
atgattaaccgagtgattcctttacccgatgagcaggccacgctggcccttggcgaccgcatcgcgcaggcctgtaccggcgccaccgtgatttatctgtatggtgatttaggcgcggggaaaacgaccttcagccgcggctttttgcaggcgctcggtcaccgcggcaatgtcaaaagcccaacttataccctggtggagccctataccctcgagaacctgatggtgtatcacttcgatctctaccgtctggcggatcctgaggaactcgaatttatggggatccgtgattattttgccgacgatgccatctgcctggtggaatggccgcagcaaggcgcaggtgtcctgcctgacccggatgttgaaattcaccttgattaccaggcacaagggcgtgaggcgcgtattaccgcgatctcctcacggggtgaatctttactggcgcgtttagccttttag

SEQ ID NO: 138978 - DNA, 1356 bp, Enterobacter cloacae
atgaagtatcgcataaccacctggcttgccgctgcgctgatgctgtcgagtcttcacgccactgcggcgagtttatccgatatccaggtctctaacggagaccagcaggcccgtattaccctaagctttgtcggtgagccggagtactcctttaccccacagggtaaacgtctggtggcgctggatatcaagcagaccggcgtattgcagggactacctctgcagtttagcggcagcaacctggtgaagagtattcgcgccggcacgccgcaggatacgcagacgctgcgtctgctggtggatctgacggaagatggcaaaacccgggcggtgaagcaacagaacggggcgaattacacggtggtctttaccatcaacgccgacgcgccgccgccgccgcctccgccgcccgtggtggtgaaacgggccgacccgccgccggtgatgccttcccggacgacgacgtcagggcgtaacccgttcagctcgtcgggtcatgaacggcagacggtgatgacctcctctcagccggcgatgaccaacaatcagaccgtgactcgcccggcggcccgcacggtgtcggcggatgataaagtcattatcgccattgatgccggacacggcggtcaggatcctggcgcaattggtccgaacggcaccaaagagaagaacgtcactatcgctatcgcgcgcaagctgcgggcgttactgaacgccgatccgcagtttaagccggtgctgacccgcgacggggattactttatttcggtgatgggccgctctgacgtggcgcgtaagcaaaacgccaatttcctcgtctctatccatgctgacgccgcgccaaaccgcgatgccaccggcgcctcggtgtgggtgctctcgaaccgtcgcgccaacagcgaaatggccggttggctcgagcagcatgagaaacagtctgaactgctcggcggtgcgggcgatgtgctggcaaacagccaggccgacccctacctgagccaggcggtgctggatctgcagtttggtcattcccagcgcgtcggctacgatgtggcgaccaacgtgctgagccagctgcagcgtattggcaacctgcacaaacgccgcccggagcatgccagccttggcgtgctgcgctcgccggacatcccgtcgatcctcgtggaaacgggctttatcagtaacaacggcgaagagcggctgctgggtagcgatgattaccaggagcagattgcggaggcgatttataacggcttacgcaactactttatgcagcatccgctgcagtcggcgcctcgcggcgaggcggcgcagaccgccagcgccgcggcgccgggcgggatgttgattaactaa

SEQ ID NO: 138979 - DNA, 489 bp, Enterobacter cloacae
atggttgatcagccgatcgcgcatcatccgcccgttaacgtagcaatactgaatttccgccagcgccggggtggtatgcagcggatcggcgacccagccgcgcagggtcagatcgccatgctgccactcgatcgccagcgcatgttcgagaaaagcggcgccgcaaattgtccccagccggcgctcgcgctggccatcctgagcgactgcccgatactggcgcatcaccttgccgttatggctgaggttgatagtgacgtcgaagcgcgccagcgcaatgcggcgcaccacctcgtcaatgtggccgaactcggtcttttcagtgcgcataaatttgcgccgcgccggggtgttatagaacagatcgaggacttccagagtggtaccgaccgggtgcgccgccggcttcaccgtcaccgcctgatcgcggccttcagcatacgcctgccaagcttcctgctgctccgccgtgcgcgaagtcagcgttaa

SEQ ID NO: 138980 - DNA, 2727 bp, Enterobacter cloacae
  misc_feature (2673)..(2682): n is a, c, g, or t
atgcagaacggcgcaatgaaagcctggctggactcttcttacctctctggttcgaaccagagctggatagaacagctctatgaagacttcttaaccgatcctgactctgttgacgccaactggcgttcaatgttccagcagttacctggcaccggagttaaaccggatcaatttcattccaaaacgcgtgattatttccgtcgactggcgaaggatgcctcacgttacacttcttcgatttccgacccagacaccaatgtgaagcaggttaaagtcctgcagctcatcaacgcataccgtttccgtggccaccagcatgcgaatctcgatccgctggggctgtggaagcaagagagagtggcggatctcgatccggcctaccacgatctgaccgaggccgatttccaggaaagctataacgtaggttcatttgccatcggtaaagacacgatgaagctgggcgagctgattgccgccctcaagcaaacctactgcggctccatcggcgcggaatacatgcatatcacctctaccgaagaaaaacgctggatccagcagcgcattgaatcggtagctggcaaagcgagctttaccgcggaagagaaaaaacgcttcctcagcgaactgaccgccgcggaaggtctggagcgctacctcggcgccaaattcccgggggcgaagcgcttctcgctggagggtggcgacgccctgatcccgatgctcaaagagatgatccgccatgcaggcaaaagcggcacccgcgaagtggtgctgggcatggcgcaccgcggccgtctgaacgtgctggtcaacgtgctgggtaaaaaaccgcaggacctgttcgacgagttcgcgggcaaacataaagaacacctcggcaccggcgacgtgaagtaccacatgggcttctcttccgatatggaaaccgaaggcggtctggtgcacctggcgctggcgtttaacccgtcgcacctcgagattgtcagcccggtggttatcggttccgtacgcgcccgtctggatcgtctggacgagccaagcagcaacaaagttctgcctattaccatccacggcgacgccgccgtcaccggccagggcgtggttcaggaaactctgaacatgtccaaagcccgcggttacgaagtgggcggtaccgtgcgcatcgttatcaacaaccaggtgggcttcacgacctctaacccgctggatgcgcgctcaacgccgtactgcaccgacatcggtaaaatggtgcaggcgccgattttccacgtgaacgcggacgatccggaagcggtcgccttcgtcacccgtctggcgcttgatttccgcaatacctttaaacgcgatgtcttcattgacctggtgtgctaccgccgtcacggccacaacgaagccgatgagccgagcgcaacccagccgctgatgtatcagaagatcaaaaagcatccgactccgcgcaaaatctatgctgacaagctggagcaggagaaggtggcgactctggaagatgcgaccgagcaggttaacctctaccgcgatgcgctggatgccggcgaatgcgtggtgcaggaatggcgtccgatgaatatgcattcctttacctggtcgccgtacctcaaccacgagtgggacgagagctatccggataaagttgagccgaaacgtctgcaggagttggccaaacgcatcagcacggtaccggaaggtatcgaaatgcagtcccgcgtggcaaaaatttatgccgaccgccaggcgatggcggcaggcgagaagctgtttgactggggcggtgccgaaaacctggcctacgccacgctggttgacgaaggtattccggttcgtctgtccggcgaagactccggccgcggcaccttcttccaccgtcatgcggtgatccataaccagaccaatggttcaacctacacgccgctgcagcatgtccataacggccagggccagttccgcgtttgggactcggtactgtctgaagaagcggtgctggcgttcgaatatggttacgccaccgccgagccgcgcactctgactatctgggaagcgcagtttggcgacttcgccaacggtgcgcaggtggtgatcgaccagttcatctcctccggtgagcagaagtggggaaggatgtgcggcctggtgatgctcctgccgcacggttacgaaggccagggcccggagcactcctccgcgcgtctggagcgttatctgcagctgtgcgctgaacaaaacatgcaggtctgcgtgccgtccacgccggcacaggtttatcacatgctgcgtcgccaggcgctgcgcggtatgcgtcgtccgctggtggtgatgtcgccgaagtcgctgctgcgtcatccgctggcggtttccagcatggatgagctggcgaacggcactttcctgccggctattggtgaaatcgatcaacttgatccgcaggctgtgaagcgcgttgtgctgtgctctggtaaggtttactacgacctgctggaacagcgccgcaaaaacgagcaaaaagatgtcgctatcgttcgtatcgagcagctctatccgttcccgcatcaggcggtgcaggaagcgctgaaagcgtatgcgcacgtgcatgattttgtctggtgccaggaagagccgctcaaccagggcgcatggtactgcagccagcatcacttnnnnnnnnnngctcaagcagggcgcatggtactgcagccagcatcacttccgtga

SEQ ID NO: 138981 - DNA, 1227 bp, Enterobacter cloacae
atgagtagcgtagatattctggttcccgacctgcctgagtccgtagctgacgcaaccgtcgccacctggcacaaaaaaccgggcgacgcggtcgtccgtgacgaagttctggtcgaaatcgaaactgacaaagtggtactggaagtaccggcatcagcggacggcattctggatgcagtgctggaagacgagggcgccaccgtcctgtctcgccagatccttggccgcctgcgcgaaggcaacagcgcaggtaaagaaagcagcgagaaagccgatgcgaaagcgtccactccggcgcagcgtcagcaggcctctctggaagagcagaacaacgacgcgctgagcccggcgatccgtcgtctgctggctgaacacaaccttgacccagcggccatcaaaggcactggcgtcggcggccgtctgacccgcgaagacgttgagaaacatctggcgaaagccccggcgccggcagaagccaaagcgccagccgccgccccggcagccgcgccggcgccgcagctgggccaccgttcggaaaaacgcgtcccgatgacccgcctgcgtaaacgcgtagccgaacgtctgctggaagcgaaaaactctaccgccatgctgacgacctttaacgaagtcaacatgaagcccatcatggatctgcgtaagcagtacggtgaggcgttcgaaaaacgtcatggcatccgcctgggctttatgtccttctacgtcaaagcggtagtggaagcgctgaaacgctatccggaagtgaacgcttccatcgatggcgacgacgtggtgtaccacaactacttcgacgtcagcatggccgtatccactccgcgcggtctggtcaccccggttctgcgtgacgtcgacctgctgggcatggcggacatcgaaaagaatatcaaagagctggcagtgaaaggccgcgacggcaagctgaccgtagacgacctgaccggcggtaacttcactattaccaacggcggcgtcttcggctccctgatgtccacgccgatcatcaacccaccgcagagcgctattctgggtatgcatgccattaaagaccgtccgatggcggtcaatggcaaggtagagatcctgccgatgatgtacctggcgctctcctatgaccaccgtctgatcgacggacgtgaatcggtaggcttcctggtggcgattaaagagctgctggaagatccgacccgtctgctgctggacgtgtag

SEQ ID NO: 138982 - DNA, 732 bp, Enterobacter cloacae
gtgcagcttaacgatgtccatggtacccatcgccaggcctgcgccgttaaccatgcagccgatgttgccgtccagcgcgacgtagttcagttcccactgcgccgcctgcgcttcacgtgggtcttcctgagactgatcgcgcatttcgcgcagatccggctggcggaacagcgcgttgccgtcagcgcccagtttgccgtcgaggcagatcaggtcgccctgcttggtgatcaccagcgggttgatctcgatcagcgccaggtcgcgctcaaggaaaatggtcgccagccccatgaaaatcttggtgaactgctgaacctgtttaccttccagacccagtttgaacgccagttcacgaccctggtaaggcatcgggcccgccagcggatcgatggcgatcttgtggatcaggtgcggggtctcttccgccactttctcgatttccacgccgccttcggtagacgccatgaacaccacgcgacgggagctacggtcaacaaccgcgcccaggtacagctctttgtcaatatcggtcgccgcttcaaccaggatctggttaaccggctggccgttcgcatctgtttgataggtcaccagacgtttgcccagccagtgctcggcaaatgcgcggatctcttctttgctcttaactactttcacaccgcccgctttgccgcggccaccagcgtgaacctgacatttcactacccacggacccgcgccgatttttga

SEQ ID NO: 138983 - DNA, 3051 bp, Enterobacter cloacae
atgctgaccttttttatccgtcgtccgcgatttgccatggtgatcgcgctgctgctgacctttgtcggcgcggtgtcgctgaagctgatcccggtggagcagtacccggcgatcacacccccggtggtgaacgtcagcgccagctggccgggcgccagcgcgtcagacgtggcggaagccatcgccgccccgctggagacccagctcaacggcgtcgatcatatgctgtatatggagtccaccagctcggatgaggggacgtaccgcctgagcataaccttcgcggcgggcaccgatgccgacctggcggcgatcgacgtgcaaaaccgggtggcgcaggcgctggcgcagctcccggcggaggtgcagcagaatggcgtcaaggtgcgcaagcgcgccagcaatctgcttatgggggtaagcctctactcgccgctgggcacactgacgccgctgtttgtcagcaactacgccagcacccaggtgcgcgaggcgctggcccgcctgcccggcgtcggcgaggtgcagatgtttggcgcccgggattacagtatgcgcatctggctgcgcccggaccgcatgaacgcgctcaacatcaccacggatgatgtcgcccaggcgctgcgcgagcagaatgtgcagggcgcggcggggcaggtgggcaccccgccggtatttaacggccagcagcagacgctgaccatcaacgggctggggcgtctgaacgaggcggccagctttggcgagattattatccgccgcggcgcgcaggggcagctggtgcgcctcgccgacgtagcgaccattgagctgggcgcccgcagctacagctccggcgcccagctgaacggtaaagcgtcggcctatctggggatctatccgacgcccaccgccaacgccctgcaggtcgccagcgcagtgcgtgcggagcttaaccgcctgcacactcgctttccggcggatctcacctgggaggtgaagttcgataccacccgctttgtggcggcgacgatcaaagagatcggcgtctcgctggcgctgaccctgctggcggtggtcgtggtggtgtcgctatttttgcagagctggcgggcgacgctgatcgtagtgctggcgatcccggtgtcactgatcggcacctttgcggtgctctatctgctgggctacagcgccaacaccctcagcctgttcgcgatcattctcgccctgacgatggtggtggatgacgccattgtggtggtggagaatgtggaaaccaaaatggcggaagggctggatcgcctgcaggccaccgcccaggcgctgcggcagatcgccgggccggtgatcgccacgaccctggtgctgctggcggtgtttgtgccggtggcgctgctcccggggatcgtcggcgagctgtaccggcagtttgccgtgacgctctccaccgcggtggccctgtcgagcctggtggcgctaaccctgacgccggccctctgcgcgctgctgctgcgcccgcgtcctgcccggccggcggcggtgtggcgggcgtttaaccgtcttctcgacggcacccgcgacggctatggccggctggtaggctggatgaaccgccgtccctggctggcgctggcggcgacggtggcggcaggcgcgctggtggcgttcagcttcacctcgatgccgaaaggcttcctgccgcaggaagatcagggttacctgtttgccagcgtgcagctgccggaggcggcgtcgctggagcgtaccgaagcggtgatggcccaggcgcgtaaactgctgatggctaacccggcggtggaggatgtgattcaggtgtccgggttcaacattctcaacggcaccagcgcctctaacggcgggtttatctcggtaatgctcaaggactggcatcagcggccgccgctggatgcggtgatggcggatattcagcgccagctgctgtcgctaccggaggcgacgatcatgaccttcgcgccgccgaccctgccgggcctgggcaatgcctcggggtttgatctgcgcatcccgggggagatcctccagctggcgaaccagtatccgcagctgagccgggtgtttaccacctggagcagcaacgtgccgcagctgaccctgacggtcgaccgcgaccgggcggcgctgctggatgtgccggtggtgcagatcttcagcagcctgcagacggcgttcggcggcacgcgcgccggcgatttcagccgtaacaatcgtgtctatcatgtggtgatgcaaaatgagatgcagtggcgcgagcgggcagagcagattagcgagctgtacgtccgcagccgcgacggcgagcgggtgcggctgagcaatctggtcaccattacgccgacggtgggggcgccgtttattcagcagtacaatcagttcccgtccgtgtcggtgagcggttcagcggccgagggggtcagcagccgcacggcgatggcggccatggagcagattttgcaggcccatctgccgccgggatatgactatgcctggagcgggatctcctggcaggagcagcagaccggcaatcaggcggtgtggatcgtgctggcggcggtggcgatggcgtggctgttcctggtggcgcagtatgagagctggacgctgccggcgagcgtcatgctctcggtgctgttcgccatcggcggagcgctgctctggctgtggaccgcgggctatgccaacgatgtgtatgttcagatagggctggtgctgctgatcgccctggcggcgaagaatgcgattctgatcgttgagttcgcccgcagccggcgcgaggaggggctgtcgatagtcgacgctgcgcgcgagggggctacccgccgcttccgcgcggtaatgatgaccgcggtgtcgtttattatcggcattatgccgatgatgctcgccaccggcgccggggcgcagagccggcggatcatcggcaccacggtattcagcgggatgctggtggcgacgatggttggcatcctgtttatcccgtcgctgtatgtactgtttcagcgtatgcgcgagtgggcgcatcggcgggggtaa

SEQ ID NO: 138984 - DNA, 1080 bp, Enterobacter cloacae
atgattaaaaccttccgctttgctctgctggcctgcggtctggtcggcggcgccctgacggcgaccgccgcgccggcggtgccggtccgcgtcgccacggttgaactggctcctcatgctgaagaacgcgctatccccgggcgggtcgaggcgatccgcgccgtcgacattcgcgcgcgcaccgaaggggtgattgttcagcgccacttccaggacgggcagtatgttaccgaaggcgacctgctgtttaccctcgacgacgcgcagccccgcgcggcgctggctctggcgcaggccgagctgaaaagcgccgaagcctcattacgtcagtcgcagcagttgctcactcgctacgagcggcttatcaacaaccactccatcagccgcaacgacgtcgatacggcccggatgcagcgcgacgtcgccgccgctgccgtacagcaggccaaagcccgcgtcgaggcccagcagattgtgctcagctacactcagattgcggcgccggtgaccggtcgcgtgggccatagcgcctttcacgtcgggacgctggtcaattcgtccagcggcgtgctggtggacattgtgcagttggatccggtgcgggtctcgttcgccctcgacgaagccgcgtttttcagcaaaaccggccagcacgccgatatccacgctctgaagcaggcgtggctggcgcagattgaggttgatggtaaacggcgcgacggggtgttgacctctatcgataaccggatcgacgcccgcaccggcagcgtagcggtgcgggccgagtttgccaatccgcagcaccgtctgctgccgggcggcagcgtgacgatcctgttccgtccgcaggaactgccgtcgcgagtgatggtcccggccgccgccgtgcagcaggatccgcagggctttttcagctgggtgctgaagccggaccacaccgccgggcagcgtcgtctgaccctcgcggggcagcaggggcagcagtttgcggtcgagaaagggctgcaggcgggcgagcaggtgatcaccgacggcgcgcagcggttgcgcgaaggcgctgcggtgcaggtgctgaactag

SEQ ID NO: 138985 - DNA, 1677 bp, Enterobacter cloacae
atgaacgaaatgaccgtcaaagcgatcatcaccgccgactgctgctatcgggtggaaggcgacagctacgagccgcaggggcggatcttcctcgaggggagcgatgagcccgtgcaggttcagcccggcaccgtgctggagacctggctgcgcaccatcgacctgtgtaacgacagccagcttacccaggatgagcgcggtctgtgggggatcaccggcgggccgaccgaaggggcgcttaaagtgctggcggcgaaagcgcagctcccggcggtggaggcccgtctggtggccaagatcccctttgactcgcagtacaaatatatgtcgaccctgcagcacatcgatggcgatgcccgggtgctgatcaccggtgcgccggacgttatcttcgccatgtgccgcgagcagatgagccgccacggcgcggtgccgttcgaggcgcagtactgggaagaggagatggcgcgcttcgcccgtcagggactgcggatggtggcggcggcctgtaagccggccagccttgatgccaccaccctcaaccatgaggacctgcaggagggtctgattttcctcggcatcgccgggatgatggatcccccgcgtccggaagccattgacgccatccacgcctgccagaccgccggcatccgcgtgaaaatgatcaccggcgaccacccgcagacggcgatgagcatcggccagatgctggggatcaccaacagcagccaggccatgaccggctaccagctggagcacatggacgatgcggcgctggcgaaggcggcggtggagtacgacatctttgcccgtaccagcccggagcataagctgcgcctggttaaagccctgcaggataacggcgaagtggtcggcatgaccggcgacggcgttaacgacgcgccggcgctgcgccaggccgacgtgggtatcgccatgggtatcaaaggcaccgaagtcaccaaagaggcggccgacatggtgttgaccgatgataacttcgccaccatcgccagctcggtaaaagagggccgtcgggtctatgacaacctgaagaagaccatcctcttcatcatgccgaccaacctggcgcaggggctgctgatcatcatcgccctgctggcggggaacattattccgctgaccccggtgctgatcctgtggatgaacatggcgacgtcggcgacgctctccttcggcctggcctttgaggccgcagagcgcaacgtgatgaaccgtccgccgcgtaaaaccggccagcatgtgatggatggttttgccgtgtggcgagtggctttcgtcgggtcgatgatcgcgattgccgcctttatccttgaggcctggctggcgccgcgcggccacagtccggagtttatccgcaccgtgctgctgcagatgctggtgacggcgcagtgggtctacatgatcaactgccgcagcagcgacagcttctccctgagcatgggtctgctgcgcaacaaaggcatctggctggtgaccggcgtcctgctgctgatgcagctggtcattatctatgtcccgctgatgcaaagcatgtttggtacggaagcgctgccgctgcgctactggtttgtcactctggtcatcggcgtcgccatgttcctggtggtggaaatcgagaagcgtctgacgcgccggttccgcaaaacggcctga

SEQ ID NO: 138986 - DNA, 630 bp, Enterobacter cloacae
atgacaggtaaaaagcgttctgccagctcaagccgctggcttcaggaacactttagcgataaatatgttcaacaggcacagaaaaaggggttacgttcccgtgcctggtttaaacttgatgaaatacagcaaagtgacaaaatttttaagccggggatgacggtagtcgacctcggtgctgctcccggtggctggtcgcagtatgcggtcacgcagatcggcaacagcggccgcatcatcgcttgcgatcttttaccaatggatccaatcgttggtgtggacttccttcagggcgattttcgtgatgaattagtcctgaaagcgttacttgagcgagtgggcgacagtaaagtccaagttgtcatgtccgatatggcgccgaatatgtgcggaacaccggcggtggatattccccgggctatgtatctggtagaactggcgcttgaaatgtctcgtgatgtattagcgccaggtggtagttttgtagtgaaggtgttccagggcgaaggcttcgatgagtatcttcgagaaattcgctccctgtttacgaaggtcaaagttcgtaagccggactcttcccgcgctcgttcgcgtgaagtgtatattgtagcgaccgggcgtaaaccataa

SEQ ID NO: 138987 - DNA, 333 bp, Enterobacter cloacae
atgacccgttttcaatcccaacgtaagcaaaaaaatacgatgaatctgagtactaaacaaaaacagcacctgaaaggtctggcacatccgctcaagccggtagttatgcttggcaacaatggtttgaccgaaggggtactggccgagatcgaacaagcgttagggcaccatgaactcatcaaggtgaagatcgcctcagaagatcgcgaaacaaaagccttgatcgtggaagccatcgtacgcgaaaccggcgcctgtaacgtacaggtcatcggtaaaacgctggttctgtaccgcccaacgccagagcgtaaaatctcgctgccacgctaa

SEQ ID NO: 138988 - DNA, 477 bp, Enterobacter cloacae
atgcaagcgattccgatgaccttacgtggcgctgaaaaactgcgcgaagaactggattatctgaagtctgtgcgtcgtcctgaaatcattgccgctattgctgaggcccgtgaacacggcgatctgaaagagaatgccgagtatcacgccgcgcgtgagcagcagggtttctgcgaagggcgtatcaaggatatcgaagcgaagctgtctaacgcgcaggttatcgatatcaccaaaatgccgaacaacggccgggtgatttttggttctaccgtcagcgtgctgaacctcgataccgacgaggaacagacctaccgcatcgtgggcgatgacgaagctgattttaagcagaatctgatctccgtgaactcgccgatcgcccgcggtctgatcggcaaagagcaggatgacgtcgtgactatccgtaccccgggtggggaagtggaatacgaaattaccaaggttgaatacctgtaa

SEQ ID NO: 138989 - DNA, 1434 bp, Enterobacter cloacae
atgcgatttcccagatttatcatcggattgaccgccggtatagcgcttagcgctcaggcggcgaatattgacgagtacatcaaccagcttcccgccggtgcgaaccttgcctttatggcgcaaaaggtcggcgcatcgacgccggaaatcgactatcacagccagcaaatggcgctcccggccagtacgcaaaaggtcatcaccgcgctggcggcgctgctgcaactggggcccgattttcgctttaccaccacgctggaaaccaaaggttcccttgacggcggcgtgctgaaaggcgacctgattgcacgcttcggcggcgatccgacgctcaaacggcaggatattcgcaatatggtggcgacgctgaaaaaagccggcgtgcagcgtatcgaaggcaatgtgctcatcgatacctcggtcttcgccagccatgacaaagcgcccggctggccgtggaacgacctgacgcagtgcttcagcgccccgccggcggcggcgattgtcgaccgtaactgcttctctgtctcgctgtatagcgcgcagaaaccgggcgatgtcgccttcattcgcgttgcatcctattatccggtcaccatgttcagccaggtgcgaacgctagcgcgtggctcatcggaagcgcagtattgcgagctcgacgtggtgccgggcgatctcaatcgctatactctcaccggctgcctgccgcagcgtagcgagccgctgcctctggccttcgccattcaggatggcgccagctatgccggagcgatcctcaaagcggagctggcccaggcggggatcacctacagcggcacgctgctgcgccagacgctggccaatgagcccggcaccgtgctggcaaccagccagtcggctccgctgcacgatctgctgcggatcatgctgaagaagtcagacaacatgattgccgacaccgtctttcgcaccatcggccacgcccggttcggcgtacctggcacctggcgggcgggctccgatgccgtacggcagatcctgcgtcaacaggctggggtcgatctcggcaacactatcatcgccgacggctctggcctgtcgcgccacaacctgatcgccccggcgaccatgatgcaggtgctgcagtatatcgcccagcacgataccgagctcaacttcatctccatgctgccgctggcgggccatgacggatcgctgcagtatcgcgccggtcttcatcaggcgggcgtcgatggtaaagtttcggcgaaaaccgggtcgctccagggggtttataacctcgcaggcttcatcactaccgccagcggacaaaaggtggccttcgtgcaatatctctccggatacgccgtggagccagctgatcagcgcaatcgccgcatcccactggtccgctttgaaagccgcttgtataaagatttgtaccagaacaattaa

SEQ ID NO: 138990 - DNA, 1179 bp, Enterobacter cloacae
atgaagtttgtagatgaagcaacgatcctggtcgtagcaggtgacggcggcaatggttgcgtaagcttccgccgcgaaaagtatattccgaaaggcggtccggatggcggcgatggcggcgatggcggcgatgtctggctggaagcggacgagaacctgaacaccctgatcgactaccgttttgaaaaatcgttccgcgccgaacgtgggcagaatggtcaaagccgcgactgtaccggtaagcgcggtaaagacgtgacggtaaaagtgccggtcggcacccgggttatcgatcagggcaccggcgagaccatgggcgatatgaccaaacacggtcagcgtctgatggtggcgaaaggcggctggcacggtttgggcaacacccgtttcaaatcgtccgttaaccgtacgccgcgtcagaaaaccatgggtaccccgggtgataaacgcgacctgcagctggagctgatgctgttggccgatgtcgggatgctgggcatgccgaacgccggcaaatccaccttcatccgtgcggtctccgccgccaagccgaaagtggctgactatccgtttaccaccctggtgccaagcctgggcgtggtgcgtatggacaatgaaaagagcttcgtagttgccgatatcccggggctgattgaaggcgcagcggaaggggctggcctcggtatccgcttcctcaagcacctcgagcgctgccgcgtactgctgcacctcatcgatatcgatccgatcgacggctccgatccggttgagaatgcgcgcattatcatcggcgagctggagaaatacagcgagaagctagcctccaaaccacgctggttagttttcaacaagattgacctgatggacaaggccgaagccgaagccaaagccaaagcgattgccgaagcgctgggttgggaagagaaattctacctgatctccgcggccagccagcagggcgtgaaagagctgtgctgggacgtgatgaccttcatcatcgaaaacccgatcgtgcaggcggaagaagagcagaagccggagaaagtcgagtttatgtgggacgactatcaccgtcagcagcttgaagaggccgaagccgaagcagaagatgacgaagactgggatgacgactgggatgaggacgacgaagaaggcgtcgaattcatctacaaacgctaa

SEQ ID NO: 138991 - DNA, 966 bp, Enterobacter cloacae
atgaagcagcaggctgggattggcattattctggcgcttaccaccgcaatgtgttggggagcgttgccgattgcaatgaaacaggttctcgaggtgatggcgccgcctacggtggtcttttatcgctttctgatggccagcattgggcttggcgcgatcctcgcgatcaaaggcaaactgccgccgatgcgaatttttcgcaagccgcgctggctggtgttattagcgattgccaccggcggtctgttcggtaacttcatcctgtttagttcttccctgcaatacctcagccccacggcttctcaggtcatcggccagctatcgccggtggggatgatggtggctagcgtcgtaattctgaaagagcgcatgcgcggcacccaggtggtgggcgcgttgatgctgctcagcgggctggtgatgttcttcaataccagtctgattgaaatctttacccgcctgacggactacacgtggggggtaattttcggcgttgctgccgctacggtgtgggtaagctacggcgtcgcgcaaaaggtgttattgcgccgtctggcatcacagcagatactatttttgctgtacactttgtgtacgattgcattactgccgcttgctgagcccggagtgatttcccggttaagcagctggcaactggcatgcctgattttttgcgggctgaataccctggtcggctacggggcgctggcggaagccatggcgcgctggcaggcggcgcaggtcagcgcgttaatcactttgacgccactgtttacgctactgttttctgatttattatcaatggcctggcccgatgttttcgccagaccgatgttaaacctgattggttatctcggtgcgtttgtcgtggttgcgggcgcgatgtattccgccatcggtcatcgtctttggggacgttggcgtaagcgagaggcggtagtaccgctgccccgctcaggcgaatga

SEQ ID NO: 138992 - DNA, 258 bp, Enterobacter cloacae
atggcacataaaaaggctggcggctcgactcgtaacggtcgcgattcagaagctaaacgtctgggcgtaaaacgtttcggcggtgaagcagttctggcaggtagcatcatcgttcgtcaacgtggtactaaattccacgctggtaccaacgttggttgcggccgtgaccacactctgttcgctttgactgacggtaaagtcaagttcgaagttaaaggcccgaaaaaccgtaaattcatcagcatcgttgctgaataa

SEQ ID NO: 138993 - DNA, 1173 bp, Enterobacter cloacae
atgtacatcaacctgatttgggcctggggtcacccggaagtgtacatcctggttctgccggtgttcggggtcttctccgaaatcgccgcgaccttctcgcgtaagcgtctgttcggttacacctctctggtatgggcaaccgtctgtattaccgttctgtcgttcatcgtttggctgcaccacttcttcaccatgggcgctggcgcgaacgtaaacgccttcttcggtattactaccatgattatcgcgatcccgaccggggttaagatcttcaactggctgttcaccatgtatcagggtcgcatcgtcttcaactcggcgatgatgtggactatcggctttatcgtgaccttctccgtaggtgggatgaccggcgtgctgctggcggtaccgggcgcggacttcgttctgcacaacagcctgttcctgattgcgcacttccataacgttatcatcggcggcgtagtgttcggttgcttcgcaggtctgacctactggtggccgaaagcctttggcttcaccctgaacgaaacctggggcaaacgcgctttctggttctggatcatcggcttcttcgtggcgtttatgccgctgtacgtgctgggcttcatgggtatgacccgtcgtctgagccagcagatcgatccgcagttccacccgatgctggttattgcagcttgcggtgcggcgctgatcgcctgcggtattctgtgccagctgattcagttctacgtgtctattcgcgaccgcgatcagaaccgcgacctgaccggtgacccgtggggtggccgtacgctggagtgggcaacctcttctccaccgccgttctacaacttcgctatcgttcctcaggttcacgaacgtgatgccttctgggaaatgaaagagaaaggtgaagcgtacaaacagcctgctcactatgaagaaattcatatgccgaaaaacagcggcgccggcatcgtgattgccgccttcgctacggtatttggtttcgccatgatctggcatatctggtggatggcgatcgccagcttcatcggcatcgtagcgacctggattattaagagctttgacgaggacgtggattactacgtaccggttgcagaagtcgaaaaactggaaaaacagcatttcgatgagattaacaaagcagggctgaaaaatggcaactga

SEQ ID NO: 138994 - DNA, 612 bp, Enterobacter cloacae
atggcaactgatactcttgcgcatactgcccacgcgcatgaacacgggcaccatgatacaggaccgatgaaggtattcggtttctggatctacctgatgagcgactgcattatcttcgctacgctgtttgctacctatgccgttctggtgaacggcacggccggcggaccgatgggcaaagatattttcgaactgccgttcgttctggttgaaaccgcactgctgctgttcagctccatcacctacggcatggcggctatcgccatgtacaaaaacaacaaaagccaggtggtttcctggctggcgttgacctggttgtttggcgccggatttatcgggatggaaatctatgaattccatcacctgatcatggaaggctttggtccggatcgtagtggcttcctgtccgcgttcttcgcgctggtcggcacccacggtctgcacgtgacctccggtcttatctggatggcggtgctgatgttccaggtttcacgtcgtggcctgaccagcactaaccgcacgcgtatcctgtgcctgagcctgttctggcacttcctggacgtcgtgtggatctgcgtgttctcggttgtctatctgatgggggcgatgtaa

SEQ ID NO: 138995 - DNA, 330 bp, Enterobacter cloacae
atgagtcattctaccgatcatagcggcgcttctcacggcagcgtgaagagctacatgacaggatttatcctgtccatcatcctgacggtcattccgttcgccatggtgatgagtggctccgcctcgcatgcggttatccttggcaccattctggtgaccgctgtggtgcagatcgtggtacacctcgtgtacttcctgcatatgaacagcaagtccgatgaaggttggaacctgaccgcatttatcttcaccgtaatcatcattgcgatcgtggttgtcggctccatctggattatgtggaacctgaactacaacatgatgatgcactaa

SEQ ID NO: 138996 - DNA, 888 bp, Enterobacter cloacae
atgtttaagcaatacctgcaagtaacgaaaccaggcattatttttggcaacctgatctccgtgatcggcggtttcctgctggcctccaaaggccacatcgactatccgctgttcgtctggacgctccttggagtatccctggtggtcgcctcgggttgtgtattcaacaactacatcgaccgggacatcgatcgtaagatggaacggacgaaaaaccgggtgctggtcaaagggctgatctcgccagaagcttcgctggtgtacgccaccttgctgggtattgctggcttcatgctgctgtggttcggcgctaacccgctggcctgctggctgggggtgatggggttcgtggtttatgtcggcgtctacagcctgtacatgaaacgccactccgtctacggcacgctgattggctcactctccggcgctgcgccgccggtgattggctactgcgcggtcaccggtgatttcgacagcggtgcggcgatcctgctggctatctttagcctgtggcagatgcctcactcctacgccatcgcgattttccgctttaaggattatcaggcggcgaatattccggtgctgccggtggtgaaaggcatttcggtcgccaaaaaccatattacgctgtacatcgtcgcctttgccgtggcaaccctgatgctctcgctgggcggctacgccgggtataaatacctggtcgtggcggcagcggtcagcgtctggtggctgggcatggcgctgcgtggctataaagtggccgatgataaagtctgggcgcgtaagctgttcgtcttttctatcgtcgccatcaccgcgctgtccgtgatgatgtccgttgactttatggtgccggattcacatagtctgctggcttacgtaagataa

SEQ ID NO: 138997 - DNA, 333 bp, Enterobacter cloacae
atgaaagagttaacactgaacgaaatggagtatatctccggtggctttaatctgttcggcgcagccagcggcttcgccagctttgtcgccaactctggcgtcggcttcacctcttttgttctaacctccggcaccgcatttgcctccttcgtcggcgacagcgcgatggcgtttggttccttcctgaccggacagtcaaactgggaaacctttgtgaccgccggaaaggaaaactggggaagctttgttaacaccgccggcaacagctggaatactttcgtgaataacgcggccagcgactggaacacctttctgaccaaagcgtcggcctaa

SEQ ID NO: 138998 - DNA, 759 bp, Enterobacter cloacae
atgcaaaacaccattcatccacgcgatctgatcgtcggtttacaaaaagggctggcgctaattcagcttttttccaaaacctgcccaaagctcaccgtcgcccagacggcgaaaatgagcggcctgacgcaaagcgccgcgcgacgttttctgctgacgctcctgcatgagcgctatctgcaaaccgacgggcgctattactggcttaccccaaagacgctgcggcttggccaggcctatgtcgattcggcgcagtttcctcgcatggtacggccgattgtcgaatacatcgccagccggaccgaagagcacgcctcggtgggggtggtggatgaagatgaactggtctatatcgcccgcagtcggcatacgccgttcaactctacgtcggtgcggcttggggagcgggtgcccattttctgtaccgccggggggcgactgtggctggcttcgctgccggaagcagagtgtgagaccgtcctgcagcgcataacccgggaacaacgtaccccctatacggtgaccgatatcgcgtcgctgatggagaaaatcgcccaggtacggcgccagggatacgccactattgagcaggagtttgagattggcatgctggtgctggcggtgccgttaaccgacagggaagggacctggtggggggcgctgagtctgaccagtcatcaatcgcgcacttcgctggaagcgttatgccgcgatcacctcgatctgctctacagcgcgcaggcgatgctggtgggttaa

SEQ ID NO: 138999 - DNA, 822 bp, Enterobacter cloacae
atggtcagtggaactacccaggttgtcgccgtgattggtcatccgatcgcccaggtgaaatcaccggataacttcaaccgctactttgccgaacagcacatggacagcgtcatgatcccggtggatatcgtcccggacgcggtggccgcctacctcaacgccctgcgcggctggcagaacatgaccggcgtgctggtgacggtaccgcataaacaacgcgccgccgcgctggtcgacgacctcacgccgcgcgcccgccgactcaacgccgtcaatgtgatccgcaagctggcggatggccgcctgcagggcgatatgctggacggcgtcggctttcagctcgccgccgaggcgcagggttttcagccggcaggtaagcaggcgctgctctccggttgcggcggcgtcggcagcgccatcgcctggggactgtgcgaggcggggatccgtcggctggccctgcacgatcaaaccccggccacccggcagcgcctgcatgaccttctggctgaggcctttccggcggtgcaactgagcgcgctgccagacaccctttacggcctcgatctactggttaatggctcaccggccggcatggccggatttgatgagctgcctctaccgcaggcgcttctggatacgctcgacagcaccactcatgtggccgacgttgtcaccgccccggtgatgacgccgttgctcactttcgccgccgcacgtggttgcaaagtacagaccgggccggaaatggcgctggcgcagatgaggctgatgggccagtttatcggcgccatcccgcaggcgcagggagcggcggcatga

SEQ ID NO: 139000 - DNA, 921 bp, Enterobacter cloacae
atgagcaaaaaagcgattcactggagcggcgtattcccggcggtcagcacgcagtttcgtagcgattactccctcgatttagacgccactcacgcggtgatgaaaaacctggtgaaagatggcgtttccgggttggtggtgtgcggcagcgtaggtgaaaacacctcgctgagcaccgatgaaaaactacagattatcgaggtggcgaaggatgccgccggcggcaaaattccggtcatcgccggggtggccgagttcaccaccgcctttgcccagaaaatggcgaaagaggcggagcgcgtcggcgtcgacgggatcatggtgatgccggcgctggtctactcctcaaaaccgcatgaaaccgcggcccacttccgcagcgtggcgagcgctaccgacctgccgattatggtgtataacaacccgccgatttacaaaaacgacgtgacgccggacattctcgccaccctgaccgactgcgagaacatcgtctgctttaaagactcctccggcgatacccgccgctttatcgacctgcgtaacaccgttggcgaccgcttcgtgctgtttgccgggctggatgacgtggtggtggaaagtattgccgtcggcgcggaaggctggatctccggaatgtccaacgccttcccgcgcgaaggggaaacgttattccgtctcgcccgccagcagcgttacgaagaggcgatggtgttgtaccgctggttcatgccgctgctgcatctcgatgcgcgtccggatctggtgcagtgcatcaagctgtgtgaagagttgctgggccgcggtagcgccattacccgtccgccgcgtctggcgctggaaggcgaaacgcgccagcaggtggtggcgatcgttgaacaggcgctggccactcgtccgacgctgccggatgtcggcctctga

SEQ ID NO: 139001 - DNA, 825 bp, Enterobacter cloacae
atgatcggtgtttctgatgcggcgccgccgcgcgcggttaaccaacctgagctggccgtcgatgagctgagccagatctgcgaagggctggcgcgccagcggccggaaaatatgccggcgctgctgaatgcgctggcgctgattgcgcccctgctcaatgccattcctaatgtggtcttttttatcaaagatcgccaggcgcgttatttgttggcgaacctgacgctggcccgccgctgtggtttcaaaagcgtctcctcgctgctgggcaaaacctccgccgatgtctttccttccgcgctgggtcagggttataccgaacaggatcttcgggtactacgggaaggcgtgaccctgcgcgatcagctggaaatgcatctctacaatggccgcgagcgcggctggtgcctgacgcagaaattggcgctgcgcgatatcagcggccagatgatcggcatggccgggatctcgcacgatctgcaggaggcccacgcccgccatccggcatggcagcggctggcgattgtcgacgatcatatccgccgccactatcaccggccgatcgccatggaagagttaaccgccttaagcgggatgtcgattgcgcagatcgaacgctactgcaagcggatctttcatctcaccccgcggcagatgatccacaaagtgcgcctggaaaaagccaccgaactgttggctggcgatacgccgattaccgatatcgccctgcagtgcggctataccgatcacagcgcttttagccgccagttcaaggcgatgaccggctcgacgccgcgcgattttcgcctcacgctgctcggataa

SEQ ID NO: 139002 - DNA, 948 bp, Enterobacter cloacae
atgaccgcgccacgcccccctgttacgctgagagctattgattcacataccggcggcgaaccgacccgcctgatcgttgacggcttccccgacctcggcgacggcagcatggcggagcgccgcgaccgcttcgcccgcgacttcgaccattggcgtcaggcggccattcttgaaccgcgcggcaatgacgtactggtcggcgcgctgctgtgcaaaccggtctcggcggcggccaccgctggcgtgattttcttcaacaacgccggttttctgaatatgtgcggccacggcactatcgggcttatcgcctcgctggcctggcttgggcgtatccagccaggcgtacatctgattgaaacgccggtcggcgacgtaagcaccacgttgcacgacgatggcagcgtatcggtgcaaaacgtcccggcccgccgctggaaaaaacagatccgcgttgaaaccgcgctgggtcccgtcatcggcgatattgcctggggcggcaactggtttttcctgattaacgaccacccgttcgccataacgcccgaacagattccacagctcaccgactacgcctgggcggtacgcgaggggctggaagccgcggggatccgcggcgacgacggcggcgttatcgaccatatcgaactcttcgccgatgacgataccgccgacagccgcagcttcgtactctgtccgggaaaggcctgggatcgctcgccgtgcggtaccggtaccagcgccaagctggcctgcctggcgcaggatggcaagttgcagccgggggaaatatggcgccaggccagcatcatcggcagccagtttaccgccagctaccagcgcaccgcggaaggcatcatccccacgatccgcggcgaagcctgggtatgcggcgataaccagttgatcctcaaccctgacgatcccttctgctgggggatcgcgccgtga

SEQ ID NO: 139003 - DNA, 1110 bp, Enterobacter cloacae
gtgaagcagtgcgacgtcatcgtgatcggcgccgggatcatcggcgccgcctgcgcgtggcagctggcgaagcgggggcagagcgtgacgctgatcgataacggtcagcccggcgccacggcggccggtatgggccatctggtgtgcatggatgatgaccccgccgagcttgccttgtcggcgtggtcgctggaacgctggcgcgctatcacgccgcggatgcccgacaattgcgcctggcgcggctgcggcacgctgtggctggcggaaagcgaagaagagatgaccgtcgccgacgaaaaacagcggcggatggccggccatcaggtgcacagcgaacgccagactccgcagcagatcgccgggcgcgagccgctgctgcgcggcgggctcgccggcgggctatgggtaccgggcgatggcatcgtctacgcgccgaacgtcgcccgctggctgatagccgatgccggagaccatcttacctgcctgcgcgatagcgtacagacgattgacgagccgcaggtgctgctcgccagcggccaacggctacaggcgcgggcgatcgtggtggcctgcggccttgaagccaacgcgctgttagcagaaaactggctgcgaccgaaaaaaggccaactggcgattaccgatcgctaccggccgcgggtgcagcaccagctggttgagctgggttacggcgccagcgcccacggcggcggcacctcggtggcgtttaaccttcagccgcggcccaccggccagctgctgattggctcgtcgcgtcagtttgataaccgcgagcgcgagttggatctgcccctgctggcgcagatgctcgatcgcgcccgccatttcgtgccggcgctggcgacgttgaatatcatccgctgctggagcggtctgcgcgccgcctcgcaggatggcaacccgctgatcggcccgcaccccgctcgccgtggcgtatggttagcgctgggccatgaagggctgggcgtcaccaccgcgccggccacggccgaactgctggcggcgcagatcctcgatgaacgcagcccactggcgcccgacgcctggctcccggtacgtttgtgtcaacaggaggcgattgcatga

SEQ ID NO: 139004 - DNA, 264 bp, Enterobacter cloacae
atgaaggccactctcaacatcaccgtcgatggccagcctctgacggtgccggaagggatcagcgtggcggcggcgctggcgttgaccggcgaccccaccacccgccaggcggttaacggcgagctccgcgcgccgttttgcggcatgggcgtctgccaggagtgccggatcgccgtcgacggccatcgggtgctggcctgtcagaccctgtgccgggccggtatgcaaatagaaaggagccgcgatgaacacgctgcgctgtga

SEQ ID NO: 139005 - DNA, 1263 bp, Enterobacter cloacae
atgaacacgctgcgctgtgacattttaatcctcggcgccggccccgcagggatggcggccgcgctctccgccgccgcctgcgataaacaggtgattattctcgacgataatcccgcccctggcgggcaaatctggcgtgccggtccgcaggcgacgcaacccgccctggcccggcgctaccgcgacgccatcgccgcgtctgccgccatccggttagtgaacggcgcgcggctgattgcccgcccctccgcgcacagtgtgctgtttgaaaccgccgacggcggtggtgtggtttactggcagaaactgatcctctgctgcggcgcgcgcgagctgtcgctgccctttcccggctggaccttacccggcgtgaccggcgcgggcggcctgcaggcgcaaatcaaacagggcctggcgctgaaaggagaaaaggtggtgattgccggcagcggtccgctactgctggcggtggcggatacggtgaacaaggccggaggcgacgtgacgaatatcattgagcaagcgccgctcccggcgctgctgcgcttcgccggtgggctgtggcgctggccgcagaagctgcgccagttagcgacgctggctccgaaaggctatcttagcggcacgcaggtgaaccgcgctcacggcacaacgcggctggaagccgttacgttgcgccagcgcggcgtcgagcgaactatcgcctgcgatcggctggctatcggctacgggctgatacccaatatcgagacggcgctgctgtttggctgcgccacggcgcaggaggcgatacaggttaaccgctggcagcagaccagcatcgcggatatctacgccgccggcgagtgcaccggtttcggcggtagcgaactggcgctggcggagggcgaaatcgccggttttgccgccgccggggccagccatcaagcgcaggcgttatttgcccgccgcgcccgctggcagcgcttcgccgacgccataaaccgcgccttccggctggcggagtcgttgaaaaacgcggcgacgccggagagcctgctgtgccgctgcgaggatgtgcgctgcggcgacgtggctgccgccgacgactggctgcaggccaaactgacccagcgctgcggtatgggcgcctgtcaggggcgcacctgcgccgccagcgcccgctggctgtatggctggccgctgccgcagccgagagagccgctgtcccccgcccgcgcggaaacgcttattgccctcgccaggctgagcgccgagccgtaa

SEQ ID NO: 139006 - DNA, 888 bp, Enterobacter cloacae
gtggtgcgctataaccgtaacgagctggacaaactggtcgagcagattaacgcctctggctacggcctgaccctcggcgtgcatacccgtatcgacgaaaccatcgcccaggtcaccggcagcgcgaaggtgggcaacctgtacgtcaaccgcaatatggttggcgcggtggtcggcgtgcagccgttcggcggcgaagggctgtccggtaccggtccgaaagccggcggtccgctgtatctgtaccgtctgctctccagccgtccacaggacgcggttggcgtaaccttcgcccgccaggatgcggagcgtccgctggacgcccagctgaaaacgctgctggaaaaaccgctgcaggcgctgcagcagtgggccgcgggccgtcctgagctgcaggcgctgtgccagcagtacagcgagcaggcgcaaagcggcacccaacgcctgctgccggggccaaccggcgagcgcaacaccctgacgctgatgccgcgcgagcgcgtgctgtgcgtagcggataacgaacaggatgcgctgatccagctggcggctgtgctggcggtgggttgtgaagtactgtggccggacagcgccctgcagcgcgatctggcgaagaaactgccgcgggaggtcagcgagcgcattcgctttgccaaagcggagcagttgcctggccaggccttcgacgcggttatctaccacggcgattccgaccagctgcgcgagctgtgcgagcaggtggcggcgcgcgacggggcgattgtctccgtgcagggcttcgcccgcggcgaaactaatctgctgctggagcggttgtatatcgagcgttcgctgagcgttaacaccgcggcggcaggcggtaacgccagcctgatgaccatcggctaa

SEQ ID NO: 139007 - DNA, 396 bp, Enterobacter cloacae
atgaaacgcacgttatttgccgtgatggccctgctggccagcggcgcggcgctggcggacgagtgcagcagcgccaacacccaaaccgaaatgaatcagtgcgcggccgcgcagtatcaggcggccgataaaaaactgaacgacacctggcagcaggccctgcagcgggcggtgggtaaacaacagacattactgaagcaggcgcagcaggcatggatcgccttacgcgacgccgactgcgcctttctcgcgtccggcgccgaaggcggcagcatgcagccaatgctggtcagccagtgcatgaccgataagagcgtggagcgggagtctttcctcgcctcgctgctacagtgcgaggatggcgatcaaagctgcccgctgccgcccgccaattaa

SEQ ID NO: 139008 - DNA, 639 bp, Enterobacter cloacae
atggcacagggcgcggtgaagaaaagcggcaaacgttcacaagcggtcagcgccaaaaaggaggccatcctggccgccgcgctggaggcattttcgcaatttggtattcacggtacgcggctggagcaggtggctgagcgcgccggggtatcgaaaaccaatctgctctattactacccttcgaaagaggcgctgtatgtggcagtcctgcagcagatcctcgccatctggctggcgccgctgaaggcctttcgtgaggatatcagcccgctggtggcgatccgtgaatatattcgcctgaagctggaggtgtcccgcgatcatccccaggcctcgaagctcttctgcctcgagatgctgcagggggcgccgctgctgatgggcgaactgaccggggatctgaaagcgctggtcgacgaaaaatcggcgatagtctccggctggatcgaccgcggcaagctggcgccggtcgatccacagcatttaatctttatgatctgggctaccacccagcattacgccgacttcgccacccaggtggaggcggtcaccggcgccacgctgcaggatgcggccttttttgaacaaacggtcgataatgtccagcggatgattatcgaaggcattcgcgtccgttaa

SEQ ID NO: 139009 - DNA, 687 bp, Enterobacter cloacae
  misc_feature (492)..(523): n is a, c, g, or t
atgaaaattggtgttttcgttcccattggcaacaacggctggctgatctccacccatgccccgcagtatatgccgacctttgaactgaataaggccatcgtgcagaaggccgagcactaccatttcgacttcgcgctctccatgatcaaactgcgcggcttcggcgggaaaactgaattctgggatcacaacctggagtccttcaccctgatggccggcctggccgcggtgacctcgaagatccagatctacgccaccgccgccaccctgacgctgccgccggcgattgtcgcccggatggcctccactatcgactccatctccggcggccggtttggcgtcaatctggtgaccggctggcaaaaaccggaatatgaccagatgggcatgtggccgggagatgactatttcgccagccgctatgactatctcaccgaatacgtccaggtgctccgtgacctgtggggcaccgggcgcagcgatttcaaaggnnnnnnnnnnnnnnnnnnnnnnnnnnnnnnnngtcaacacgccaacggcctttgccccgaccgccgcacgcatgatgcaggcggcggaaaaaaccggccgcgacgtggggtcctatgtgctgttcatggtgatcgccgacgaaaccgacgaggcggcgcgcgccaaatgggaacattacaaagcgggcgccgatga

SEQ ID NO: 139010 - DNA, 711 bp, Enterobacter cloacae
atgattacccttcccgctcgcccggaatccctgaccttcgcgccgcagcagagcgcgctgattgtggtcgatatgcagaacgcctacgccagccagggcggttatctggatctcgccggctttgacgtctccgctacccggccggttatcgacaatattaataccgccgtcgccgccgctcgcgccgcgggtatgttgattatctggttccagaatggctgggatgaccagtatgttgaagccggcggcccgggctcgccgaactatcacaaatccaacgcgctgaaaacgatgcgtcagcgtccggagctgcagggcaagctgctggcgaaaggcggctgggattatcagctggtggacgagttgacgccgcaggaaggcgatatcgtgttgccgaaaccgcgctacagcggcttctttaacaccccgctcgacagcattttgcgcagccgcggcatacgccacctggtgttcaccgggatcgccaccaacgtctgcgtcgaatcgacgctgcgcgatggcttctttctcgaatacttcggcatcgtgctggaggatgccacccatcaggccggcccggccttcgcccagcaggcggcgctgttcaatattgaaacctttttcggctgggtcagcgacgtcgagagcttctgccacgcgctgtcccccgccaccccgctggctttagccaaggagaaacgttatgcctaa

SEQ ID NO: 139011 - DNA, 393 bp, Enterobacter cloacae
atgcctaaacaggtgattattccgccaggcaccaccgcgccgattgccccctttgttccggggacgctcgccgacggggtggtctacgtctcgggcaccctgccgtttgataagcaaaacaatgtggtgcacatcggcgacccaaaggcgcaaacccgccacgtgctggagaccatcaggagcgttatcgaaacggcgggcgggagtatggcggatgtgactttcaacagcatctttatcaccgactggacaaattacgccgcgattaacgaggtctacgccgagttcttccccggcgataaaccggcgcgcttctgcattcagtgcggactggtgaagcccgatgcgctggtggaaatcgccagcgtcgcccatatcggtaccccgacatga

SEQ ID NO: 139012 - DNA, 609 bp, Enterobacter cloacae
atgatgaggctcaatattgctccggctccgtggcccggcgcgccggtggtggtcctcagcgccggtctgggcgggggcggcggctactggctggcgcagcgcgcggcgctggaggaacagtatcagctggtgagttatgaccataacgggaccggggagaacgccggtccgctgcccgccgactacagcctggcgacgatggccggggagctgttcagcgctctgcaagcggcggggatcgcccgcttcgcgctggtgggccacgccctgggggcgctgattggcctgcagctggcgctcgatcgccccgaggcggtgagcgccctggcgctggtcaacggctggctgtcgctgtcgccgcatacccgccgctgcttccaggtgcgcgagcgtctgctgcatgccggcggcgcacaggcgtgggtcgaagcgcagccgctatttctctacccggcggaatggatggccgcgcgcctgccgcgcctcgaagcggaagatgcgcttgccatcagccattttcagggcaaagagaatctgctgaagcggctacaggccctgaagcaggctgatttttcacgccgtgcggcggccatccattccgccgggtag

SEQ ID NO: 139013 - DNA, 606 bp, Enterobacter cloacae
  misc_feature (401)..(410): n is a, c, g, or t
atgaacgacgcaataaaccacacggcctgcgagacgctgtttacccaggcccggacccacaacggctggctggataagccagtgagcgatgcgcagctgcaggccgtctgggacctgatgaaaatggggccgacttctgccaactgttcgccagcgcgcatcgtgttcgtgcgcagcgcggaaggcaaagagaaacttcgcccgacgctctccagcggcaatctgcagaaaaccatgcaggcgccggtgaccgccatcgtggcgtgggatagcgccttctacgaccggctgccgaccctgtttccccacggtgacgcccgcagctggtttacctccagcccgcaactggcggaagagaccgcgtttcgcaacagctccctgcaggcggcgtatctgatttnnnnnnnnnngatttttgcctgccgggcgctgggcctcgacaccgggccaatgtccggttttgaccgggaaaaagtcgacgcggcattttttgccgacaacggctggaaaagcaacctgctggtgaacatcggctatggcgaccccggcaagctgtacggccgcctgccgcgcctgccctttgatgaagcctgcctgctggcataa

SEQ ID NO: 139014 - DNA, 486 bp, Enterobacter cloacae
atgatacattccctttgtgtattacttggctttcatacaatttatcgtgagggtaaagtggacggtggatggatatatgtcttaatgacagcctctgattataatcgttacaaagttggtttaactattaataacccactattgcgttataaaaagctgagaactggtgaccctatgcttggatttgaagttgcttattatgttccaaattctttaggcatatcactgtcatctcttgaaaatgctttacataaagagttaggtcctcgtattaatttctttgacgagggaaattccgaatggttttatggtaacccaagacatgcttggcaaaatttagagatgatttttgaggagtttggttttgaagttactgactggtttcaaccgggagaaaataaagttgtgagattttgggaagaagctttaactgcattttatggcccaggcttaccattagatgaatcaggtgacccgatattttag

SEQ ID NO: 139015 - DNA, 606 bp, Enterobacter cloacae
gtgaccagtcccattcgtcagaatctgtttgaacgggaatgtgatatgccgctgctggaagcgcggcaactcgcccttctgcttctcggcctcgacgcttcccaaccagcaaacaccctgccggaaaaacatcaggagaattaccgaatcctgcatgacgccatcagccgaaccatcaaagcaacgggcatggtcagcgccccggcgaacaaacgaatgttctatgccgatgagatgtttgccctggcctggcggcttattgatgacgaactcactccgccagaaattaaggcccgcagcctgaaggcggtgatgaaactgtcacgcaacagccgtggccgcaagtggctgaagacgctcggtgacgacgcgctaccagatctcactacttcagcacaaccttcccagcgtgggatgcataaacgcgacaaagcgcgggagaatactgcccgactctgctggctactggttcaacttctggttgaggagactgacggacggtatgggacgtctgataaaccggcttcggatcggatacttcgcaagctgaagacactggctccgttttatgaggtgatgaagatggggcgggagaagggaacgtag

SEQ ID NO: 139016 - DNA, 234 bp, Enterobacter cloacae
atgaaagtagagacaatcagctacgtcaaaaagaacgcagcaacgcttgatctgtcagaacctatcctggtcacacaaaatggtgtgcctgcttatgttatagagtcctatgaccagcagcaggaacgggagaacgccattgctttgctgaagctgcttaccctgtcagagaaagataaagcggaagggcgggtgttctcgaaaggccagttgctggatggccttgcggattaa

SEQ ID NO: 139017 - DNA, 333 bp, Enterobacter cloacae
atggaacagcaggtgacctttgagtacacgcttacggtgaagcactgcatcgacacaatagccggtttcctgcgccgtgttgatgttgagccgcgtccggttattgcagatattctcacacagttcgagagttctgtaggccagttcccgctgggatgccagatttgccctgaattgctgaaaattggctgcgccaaataccgggagtttaaccacgctgaaggctaccgggttttgtattccgtagacggaaccttagtgaccgcgcatgcgatcctggcacatcggcaggacgtgcagcagctgctgtttaaacgtctgatcatggcctga

SEQ ID NO: 139018 - DNA, 1869 bp, Enterobacter cloacae
atgaaagaaccaaataaaatagatggaaatcgccgcgatctcctcaaaggtctggggattgccgcagtcgtgagcctgttaccagagacgggaaatgccgcgcaaaataatgccgccccgaaagcggcatgggatattcctttcaccggcgaaatccctgacacactgcccgaaggctacaatattttactaataccctgcgatcaggaacgttatttcgagcggtatccctttccggtgccgggccgggaacgcctgatgaaaacgggtatcacttttaccaatcatcagaacacggccaacgtttgtacgccatcgcgctctgtcatgtacaccgggctccatatgccgcacacccggatgtttgataatcttggcttcccctggatgaattacgatctggacccggaattacgtaccgtgggccatatgatgcgtgaactgggttattacacggcgtataaaggtaaatggcatcttacccgggagatcgatcagccggtcgctggtaaatcggtagaagaaatggacctgggcgagatcccgacgccgcgactgcatgaaattatggaaaagtatggtttctctgattatcacggcattggcgatgtcatcgggaaaagtaagggcggctatttctttgattcagtcaccacggggcagaccattagttggctacgtaacaccggccgcccgctgaatgatgaaaataagccctggttcgcggcagtaaacctggttaacccccacgatgtcatgtttatcgacaccgatgagcatggtgagcaggtgcagtggaaagggccaatggataaagaaaaccacaccctgctgccaacccaacccccgcacaaccaaatctatcagcaaagctggccagactatccgctgcctgcaaaccgccatcagtcgctcgatgagcctggcagacctgccgcccataaagagtaccagaatgccagggcggtgatggagggacagttccccgatgaagaccggcgctggcgcaaattactggattattatttcaactgtattcgcgataatgaccagcatcttgaggcgattctcaatgaacttgataatcttcaactgacgcaaaatacgattatcgtctttaccgccgaccatggggaactcggaggctcccaccagatgcatggtaaaggttcctcggtgtacaaagagcagatccatgtgccgatgatcattcgccatccggcgtatccgggaaacatccgctgcaacagtttgactaatcatctggatttagtaccgaccctgattggtctgactggacgcgatcggtcgctgcgagagaaagtcctggagggcagaaaaggccgagatatgagcccattactggcgcatcctgagcaagcgggcttaaatgcgctgcgtccgggttcgctttattgttacggcatgatcctgtatatggatgcgcaatacacggcaaaattcagaaagctggctggagaaaaactcccgcacgatcaatttaaaaaagcgatcgcgtcactccatcctgatttttcccatcgctcagggatccgtatgatcaacgatggacactataaatttgcccgctacttttcgctcaagcagcatcatattcctgctaccctggccgaactgctggagaataatgatgttgaacttttcgatctggttaacgaccccgaagaaaatcataacctcgcccgggagccagagaaataccgggatctgttaatgactatgaacgataaactcaatcagctcactgccgctgagattggcgaagatgatggcagctatatgcccccgtttgaaggaagccagtgggacatgtcggcggcccagatgcatcaatatatgcgcgattag

SEQ ID NO: 139019 - DNA, 1068 bp, Enterobacter cloacae
atggacgacctcacgctggaagcatacattcacaacaccatttcatcgaccccctcgcaaaacgtcgagttttgctggcagggcggtgagcctaccttatgcgggctggatttttttgcaaaggtggtcgagctccagcagcgttaccgtggtaacaaaatcatcgccaacagcctgcaaaccaacggcatcttgctgaacgataaatgggctcgttttttgcgtcgtcatggatttctggtcggattatccattgatggccctgcgtcactccacgacacctggcgtacgacgggctgcggaaaaccaacctggaaaaaagttgtgcaggccatacgctgcctgcagcagcatgacgttccggtaaatgccatggtggtggtcagccgccagtctgcaagccaggggaaaagtctctatcgctgcctgagccgcgagctaaaccttcaccatctccagtttattcctctcgttgactcccctgctccctggtcagttacccctgagggctggggcaaatttttgtgcagtgttttcgacgactggctggaaaacgatgttggcagggtgtttatccagtactttgataatctgctcggcgtatgggccggccagcccgccacgctctgcaccatgcagcctgtctgtgggcagagtttactggtggagcaaaacggcgatgtctacagctgcgatcactttgtctcagcggaatataagctgggtaatctgaagcaagatgctatggcagcgatggcgagctcgccatttcagcaacagttcgggaagcaaaagggccaactctctgcccgctgtcagagctgccactggcgctttgcctgccatgggggatgccctaaacaccgttttaccatccatgacgacgaagcacagaattacctgtgcagcggctatttagcctttttcggccatatcacgccctatatgaacgtcatgcgaaggcttttattagattgccagccgcccgcgctcattatgagtcttatcccggagattcggcaaaatatattacaattaacggagtctgaagatgaaagaaccaaataa

SEQ ID NO: 139020 - DNA, 330 bp, Enterobacter cloacae
atggcaacggcaagaaacggctatacgctgcaggtgataaaggcaggacagcaggggcatgttgaaatgagatgggggcatctcgcagacgttgatacgcgcgcggcggcggcggctatcatgcagcatatcgggcgttcttcgtcctcgcggggccagcaggagatcagcctgtcgctgaccaatgccgccagcggtatctcggtggagcttcatcacccggcctctggggaaagcgccaccccggcttttattgaggctgagttaaagaagattgtgcagatcgttggtggctacgaggcggcagaagatacccatattgtggagtag

SEQ ID NO: 139021 - DNA, 915 bp, Enterobacter cloacae
atgaagcactgtaaaataatcctgttagtaggccttctggccagttccgcttcggcattagcggagaagatcggcgtctcaatggcctacttcgatcaaaactttctcactattatccgccagtccattgagaaagaagctcaagcccgccacgtcgacgtacagtttgaagacgcccgcggcgacaccggacgccaggccgatcaggtgcagagcttcattgcctccggcgtggacgcgatcatcgtcgacccggtggactccgccagcaccccgcagctgacgaagatggcgcagcaggccaaaatgccgctggtgtatgtgaaccggacgccgggggataaaacgttaccgcccggcgtggtgtttgtcggttcggacgagcgggagtctggcacattgcagatggaggcgctggcgaagctggcgaactacaaaggcaacgtcgccatcatgatcggcaatctcactgacgccggcgcgctgcagcgcaccaaagacgtcgagcaggtggtggccaaatatccggcaatgaaagtggtgcagaaacagccggccaactattcccgcagcgagggaatggatctgatgcagaactggacaggcaacggggaagcgattgatattgtggcggcgaacaacgatgagatggcgattggcgcggcgatggcgctggagaagagccagaagaagctgttgatcggtgggatcgacgccacgccggacgggctgaaagccctggccagcgataagatccaggtgacggtcttccaggacgccgtcggtcagggcaaaacggccttagcggtagcgctgaagctgattaaaggagaaaaagtcgagtctcatgtctggatcccgtttgagttagtgaccaaagaaaacatgcagacctatgtggaaaagagtcattaa

SEQ ID NO: 139022 - DNA, 1239 bp, Enterobacter cloacae
  misc_feature (1017)..(1026): n is a, c, g, or t
atgatgacaacacaccacgaccgtcactataaagccggtggcgacccgcgcacgctggctgattttatggccctgcgtgcggaaatgaacaagctcagccacccggcgcggccggatattaactggccgtatgccgagcagcttgcccgcgggctgttggagcatcacggcgcggacctgcagactgtcgcctggtataccctggcccgcgcccggctgggcggggtggcagggatcaatgaggggctgacgctgatggagtcgctgctggttcgtcaggggaaaaacctgtggccacaggcgctcccggcccggacagagatcttccgcaccctgagcaagcggctgcggcaggtgatccgtaccctgaatcttaccccagaggatgttgagtcgcttgagcaggctgaactttcgctgcaaagcttcgacgcagtgctccagcgccttgagatcgctcctgaaaaccagctgagcgacctgcgggcgctactgcacagcacggcaactcgcttcgagagcctcgaccctgcgccagcgcttcccaccgcgccgccggtggcggtgtctgacgcggaacttcccggcactctggtcagcgaagaggatgcggcgaaggttgagccagtgccagacctaaaacgtagaccaaaggctgaaccgctggctccgccttcacctgcaaagcggcccgcgccggtggcggcgtctactccggcacccgcgccgcgctggaagccgtttatcgccggaatggttaccatgctggcggtaacgggtatcgccgtcggcggatggctggcgctgcgtcagtccgacttgccgcccatttcggtcacccaaaatgccggaccgataccgggcctgccggcgacaacgcccccggggccggttgatctgccacagacgcagcgccagcttggcgagcttgaccgcctggcgccggactgggcggtcagctacggcgaccagctggtccaccaggccctgatccgctggccggatcagggcctggtnnnnnnnnnnctggccggatcaggcgcaaccgctggcgcagcagtggcggcagcagctgagtgctggcgcattgcccgcggaaaaccttaccggctggtcggagggcatgcagcaactgcagcggctcgccgaccagctcaatgccctcgacgagcagaaggggaagtacctgacggtgagcgaactgaaaaccgcagtatttgccatcacgcagtcgtttaa

SEQ ID NO: 139023 - DNA, 453 bp, Enterobacter cloacae
  misc_feature (166)..(175): n is a, c, g, or t
atgcctcgtccctccctgtatgacatcctgtacggcaatttcgccggcgggcttgacctgaatactgtcagcgaaacggatcaggtcatcctgtcggtgctcgataacatgcagcgcatcctcaactgtcgggccggaacgctggcgcatctgccggactacggcnnnnnnnnnntgccggatatgaccgctgtcctccaggggatgccagcgtcggcgcatcagctgatgagcacattgtcggcggtgttgttgaaatacgaaccgcgcctgcagcggatcgcggtggtgatgctcgatcagcatgcgcccggcgaactgcgctatgccattgatgcggagctgaaggatattggcctggtgcgttacggcacggagtttatgcccgagggcagggtgttgatccgccacctcaaacgccagcagtaccttgacgcccgctccgccctctaa

SEQ ID NO: 139024 - DNA, 537 bp, Enterobacter cloacae
atggcgattaccgcagttaaaccctccgccaggttgctggcattcctcatggtaaccgtcttaaccggctgcggactgacgcagaccgtgaaagacggcgccgtttccgtgacccagtccattttttacccccaggtgaaaaccctgcatctggatcttcgcgcccgggaaggcgtgaataacaacgccaaaggcgcctccctggcgacggtggtgcgtatttatcagctgaaggaccggcaagcgttcgacaatactgactacccgtcgctgtttgccggcgatggccaggcgctgcaggcggaccgggtggcggaaaaagatgttcgcctgcgtccgggcgaatcggtgaccgtcgatatgcccatggaaaccagcgcgcagtttgtggcggtggcggccatgtttatcgatccagacctgacgcaaaacagctggcggctggtactcacccgggacgaacttgatccggcgaggccgcgcattatcgaagccagccaaaatcaactgacgctgcacccgtttaaggagaagtga

SEQ ID NO: 139025 - DNA, 903 bp, Enterobacter cloacae
atgggctttccggctggcgaaatccgcggaatggacgatcctgaaccgccccgtccgccggcggttcgcgtgacttttatgggactctacggcgtggaatccccgctgccgacccactatagcgatgacattgcgcaacggcgggaaggcgtcgaggccaccgaggatttcctcgatatctttaaccatcggctgatcgcccagtattaccgtatctggcgcaaatattcctacccggcaacctttcgggcgggcggcacggacaacatctcgcagtatttgctgggcctggcggggctgggtataccgggatgtgccgccgttgccgcagcgccgctgtcgcgatttctggcgctgctgccggtgatgatgctgccggggagatccggggaaggcatggaggcgctggtggcgctcctggccccggggacccgggcgacggtgtaccaccacgatccctgccggatccccttgtcgcagccgttaacgatgagcgtccgtcagccggttagcctgcaacataggccagtgatgggaacccacgccacggatgtgaacggtcaggtattgctgcagctggccacggaaaagcctgatgaggttcgcggctggctgcccggcggcgaactgttcagcgacatgatggcgcttctgcacgtctggctcggatctcatcttgacgtgcggctgcagctttgcgtcgcccgccatttactgccggatgcgcaactttgctgccagcaggagcatgccgtccagctcggccgtaccgctgtgctgcgtccgctggatgcgcagaaacaggctgacgacagagtcacgatttatctggggcgctatcagcgcgtccgggaaaatatccaccgcagggagagcgatgaagatggcgattaccgcagttaa

SEQ ID NO: 139026 - DNA, 618 bp, Enterobacter cloacae
  misc_feature (552)..(561): n is a, c, g, or t
atgacccatgcacatgaggcggtaaaaacccgccataaggagtcttccctcgtctttccggtgctggcgctggcggtgctgtttttctggggcagcagccagtcactgccagtggttatcgcgatcaatatcctcgcactggtcggcattttgagcagcgccttcagcgtggtccgccacgccgacgtcctcgcccaccgcctgggcgaaccctatggctccctgattttaagcctgtcggtggttatccttgaggtcagtttgatctctgccttaatggccaccggcgacgccgcgccgaccttgatgcgggatactctctactccattattatgatcgtcaccggcggtctggtcggtttctctctgctgctgggcgggcgtaaattcgccacccaatatatgaatctgttcggcattaagcagtatcttatcgccctgtttccgctagcgattatcgtgctggtctttccgatggcgctgccgggcgcgaacttcagcaccggacaatcgctgctggtggcggtaatttcggcggccatgtacggcgtnnnnnnnnnngtacggcgttttcctgcttattcagaccaaaacccatcagagcctgtttgtttatga

SEQ ID NO: 139027 - DNA, 417 bp, Enterobacter cloacae
gtgcacctggtggcagtgatcgcggttaccaaaatgaacgctaacccgctggaaacgctgttgaccagcatgaatgccccggtggcctttaccggcttcctggtggctctgctgatcctgtcgccggaaggccttggcgccctgaaagcggtgctcaacaatcaggtacagcgggcgatgaatctgtttttcggctctgtgctggccaccatctcgctgacggtcccggtggtcaccctcatcgccttcctgaccggcaatgagctgcgctttggccttggcgccccggagatggtggtgatggtcgcctcgctggtgctgtgccatatctccttctccaccggacgcaccaatgtgctgaacggcgcggcccacatggcgctgttcgccgcctatctgatgaccattttcgcctga

SEQ ID NO: 139028 - DNA, 855 bp, Enterobacter cloacae
atgaaacaaaaagtggttagcattggtgatatcaacgtagcgaacgacctgccgttcgtgctgttcggcgggatgaacgtgctggagtcgcgcgacctggcgatgcgtatctgcgaacattatgtcaccgttacgcagaagcttggtattccctacgtcttcaaagcctcctttgataaagccaaccgttcctccatccactcctatcgtgggccgggtctggaagaagggatgaagattttccaggagctgaagcagacctttggcgtgaaaatcatcaccgacgttcatgaagccagccaggcgcagccggtagctgacgtggtggacgtgatccagcttccggctttcctcgcgcgccagactgacctggtggaagcgatggcgaagaccggggcggtgatcaacgtcaagaagccgcagtttgtcagcccgggtcagatgggcaacatcgtcgataagtttatcgaagggggtaacgacaaagtaatcctctgcgaccgcggcgcgaacttcggttacgacaacctggtcgtggatatgctcggcttcggcgtgatgaagaaagcctccaacaactcgccggtcattttcgacgtcacccacgcgctgcagtgccgcgacccgtttggcgcagcctccggcggtcgtcgtgcgcaggtgagcgagctggcccgcgccggtatggcggtaggtatcgccggtctgtttattgaagcgcatccggatccggaccacgcgaaatgcgacggcccgtccgcgctgccgctggataaactggagccgttcctcaaacagatgaaagcgattgacgatctggtgaaaagcttcgacgagctggataccagcaagtaa

SEQ ID NO: 139029 - DNA, 813 bp, Enterobacter cloacae
atggggtcattagcggatttcgaatttaacaaagcgccattgtgtgatggcatggtcctcatttctgaacaggtccgcgacgattttccgtcgcgttttgtcgaggaagagctgcagcgattgctgcgcctcgcgcaggaggagattgcgccgtcgtgggaccaggagcgccagatagaacgattgctggagctgttttatgacgagtggggctttggcgcctcgcagggcgtgtatcgtctttccgacgcgctatggctggataaagtgctggttaaccgccaggggagcgcggtgtcgttaggcgcgatcctgctgtggatcgcccagcgcctggcgctgccggtggtgccggtgatcttcccgacccagatgctgctgcgtgcggacccggaaaccagcgaagagatgtggctgattaatccgtttaacggcgagaccctcgacgagcataccctggaggtatggctcaagggcaacatcgggccggtggcggaactgtttaatgaagatctcgacgaagcggataacgccgaggtgatccgcaagctgctggacaccctgaagtcggcgctgatggaagagcggcagatggagctggccctgcgcgccagcgaagcgctgctgcagtttaatccggaagatccgtatgagatccgcgaccgcgggctgatatacgcccagctggactgcgatcacgtggcgctgttggatctgagctatttcgttgagcagtgcccggaggatccgatcagcgagatgatccgtgcgcagatcaacacgatttcgcataaacaaattacattgcattag

SEQ ID NO: 139030 - DNA, 393 bp, Enterobacter cloacae
atgaacttattcacggctgtcctctacctgcacattgccacagtggcggtgtcggtaggattgttcgttttacgttactggtggatgtatcatcagagcccgctgctgaaccagcggtgggtgcgaattgcgccgcactgcagcgatacgctgctgtttctcagcggcgcggggttaatggcgataacgcactacctgccgttcacagaagacggcgcatggctgactgaaaagctgtttggcgttatcatttacatcgcattaggttttatcgcgttgggccgtcgtcgtccgcgcagccagcagagccgctttatcgcgttcctgctggcgctggtggtgttgtttatcatcattcaactcgccatcacaagaataccgatactggggtag

SEQ ID NO: 139031 - DNA, 849 bp, Enterobacter cloacae
atgacctttcaggcctggctgcagcaggcgatcgcccgcctggcggagagcgacagcccgcgacgcgacgccgagatcttgctgggacacgttaccggccgggcgcgaacctggattttggccttcggtgaaacgacgctttctgctgacgaggcggcgaggctggaggcgctcctggtgcgacgccagcgcggggaacctattgctcatctggtcgggcagcgcgagttttggtcgctgccgctgttcgtctccccggcgacgctgatcccccgcccggataccgaatgtctggtagagcaggcgctggcgcgtctgccaaccgcgccgtgccgtattctcgacctcggcaccgggaccggcgccattgccctggcgctggccagcgaacgtccggactgtgaggtcaccgcggtggacgtgatgccggacgccgtggcgctggcgttgcgcaatgccgaacatctgagcatcgctaatgtgacgataagtcaaagcgactggtttagcgcgctggccgggcagcgcttcgccacgatcgtcagcaatcccccctatatcgacgcctccgacccgcatctcgccgaaggcgatgtgcgctttgagccgttgacggcgctggtcgcaggcgaccaggggctggccgatctggcgcatatcatccgcgagggacggcagtatctgcagcccggcggttggatgctgctggagcatggctggactcagggcgaggcggttcgcgcgctgttccgcgaagcgggctatctggacgtcgcgacctgtcgcgattatggcgacaatgagcgtctgaccctcggacgtttacccgacatggagaatgttggctga

SEQ ID NO: 139032 - DNA, 1083 bp, Enterobacter cloacae
atgaagtcttctattgttgccaaactggaagcgttgtacgagcgccatgaagaagtgcaggcgctgctcggcgatgccgcgacgattgccgatcaggataaattccgcgcgctgtcgcgggagtatgctcaactgagcgatgtggcgcgctgctataccgactggcgtcaggtgcaggaggatattgaaaccgcgcagatgatgctcgacgatccggaaatgcgcgaaatggcgcaggaagagctgcgtgacgccaaagaaaaaggcgaccagctggagcaacagctgcaggttctcctcctgccgaaagatcctgatgacgagcgtaacgccttcgtggaagtgcgcgccgggaccggcggcgacgaagcagcgctgtttgccggcgatctgttccgcatgtacacccgttacgcagaatcgcgccgctggcaggtagagatcctcagcgccaacgaaggtgagcacggcggctttaaagaggtgatcgccaagatcagcggcgacggcgtttacggtcggctgaaatttgaatccggcggccatcgcgtgcagcgtgtgccggccaccgaatcgcaggggcggatccacacctccgcctgtacggtggcggtgatgccggagctgccggaagccgaaatgccggacattaacccggcagatctgcgcatcgataccttccgttcctccggggcaggcggtcagcacgttaacaccaccgactcggctatccgcattacccacctgcccaccggcatcgtggtggagtgccaggacgaacgttctcagcataaaaacaaagccaaggcgctgtcggtgctgggcgcgcgcatccgcgccgccgaagtggccaaacgtcagcaggcggaagcctccacgcgccgcaacctgctgggcagcggcgaccgcagcgaccgcaatcgcacctataacttcccgcagggccgcgtgaccgaccaccgcatcaacctgacgctctaccgtctggatgaggcgatggagggcaaactcgacatgctgattgagccgattgtccaggaacatcaggccgatcagctggcggcgctgtccgagcaggaatga

SEQ ID NO: 139033 - DNA, 570 bp, Enterobacter cloacae
gtgatagccctcagcgatatcgacgaacggctgaaagaggccgacatcattatcagctccaccgccagcccgctgccgatcatcggcaaaggcatggtggagcgtgcgcttaaggcgcggcgtaaccagccgatgctgctggtggatatcgccgtcccgcgcgacgttgaaccagaggtcggcaaactggctaacgcctacctctacagcgtcgacgatttgcaaaacatcattcagcataacctggcgcagcgtaaggctgccgcggtgcaggcggaatcgatcgtcgagcaggaaaccagcgaatttatggcctggctgcgcgcgcagagcgccagcgagaccattcgcgaataccgttctcagtctgagcaggtccgtgaggagctgacggcgaaagcgctggccgcgctggagcagggcggtgatgcccaggaaattttgcaggatctggcgcgcaagctcactaaccgcctgatccacgcgccaaccaaatctcttcagcaggccgcccgtgacggggacgacgaacgtctgcatattctgcgcaacagcctcgggctggaatag

SEQ ID NO: 139034 - DNA, 237 bp, Enterobacter cloacae
atgacaaaaggtataaaaattttcatcactgtagtcttcgtgattctggcattgttgagcggcatgatgagcttcatgatcgtcggaatgggggtcagcggtagtggctgtggtcaggagtgttttgataatatggattctgcaaaattcattagtattatattctggatattggctatcataagcggtatcttcgctttcatggacaatggcagcccaaaaaaaaatcctcagtaa

SEQ ID NO: 139035 - DNA, 942 bp, Enterobacter cloacae
atgacgatgcggcgtgtgaaattactctgtactgcgctgatgctgcttgccagtcacggcgcgctggccgtcagctatccgctgccgccggaggggagccgtttggtgggcagcgcatttaccattgccgttccggagaataacacccagccgctggaaagttttgccgcccagtacggccaggggttaagcaatatgctggaagccaaccccggggtcgatgtctatttgccacgctccggttcgacgctgactattccgcaacagctgatcctgcccgacaccgtgcgcgaagggatcgtgatcaacgttgccgaaatgcgtctctattattacccgccgctgggcaatagcgtcgaagtcctgccaatcggcattggtcaggcgggacgcgaaacgccgcgtaactgggtgacggcagtagagcgtaagcaggaaggccccacctgggtgccaaccgccaatacccgccgcgagtatgcgaaagagggcaaaacgctgccggcgatggtgccccccgggcccgataatccgatggggctgtatgcgatctacatcggcaggctctacgccatccacggtaccaatgccaactttggtatcgggctgcgcgtcagccagggatgcatccgcctgcgcaatgacgatattaaattcctgtttgataacgtgccggttgggacgcgggttcagctgatcgatcagccggtgaagtacagcgtggagccggacggcagtcactggctggaggtgcacgagccgctgtcgcgcaaccgcgcggagtttgaatccgacagaaaagtccccttgccgatgacctcggcgctgcgcgactttacccaggggccgggagtgagccctgcccaggtcgagcagaccctgcagcgccgctccggcatgccggtgaatatcagcgccacagcggcgcagggaagtttgtag

SEQ ID NO: 139036 - DNA, 951 bp, Enterobacter cloacae
gtgaacttccagcagctgaaaattatccgtgaggcggcccgtcaggattacaacctgacggaagtcgcgaatatgctctatacctcgcagtcaggcgtcagtcgccatatccgggaactggaagaggagctggggattgagatctttatccgccgcggcaaacgcctgttaggcatgaccgagccgggtaaagcgctgttatcgattgccgagcggatcctcaatgaagccagtaacgttcggcggctggcggatctcttcactaacgatgcgtcaggcgtcttaactatcgccaccacccatactcaggcgcgctacagcctgccgccggtcattaaagctttccgcgagctgttctcagatgttcgcgtcgagctggtgcagggtaccccgcaggaaatcgaagcgctgctgcataacggcggagcggatatcggcatcgccagcgagcgcctgagcaacgatccgacgctggcggctttcccctggttccgctggcatcacagcctgctggtgccgaaggatcatcctttgacgcaggtttctcccctgacgctggaggcgatcgcccgctggccgttaatcacctaccgccaggggatcactggccgttcgcgcatagatgaggcgttcaaccgcaaggggttgatgccggatatcgtgctgagcgcgcaggattccgatgtgatcaagacctatgtggagctggggctgggtgtcgggctggtcgccgagcagtccggtgatgcccgggaagcggacacctttacgcgtcttgatacccgccatctgttcgatgccaataccgtgtggttgggactgaagcggggccagctgcagcggaattacgtttggcgctttatcgaattgtgcaatgccggactgtcgctggatgagattaagcgtcaggcgatggagccggaagaggccgcaatcgactatcagatttaa

SEQ ID NO: 139037 - DNA, 918 bp, Enterobacter cloacae
atgaacttaagacgactgaaatattttgtgaaaatcgtcgatatcggcagtctgacccaggccgctgaagtcttgcatatcgcccaaccggccctcagccaacaggtcgcgaccctggaaggtgaaatggaccagcagttgctgatacgcaccaagcgaggggtcacgccaacggaagccggtaaaattctctacacccatgcgcgcactatcctgcgccagtgcgagcaggcgcagctggcggtcaataacgtcggccagacgctgcgtggtcaggtgtcgatcggcctggcgccgggcaccgcggcctccgccattaccatgccgttgctgcaaacggtgcgcaatgagttgcccgaggtgatggtctatctgcaggagagcagcggcacagcgctgaatgacaagctgctggcgggccagctggatatggcggtgctttatgagcgttcgccggtggcaggcatcgtcagccagccgctgctgaaagaagacctttacctggtcggcacccgcgactgcccggggcagagcgtggatctcactgcggtggcggagatgaacctgttcctgccgcgcgattacagcgcagtgcgggcgcgggtcaccgaggcattcaccctgcgtcgtctgtcggcgaaaattatcggcgagatcgaatccatcaccaccctgaccgcggccatcgccagcggcatgggggcgacggtgttaccggaatccgctgctcgttccctgtgcggggcggcgaacggctggatggcgcggatcagcacgccttcaatgagcctgtcgctgtcgctgaacatgtcggctcgcggcagtctgtcgccgcaggcgcaggcggtgaaagagatcctgctgtctctggtgagccgcccatcgctggaaaaccgtgaactgcagctggtcagttag

SEQ ID NO: 139038 - DNA, 1635 bp, Enterobacter cloacae
atgtcgctaattgctatcgtgctggtctttatcatggccatcgtggtgaccgtgttcctgtcccatcttctgcccgttaaagtgccgctaccgctgatccaaatcgccgcgggcgccgcgctggccgccagtggctttcaggtcgattttgacccgcatatttttttactgctgtttatcccgccgctgctgttcctcgatggctggcgcatccccaaagacgcttttttccgcgatatgaagccgattttatcgctggcgataggcctggtgatggtgactattctcggtattggcctgtttattcactggctgatcccggctatcaccgtggcggcagggttcgccctcgcggctattctgtcgcctaccgatccggtggcggtatcggcaatgaccgccagctcgccgcttccctcaaggatggcgcatattctcgaaggggagtcgctgttaaacgatgcttcagggctcgtcgcctttaatttcgccatcgccgcggtgctgaccggcagcttctccccgggagacgcggtggtgaaatttttcctgatggccttcgggggcatcctcagtggcctcgtggtggtgtgggtcaccggcaaatgtaataactttctggttcggcgcacccgcgaggagccagccatccagatcctgatcagcctgcttatccctttcgccgcctacctgctggccgaggcgttccatgtctcgggcattcttgccgccgtcgccgccggcattgcgatgcattatgagcagctgtcggggccccggcttccggcgacgcgcatgaaaagcagcgcggtatggtccatgctgcagaccaccctcaacgggatgatctttctgatgctgggcgagcagctgccgcgcatgctcaggacgctgccggcggtagccagccaggccggcgtatcttcgccctggtatctgctgctgtacgccgtggccatcaccctggcgctcggtctgatgcgcttcgcctgggtatggctgtcgatgaagctgacaatttttcgccgtaaacgtcggggcaaggccatcaccgtccgtccacgattcagtatcctcgccgtcatggcgctggcgggagtgaagggctctgtgaccctcgccggtattctgacgctgccggtggtgctggcagatggttcgccgttcccgggccgtgaactactgatctttctttcgatggcggtgatcctgatgtcgctggtggtggcggctatcggtttgccgtttatgactcgttatcttgccgatgatctaccgcatgacaccggtaaggacgacattggcgccgtgatgaccgaggtggccattaaccgtcttaacgcgctactggacgagacggtagaggatcccagtgagcaggccctgcgggccgatgccggcaatatgctgctcgagacctatcagcggcggcttcactataacgacaatgacgaggggcaggatgtcgggctggagctggctaagcgcgccaggctggagaaatatatgcaacgagaggtcattatcgcccagcgtcaggagctgttccggctgcgccgcgcccataacatcagcgatatcactttttatgaggtgctgcgggagatagatctgaaggaagagagtttacgctaa

SEQ ID NO: 139039 - DNA, 519 bp, Enterobacter cloacae
atgaaaaaattatcagcagctgcgtttgcatttggtctgttatctgtgtctgtatctcaggcattggcggcggatgccaccgttaacttcagcggaaccattcttcaggaagcctgcagtgtagatacttcagacaatactgttaacgttcagctaggcacctacggtgctgctcaattcccgacggtagggacaacgacccttcctgttcctttcgccatcaacttaacgggttgtccggcttcaggtggcccgacggctgcactggtgaccttttcaggggccgcggatgcggccggtgacctggcgttgaccgcaggcggcgcatcgggcgtttccattaatatcaaaaaagcagatggtaccaacattgatattaactctaccgattccggtattgcactgactagcgctacgacccaacagctccgctttaccgctaattacatcagtactgcggcttctgtcaccgcaggcgcggctaacgccgtcgcccaggtaaacatctcgtatatgtaa

SEQ ID NO: 139040 - DNA, 699 bp, Enterobacter cloacae
atgaaagcgttacttgttttatctttaatgacgtcatgtttgattttttcaataaatagtcatgcggcggtttcggtcggcgggacccgcctggtttttcatggtgatgaaaaagaagcatcgattactgtaagcaatacggacaagggcattcccgttcttattcagtcatgggtggacgaaggggagaatagcaaagctaaggctccgtttatgattaccccaccattgtttcgtcttgagcccggccaggacaatactttgcgcgcggtttttacgggggcaaaccttgcgcaagaccgtgagtcattattctggctaaacattaagacgatcccttcagttaaaaaaaacgaggtacaggcaaatacattgcagttggcgatcaaaaaaaggctgaaatttatttatcgtccttcagctgtaaaaggcttgcctgaagaaaacgcggataaacttgtctggaaaaaaatcggtaaccagattcaggtgactaacccaacgccgttttacatgaacttcagcgtcattacggtgggcggaaagacgtttaaacccaccttgccagagcagacctatgtggcaccagcaacagaacggctatttaccattcctgcaggagcagtcggtaacactattagctggaaaataattaacgattacggtacgagtggcaaagagtttcactcaaaatattaa

SEQ ID NO: 139041 - DNA, 2484 bp, Enterobacter cloacae
atgatgtctgcgctattcaatgctccagccatatcgtttgcggatgagttttttaatcctgctttgcttgaggttcgcgaaggagaaggtgcgccgacgacagacctctccgtatttgaagtcgtcaatggacagccagcaggaaactaccgggtagatatctacgtcaataacgaaatggtgaccgcagatgcccgcgatgtgatgttttcaaagaaccaggatggaaagctggagccctgcgtcacgttggcagaactcagccaatggggagttgatacggcctcatttccagaactcgccgtcagtgatagcgaatgcgccaatcttgcgggcatccctgatgcatttgccgacttccagtttaaccgccaaaagctgaatctgagtatccctcatgcggcaatgaatacgcgcagcctggatgaagtgcctattgaacgttgggatgaaggtattccagcccttctcctcaattacaacatgaatagctatcagagccgatataagggtgcagaaacttacgaaagcacgtatttgaacctgcgtcccggtctcaatatcggtccctggcgtctgcgcaactacaccacctttgagcatagtaatcagagtggaagtaaatgggacaacgtctatagctatcttcagcggaatattgtctctttgcgaagccaactgacgttaggcgacagttcagcaccagctgatgtcttcgatagcgtgccgtttcgtggttttcagatggcctcggatgatgacatgctgccttccagcgtacgtaactatgcgcctgtgattcgaggggttgcccgcagcaatgctctggtcaccatccgtcagaatggttacgttgtctatgagaccaaagtggcgccgggggcgttcgagatctccgatttggcctccaccggaggagcaggcgatcttgacgtgaccatcaaagaagccgacggcagcgagcagcacttgcgcatcccctacgcatctttgcctgttctgcagcgtgaaggtaagtttcgctatagcgttacgggcggtcaattccgcgcctacgattctcacacggaaaaaaacctgtttgttcagggcaccggaatttatggccttccgtggggctttacgctctacggcggcgtgcaaaacgcaggcaataaatatcagtcatatgcgttgggggtgggtaagaatatcggtagctggggcgccttttccgccgacgccatccattcccgatccatgtcgaccgatgccggcaggcaacagggccagtcgctccgggtacgctatagcaaaaatttcctgcagacgggaacaaattttaccatcgccggctatcgctattccacctccggatttcgctcgctggaagaaacgctgggtacctaccgtagcgataataacattccttcttatatcaccgatcgccggcgtaaccgggctgagctgtcgctgaatcaggatcttggcgataactttggggcgttgaatgcatccttgatcagcgaggattactggcagaacgaacgtaacagcctgtcggcaaatctgggctattacaaaaatttcaacgcgattggtatcagtctgaactactcctggaaccggaataccgggctctatggccatgccgaacaggataatgtggtctcctttgagatcaatgtgccgctggataaattcctcaaccggacatacgcctcatacgggacaacccatgcgagtggaaacggaaccagccacaacctccgactgaatggttcagcctttgatgatgccagtcttgactgggggataaacgcgacgcttgcggggcgcagcgaacaacaagtcgtcgggggtaacgtcagctggaaggcaagccacggaacgttaaatggttcctacagccgcagccgcgacagccaacagctggggtatggcatagccggtggggtagtgattcatgagaatggtatcacgctgtcccaatccctgggtgaaactattggtttagttaaggctcctggcgcagaaggcattggcgtcaataactacgccggtatctctacggatagtcggggttacgcggttgttccgtatctgaccccctatcgccgcaatgatattagcctgaatagtaaaaccctgcgggacgataccgatatcacctatatgaccaataaagtcgtccccacccgcggggctatcgttagagcagagtataaaaccgccattggccaccgtgtcctgatgacgttaacgcggcctgggggaaaaccggtcccctttggcgcgatggcgtcgctgcttaaaagtgaagaaaacgcgtcaattgtcggtgacggcggagaagttctgctgagcggtttaccgcaaaaagggacgctgcaggtgaaatgggggaatggccaggggcaggaaaccacctgtcgggcggattatatagcccataaatctgctggcgcgtccggtctctggaacgcgacgagcgtctgtcaataa

SEQ ID NO: 139042 - DNA, 1155 bp, Enterobacter cloacae
atgaagtggtttgtttttatgttcgcggcaatcgcggcgacgctgatggtcacccctgaggctaatagcggatcgtttgatccggtaactggtgcttatactacggatccgataaccgtcacgctgacgccaaagaccgtagctgtcagcacgtcggtaatcgcgaatggtgaaagggtttactgggccactgagaaatatccccaaggagcaggtacgttttactggggatcgcatacctacaccttggaaagtgcctctgacgtcacattagccattcccggtataaatgccagcggagtctgtactgcaaccggcagcggtacatctcttaccataaacggatgtttttccttttcacataatggcacgatctacatgggaaaaagcgcctcttgtaaatccttttttagtttacagagcaatttaagttctttaacgaattttggcgattttgtcgcacttactcttggccctggtacaaacactatccagttgaacaagacaggtataacagacgtcaatactacctctttcacctatccaagtacgactcgatcaacaagttaccgctggacaacttacgatataaatctacaggcaacactatctgccaaaacgccgccttatacctatctttactgcagcgtatcgcaaggcctccgggtcataatgaccactgggggagtagttcctaatccttttgcgatggtgcctgcggctagtaaacccgcgtattccccgacgattagttactcgccagcgctccctatcatcaatactatcgccgtaaatatccgtaatatcaccgcgattgacattctcccaaggacggtatttaacaccgggactatctccgcctggcgtacaacctatatggaacaaccgcttaccgtaaccgggcaggggaatatcacccgcgattttggcgcatcccagaactttaacgttcttgaatcctggacctgcgcgacaacagggcaaatcgattttcgaataatgcgcgacaataccaacgccaacgtctgttcgggggcgacctatacccatccggtgcagacgccacagtcgttgacggcgcagtggaaagcgcaaagttcgaccgcatcaggcgcatggagcgccagggctacggtgacctttacgctgccgtag

SEQ ID NO: 139043 - DNA, 420 bp, Enterobacter cloacae
gtggttgagtggctgcgccagcgctcccgtccgtatctgttctccaactctctggcgccggccatcgtggccgcctccatcaaagtgctggagatggttgaagagggggcagacctgcgcgatcgcctgtgggctaacgcgcgtctgttccgcgaaaaaatgaccgcggcaggcttcacgctggccggcgccgaccacgccatcattccggtgatgctgggcgaggcggtggtggcgcagaactttgcccgcgagctgcagaaagaagggatctatgtcaccggcttcttctatccggtggtaccgaaaggccaggcgcgtattcgcacccagatgtcggcggcgcatacccctgaacaaattgagcgtgcggtggaagcctttacccgcatcggcaaacaactgggcgtcatcgcctaa

SEQ ID NO: 139044 - DNA, 1026 bp, Enterobacter cloacae
atgaaagcgttatccaaactgaaagcggaagaaggcatctggatgaccgacgtaccggaaccggaagtcggccataacgatctgctgattaaaacccgcaagaccgccatttgcgggaccgacgtgcacatctacaactgggatgagtggtcgcagaagaccattccggtgccgatggtggtcggtcacgaatatgtcggcgaagtggtggggattggtcaggaagtgcgcggctttaagattggcgaccgcgtctccggcgaagggcatatcacctgcggccactgccgtaactgccgcgcgggccgcacccatctgtgccgcaacaccatcggcgtgggcgtcaaccgcccgggctgctttgctgagtatctggtgatcccggcctttaacgcctttaaaatccccgacaatatctctgatgacctggcgtctatcttcgacccgttcggcaacgcggtgcacaccgcgctctccttcgatctggtcggggaagacgtgctggtttccggcgccggtccgatcggcgtgatggcggcggcggtagcgaaacacgtcggcgcgcgtaacgtggtgatcaccgacgtcaacgagtaccgtcttgagctggcgcgcaaaatgggcgttacccgcgcggtgaacgtggccaaagagaaccttaatgacgtgatggccgagctggggatgaccgaaggtttcgatgtgggtctggagatgtccggcgcgccgccggcgtttcgcagcatgcttgataccatgaaccacggcggccgtatcgcgatgctgggtatcccgccgtcggatatgtccatcgactggaccaaggtcatcttcaaagggctgtttatcaaaggtatctatggtcgcgaaatgttcgaaacctggtacaagatggcggcgctgatccagtctggtctggatctctcaccgatcatcacccaccgcttcggcattgatgacttccagaaaggttttgacgcgatgcgctccggccagtccggtaaagtggttttgagctgggactaa

SEQ ID NO: 139045 - DNA, 789 bp, Enterobacter cloacae
atgcttaaactctccgtatgcttactgacctgtaactctgcgcgcctgctgatggaggtgctgccgcctctgctgaaggttgccgatgaatgtatcgtcgtcgactccggcagtaccgacgaaaccgtcgctatttgccagcagtttggtctcaccgtccatcaccatgcctataaagcccacggcgcgcagatgaactatgccatcgggctggccagccatgactgggtgctgtgcatggacagcgacgaaattcttgataatgacgtggtgacggccattcaggcgctaaaagcgggggaggagcctgacccgacctgcgcctggcgtctgccgcgctactggtttgtgctaggcaaacaggtacggactatctaccccatttcctcaccggattatccggtgcgcctctttaaccgccagcaggcgcggtttaacgatcggccggtggatgaccaggtggtcggacacgcgagctccgtcaggctgccgggcttcgttcgccacgataccttttattcgctgcatgaagtgtttaataagctgaacagctataccacccggctggtgaagtaccagcagatcaaaccttcgctgacgcgggggatcgtcagcgccattggcgctttctttaagtggtatctgtttagcggggcgtggcgctatggcaaggtcggcgtggtgaccggcctgtacgcgacgttttacagctttctgaaatattttaaggcgtggtacgcccacgaagataaccaggcgcccgtcgcgcaaaagcgaacggacccctga

SEQ ID NO: 139046 - DNA, 948 bp, Enterobacter cloacae
ttgcttcaatttcgcgcaattgctcttgccgtagccggttcgctggctctggcggcgccagcgttcgctggcaaactctccatcgttattgacgattttggctaccgcccgcagaccgagaatcaggtgctggcgctgccggcaactatctccgtcgccgtgctgccgaacgcgccgcacgcccgggaaatggccactaaagcgcataatcagggccatgaagtgctcatccacctgccaatggcgccgctcagcaaacagccgctggaaaaagacaccctgcgtcccgaaatgagcagcgaggagatcgagcgcattattcgcgaggcttacggcaaagtcccttacgccgtcgggctgaataaccatatgggcagcgcgatgacctccaacctgtttggcatgcagaaggtgatgcaggccctggagcgctacaatctctattttctcgacagcgtcaccatcggcaatacccaggccatgcgcgccgcgcagggtaccggcgtgaaggtgattaagcgcaaggtgtttctcgacgatacgcagaatgaagccgatatccgcaaccagttcaatcgcgccatcgccctggcgcggcgcaacggttcggcgatagccattggccatccgcatccgacgacggtgcgggtgctgcagcagatggtctataacctgccgccggatatcacgctggtgcgcccgagcagcctgctgaacgagccgcaggtcgacaactcgacgccaaactacgcccagccgcccgcgcaacaaacgcagcagaagccgcgtaatccgttccatggcgtgaagtcttgcaaaccgaagcgcccgctggagcctgtgaacgccagccgcttcttcactatcctcagcgatagcatcagccagagcgcgctgatccagtactatcgcctcaaatggcagggctgggacaaccccggcaactag

SEQ ID NO: 139047 - DNA, 1257 bp, Enterobacter cloacae
atgtattcaactacatggatcgcagcggcagttcgatccgtcctttacgccagcgcgctcagcgctggcgtattgctgtgcgcgtcatctgcgcatgccgacgatcgcgatcagctaaagtccatccaggccgacatcgccgccaggcagcgggcgattaagcaacagcagcagcagcgcgcaagcctgctcgcccagctcaaagcgcaggaagaggcgatcgccgccgcggcccgcaaactgcgcgaaactcaggatagcctgaaccagctcaataagcagattgacgagatgaacgccgctctcgcgaagctggagcgccagcgcgcgtctcaggagcggaacctcgccgcgcagctcgatgccgctttccgccaggggccgcataccggcatccagatggtgctcagcggtgaagagggccagcgcaatcagcggatgcaggtctatttcagctatttcaaccaggcccgccaggagactatcgcggagttgaagaaaacgcgcgaagagatggcggtgcaaaagtcgatgctcgaagaaaaacagagccagcagcaaacgctggtctacgagcaaaaggcccagcaggcgaagctggagcaggcgcgtaacgaacggaaaaagaccctttccggcctggagtcttccattcagcagggtcagcaacaattaagtgaattacgggctaacgaatcgcgcctacgcggtcgtatcgcccaggcggaagctgccgccaaagcccgcgccgatcgggaagcacgcgacgcacaggcggtgcgcgaccgccagcaggaagcatcgcgcaaaggcaccacctataaaccaacggaaagtgagcgttcgctgatgtcacgcaccggcgggctgggctcgccgcgcggtcaggcgttctggccggttcgcggtccgctccttcatcgatatggcgaacagctgcaaggtgaactacgttggaaagggatggttatcgccgcgtctgaaggcaccgaagtcagagccattgccgatggtcgggtcattctggccgactggctgcagggctatggtctggtggtggtggtcgaacatggcaaaggcgacatgagcctgtatggctataaccaaagcgcgctggtcagcgttggcacccaggtgcgtgccggccagcctatcgcgctcgtaggcagcagcggcggtcagggccgtccgtcgctctatttcgaaattcgccgccagggtcaggcggtcaatccacagccgtggttgggaagataa

SEQ ID NO: 139048 - DNA, 1191 bp, Enterobacter cloacae
atgtcgccaggcggcgtccacagccacgaagatcacatcatggcgatggtggagctggcggcagagcgcggcgctgagaagatctacctgcacgccttcctcgacggccgtgatacgccgccgcgcagtgcggaaaaaacgctggcgacattcgaagccaaatttgccgcgctgggcaaaggtcgcatcgcgtcgctcatcggccgctattacgccatggaccgcgacaaccgctgggatcgcgtggaacaagcttatgatctgctgaccctggccaaaggcgaattccaggccgataccgccgtcgcgggtctgcaggccgcctacgcccgtgacgaaaacgacgaattcgtgaaagccaccgttatccgcgccgccggccaggccgatgccgcgatggaagacggcgacgcgctgatcttcatgaacttccgtgccgaccgcgcgcgtgaaatcacccgcgccttcgtcaacgccgacttcgacggctttgcgcgtaagaaagtggttaatctcgatttcgtgatgctcaccgaatacgccgccgacatcaaagtcgcctgcgcctacccgcccgcctcgctggccaatactttcggcgagtggatggcgaagcacgataaaacccagctgcgcatctccgaaactgaaaaatacgctcacgtcaccttcttcttcaacggcggcgtagaagagccgtttaaaggcgaagagcggatcctgattaactcgccgaaagtggcgacctacgatctgctgccggaaatgagctccgccgagctgactgagaaactggtcgccgccatcaaaggcggaaaatacgacaccatcatctgtaactacccgaacggcgatatggttggccataccggggtgatggaagcagccgtaaaagcggttgaagcgctggatcgctgcatcgaccaggtggctcaggcggtggaatccgttggcggccagctgctgatcaccgccgaccacggcaacgccgagcagatgcgcgacccggccaccggccaggcgcacaccgcccataccaatctgccggttccgctgatctacgtcggtaataaagcggtcaaagcggtcaacggcggcaaactttccgacatcgccccgaccatgctgtcgctgatgggaatggaaatcccgcaagagatgactggcaagccgctgttcatcgtggaataa

SEQ ID NO: 139049 - DNA, 459 bp, Enterobacter cloacae
atggaaaattatcagatcgacaatctggaccgcggcattcttgatgcgctgatggccaacgcccgtaccgcctatgccgaactggccaaacagttcagcgtcagcccgggcaccattcacgtgcgcgtcgaaaagatgaagcaggcgggtatcattaccggcgcgcgcattgacgtcagccccaagcagctgggctacgacgtcggttgcttcatcggcattattttaaaaagcgccaaagactatccctccgccctcgcccgcctggaaagtctggaggaggtcaccgaggcttactacaccaccggccactacagcatctttattaaggtgatgtgtaaatccatcgatgctctgcagcaggtacttatcaacaagatccaaacaatcgatgaaattcagtccactgaaactctgatcgtgctgcagaacccgatcatgcgcaccatcaagccctga

SEQ ID NO: 139050 - DNA, 441 bp, Enterobacter cloacae
atggcagacattacacttatcagcggcagcaccctgggcagtgcggaatatgtagcagagcatctggcggaaaagctggaagaagccggctatagcactgaaatccagcacggtccgctggtggacgatctgcaggcgcaagggatctggttaattatctcttccacccatggcgccggcgacattcccgacaacctggttcccttctatgacgcgctgcaggagaagcaggccgatctttccgccgtgcgctttggcgctatagggatcggcagccgcgaatacgacaccttttgcggcgcgatcgataaattagaagcggcgctgaaggcctgcggggcaaaacagatcggtgagacgctgaagatcaacgtccttgaacacgaaattccggaggatccagctgaaatctggctgggatcctggaaaaatttgctctga

SEQ ID NO: 139051 - DNA, 1890 bp, Enterobacter cloacae
atgttttatcaggatccttttgacgtcattatcattggcgggggtcatgcaggcactgaggccgcaatggccgcagcgcgtatgggtcaacaaaccctgcttttgacacacaatatcgacacgctggggcaaatgagttgcaacccggcgattggcggcattgggaaaggacacctggtaaaagaagtggatgcgctcggcggtttgatggccaaagcgatcgatcaggcgggcattcagtttaggatactaaacgccagcaaaggaccggcagtacgcgccacccgcgcccaggctgatcgcgtgctttatcgtcaggcagtacgtaccgcgctggagaaccagccgaacctgatgatcttccagcaggcggttgaagatctgattgtcgaaaacgatcgcgtcgtgggcgccgtcacccagatgggcctcaaattccgcgctaaagcggtagtgctgaccgtcgggaccttccttgacggcaaaatccatattggtctggacaactacagcggcggccgcgccggcgatccgccgtctatcccgctgtctcgtcgtctgcgtgaattgcctctgcgcgtaagtcgtctgaaaaccggtactccgccgcgtattgacgcgcgcaccatcgatttcagcgtgctggcgcagcagcatggcgataacccgatgccggtcttctcgttcatgggatccgcggatcagcatccgcgccaggtaccgtgctatatcacccacactaacgagaaaacccacgatgtgatccgcaataacctcgatcgcagtcctatgtacgccggagtgatcgaagggatcggacctcgctattgcccgtcgatcgaagacaaagtcatgcgctttgccgatcgcaaccagcatcagatcttcctcgagccggaaggactgacctcaaacgaaatttatccgaacggtatatccaccagcctaccgtttgatgtgcaaatgcaaatcgtccgctcgatgcaggggatggagaatgcgcggatcgtccgtccaggctacgctattgagtacgatttcttcgacccgcgcgatctgaagccaacgcttgagagcaaatttattcagggtctgttcttcgccggccaaatcaacggtaccaccggttatgaagaggcggcggctcaggggctgctggccggacttaacgccgcccgcttctctgcggaaaaagagggctgggcgccgcgtcgcgatcaggcttacctcggcgtgctggtagatgacctctgcaccctgggtaccaaagaaccgtaccgcatgtttacttcccgcgctgaatatcgtctgatgctgcgcgaagacaacgccgatttgcgtttgaccgaacaggggcgcgagctgggtctggtggatgacgaacgctgggcgcgctacaacgagaagctggaaagcatcgaacgtgaacgccagcgtctgaaatccacctgggtgaatccgcaggcagagagcgccaacgaagtgaacgctcacctgaccgcgccgttgtcgcgtgaagccagcggcgaagatctgctgcgtcgtccggaaatgacctacgaacagctggttcaactctcgccattcaccccgggactggaagatcgtcaggcggctgaacaggtagagatccaggtgaagtatgagggctatatcgcgcgccagcaggatgagattgagaaacaacagcgcaatgagaataccttgctgccagcgaccctcgactaccgccaggtcactgggctgtctaacgaggtgattgccaaactgaacgaccataaaccgtcgtcgatagggcaggcgtcacgtatctccgggatcaccccggcggcgatctctattttgctggtttggctgaaaaagcaggggatgctgcgccgcagcgcctga

SEQ ID NO: 139052 - DNA, 624 bp, Enterobacter cloacae
gtgctcaacaaactttctcgtctgctggatgaagcgggtatttcgctcaccgatcaccagaaaaatcagctggtggcttacgtcggactgctcgataagtggaacaaagcctataacctgacctccgttcgcgatccgaatgagatgctggtgcgtcatattctcgacagcatcatcgtggcgccttatctgcagggctcgcgctttatcgatgttggtacgggcccggggttgccggggatcccgttggccatcgtatgtccggagtcacatttcaccctgctggacagccttggcaagcgcgtgcgcttcctgcgtcaggtgcagcacgagctgaagctggataacgtcaccccggtgcagagccgcgtggaagccttcccggccgagccgccgtttgatggcgtgataagccgcgctttcgcatcgcttaatgatatggtgagctggtgccatcatctgccggcagcgaatggtcacttctatgcgctcaaagggttagcgcaaaaagaagaaatggaaagtctgccggagaggtatgacattgtcgaggtgattgagctgcatgttcctcggttggaaggggagcggcacctggtggtgattaagccaaaatcgagttaa

SEQ ID NO: 139053 - DNA, 381 bp, Enterobacter cloacae
atgtcagtgtcgctcttgagtcgaaacgttgctcgcaagcttctgtttattcagttactggcagtaatggcaagtggactgctgttcagcctcaaagaccccttctggggcatttccgctgtatgcggcggtttggcagtggtcttgccaaatctgatgtttataatttttgcctggcgtcatcaggcgcatacaccagcaaaaggccgtgtggcctggaccttcgccttcggtgaagccttcaaggtgttgctgaccttcgcccttctggcggtggcgctggccgttttaaaagtggtatttttgccactgatcgtgacgtgggttttggtgctggtggtacaagttctggcgccagctgtaattaacaacaaagggtaa

SEQ ID NO: 139054 - DNA, 1260 bp, Enterobacter cloacae
atgccgctgatcttcgctatcggtgtggccctcggcttcaccaataacgacggtgtatccgcactggctgcagtcgtggcttacggcatcatggtgaaaaccatggcggttgttgcgccgctggtgctgcatttacctgctgacgagattgcggcaaaacaccttgctgataccggcgtgcttggcggtattatctccggtgctatcgccgcctacatgttcaaccgcttctatcgcatcaagctgccagaatatctcggcttctttgcgggcaagcgttttgtgccgattatctctggtctggccgctatcttcaccggcgtgatcctctccttcatttggccgccgatcggctccgcgatccaaaccttctcccagtgggctgcttatcagaacccagtggtggcgtttggtatctacggtttcatcgaacgttgcctggtgccgtttggtctgcatcacatctggaacgttcctttccagatgcagatcggcgaatacaccaacgcggctggtcaggtgttccacggcgatatcccgcgctacatggcaggcgacccgacggcgggcaaactgtctggcggcttcctgttcaaaatgtatggtctgccggcagcggctatcgcgatttggcactctgctaaaccggaaaaccgcgccaaagtgggcggtatcatgatctccgccgcgctgacctcgttcctgaccggtatcaccgagccgatcgagttctcgttcatgttcgtggcgccgatcctgtacgttatccatgccattctggcgggcctggcgttcccgatctgtatcctgctgggtatgcgtgacggtacctcgttctctcacggcctgatcgactttatcgtgctgtccggtaacagcagcaagctgtggctgttcccgattgttggtatctgctatgcgatcgtgtactacgtcattttccgtgtgctgattaaagccctggatctgaaaacaccgggtcgcgaagacaccaccgaagagagcaaagctggcgccaccagcgagatggctccggctctggtcgccgctttcggcggtaaagagaacatcaccaacctcgacgcatgtattactcgtctgcgtgttagcgtggcggatgtagcgaaagttgaccaggctggcctgaaaaaactgggcgccgctggcgtggtagtggcaggttctggcgtacaggccatcttcggtaccaagtccgataacctgaaaactgaaatggatgagtacatccgtaacagttaa

SEQ ID NO: 139055 - DNA, 357 bp, Enterobacter cloacae
atggcagaagaaacgattttcagcaaaatcattcgccgggagatcccgtcggatattgtctatcaggatgagcttgtgaccgcttttcgcgacatctccccgcaggcgcccacccatattctgattgtcccgaatgttctgattcctaccgtaaatgacgtcaccgctgaacatgagctggcgctgggccggatgatgaccgtcgcggcgaagatcgcccgcgatgaaggtcttgccgacgatggctatcggttgatcgtcaactgcaaccgccacggcggccaggaagtgtaccatatccatatgcatctgctgggcggtcgtccgcttggcccgatgctggcgcacaaaggctaa

SEQ ID NO: 139056 - DNA, 375 bp, Enterobacter cloacae
atgctcaggacccttttgggcgcgtgtctggcggcggggctactcgccgggtgtagttcacatccggagatcccggtttctgaccagcaggcgctggtgatggagtcgagcgtgctggcggcggggatcagcgccagcgagcctgccgtcgtggcgacagagattcaggctaccgcctcctcaacgctatataacgagcgccagcagccggttaccgtgcactatcgttttttctggtatgacgcccgagggctggagatgcatccgctggacgcgccgcgcaccatcgtggtaccggcccgctcctcggtcacgttatatggcagcgccaatatcctgggggcgcataaggcccgcctttatctttatctgtaa

SEQ ID NO: 139057 - DNA, 648 bp, Enterobacter cloacae
atgatgaaaatgtgtcgctatgcgttaatcacagcactggcgatattcctcgcaggctgtgcggggttgcgggagcagcccgcgccggtagaagaggccaaaccgcagccgcagcagcctgcgcagccgcagcccacggtgccgaccgtaccggcggtgccctctgtcccggcgcagcctgggccgattgagcatcaggatcagcagtcgggtcagccggcgccgcgcgtgcgtcattatgactggaacggcgcggttcagccgctggtggggcagatgctgcaggcgagtggggtcaatgccggcagtattctgctggttgacagcgtgaacaaccgcaccaacggttcgctgaatgctggagaagccaccactgcgctacgtagtgcgctggccggtaacggcaaatttaccctggtatcggcgcagcagctggcggtcgccacgcagcagctgggcctgtcgccgcaggacagccttggcagccgcagcaaagccatgggcatcgcccgcaacgtgggcgcgcagtatgtgctttactccaatgccaccggcaacgtcaacgcgcctgagctgaaaatgcagctcatgctggtgcaaaccggtgagataatctggtcaggtaaaggtgctgttcagcaacaataa

SEQ ID NO: 139058 - DNA, 828 bp, Enterobacter cloacae
gtgctgttcagcaacaataagctaacgcgcgacgagctcttgtcgcgcttctttccccattatcatcctgtcgcctcgctgagccagagtggcctcagcggcggcagtgtgattattagcgacggcgaccggcggcacgtgctgcgtcagccgcacgatccgtctgccgccacttaccattttcgccgtcagtatcacgcactccgccgactgcctgccaggctggcgccaaccccgctgttttactcaccctgctggatggtggtggagtattgcgcaggggaggtgaaaagcgagttaccggcctccccgcagctgtcaggcttattgtatgatttgcatcagcaaccgcggtttggctggcgggttagcctcacaccactgctggcccagtactggcagaggtgcgatccggcgcggcgcaagccgcgttggctgcgctggcatcagcggctgcgccgccagggcgagccccgtcccctgcggctggcgccgctgcacatggacgtccatgccggcaatattattcataatgagtccggcctgaggctgatcgactgggaatatgccggtgatggcgatatcgcgctggagctggccgcggtgtggatcacgcctggcgagcgccgtcggctggtagaagcgtatgcccggcgggcggccatcgacgcgcagctgctgtggcggcaggttgtactctggcgcccgtgggtactgctgttgatggcgggctggtatgaaatgcgctggcggcagagcggggaccggcaatttatcacgctggcagatgaaacatggtgtcagttagacaacgaacgtaaaggataa

SEQ ID NO: 139059 - DNA, 1023 bp, Enterobacter cloacae
gtgggcccagtgatgttggatgtcgaagggtatgagctggatgcggaagagcgagaaattctggcgcatccgctggtgggagggttgatcctctttacccgaaattatcacgatccggcgcagctgcgcgagctggtgcgccagatccgcgacgcctcccggaaccacctggtggtggcggtcgatcaggaaggggggcgggttcagcgtttccgcgaagggtttacccgtttaccggcggcccagtctttcgccgcgctgctggggatggaagaggggggcaaactggccgccgaagccggctggctgatggccagcgaaatgatcgccatggatatcgatattagttttgcgccagtgctggacgtcggccatatcagcgccgcaatcggcgaacgttcttatcatgaagatccgcagaaagcgctgacgatggcgcgtcacttcattgacgggatgcacgccgcgggcatgaaaaccaccggcaaacacttcccgggtcacggggcggtgactgccgattcgcacaaagagacgccgttcgatccgcgggcggcatcggttatccgcgaccatgatatggcggtgttcaaaagccttatcgccgagcagcgtctggacgccattatgccggcgcatgtgatttacccggagctcgatccgcgtccggccagcggctcggcgtactggctgaaaacggtgctgcgcggcgaactgggctttgacggggtgattttctccgacgatctgtcgatggaaggggcggcgatcatgggcagctatgccgaacgcggtcaggcatcgctcgacgccggttgcgatatgatcctcgtctgcaataatcgtaaaggcgcggtcagtgtgctggataacctgtcgccgatcaaagcagagcgtgttacgaaattgtatcataaaggttccttttcccgtcaggagttaagggattcagcccgttggaaaacggtgagtgcccagctggagcagcttcatgcgcgctggcaagaggcgaagtccgcgtaa

SEQ ID NO: 139060 - DNA, 543 bp, Enterobacter cloacae
atgattatctatttacacggttttgactcgaacagccccggtaaccatgagaaggtgatgcagctgcagtttatcgacccggacgtgcggttgattagctacagcacgcggcatcccaagcacgatatgcagcatttgctgaaagaggtcgataaaatgctgcagctcactgccgatgaccggccgctgatctgcggcgtcggccttggcggctactgggcggagcggattggttttctgtgcgatatccgccaggcggtgttcaatccaaacctgtttccgcatgaaaacatggaaggcaaaatcgaccgaccggaagagtatgctgacatcgccaccaagtgcgtgaccaacttccgcgagaagaaccgcgatcgctgcctggtggtgctttcccgccaggacgaggcgttggacagccagcgttccgccgatctcctgcaccactattatgaaattatctgggatgaagagcagacccataagtttaaaaatatctcgccgcatctgcagcggctgaaagcgtttaaaaccctcggctaa

SEQ ID NO: 139061 - DNA, 795 bp, Enterobacter cloacae
atgtttttagtcgactcccactgccatcttgatggtctggattatcaaactctacacaaaaacgtcgacgacgtgctggcaaaagcggccgcacgcgatgtgaaattttgcctcgccgtcgccacgacgctgcctggctaccgcagtatgcgcgaactggtggggacgcgtgacaacgtcgtcttctcctgtggcgtacacccattaaaccaggacgagccctgggaggtagagactctgcgcgcgctggcagcggaagagggcgtcgtggcgatgggggagaccggtctggattatttttataccccggaaactaaagcccaacagcaaagctcgttccgcgaccacattcgtatcggccgtgagctcaataagccggtgatcgtccatacccgtgacgcgcgtgccgatactctggcgattttgcgcgaagaaaaggtgacggattgcggtggcgtactacactgtttcactgaggacagggagacagcgggcaagctgctcgatatggggttctatatctcgttttccggtatcgtcacttttcgtaacgccgagcagctgcgtgatgcggcgcgctacgtgccgctggatcgcctgctggttgaaaccgattcgccgtacctggcgccggtcccccaccgcggcaaagagaaccagccggcgctggtccgtgacgttgccgagtatatggcggtactgaagggggtgtcgcttgagcagctggctcagcagaccaccgacaattttgccaccctgttccacatcgaccccgcccgtttgcaacctgcttga

SEQ ID NO: 139062 - DNA, 1005 bp, Enterobacter cloacae
atgaaatggtatccgtggctgcgcccctcgttcgagcaactggtcggtagctatcaggccggacgaggccaccacgccttactgttacagtccctgaacgggatgggcggcgaggcgttgatttacgcgctgtgccgcttcctgatgtgccgccagcccgaaggacataaaagctgcggccactgccatagctgtcagctgatgcaggccggcacgcaccccgattactatgcgctcagccccgagaagggcaagagtgcgctgggtattgacgcggtgcgcgatgtcaatgaaaagctctatgaacatgcgcgccttggtggggcaaaagtggtctggattagcgatgctgccttgctgaccgatgccgccgccaacgcgttgctgaaaacgctggaggagcccccggagaatacctggttcttcctcgcctgcgaggagccggcgcgtctgctgaccactctgcgcagccgctgtcgcctgcatcatctggcgccgccgtctgagccttatgctctggcctggctggagcgtgaggtgagcctgccgcaggagtcattgttgaccgcgttacgcctgtgcgccagcgcgccggctgcggcgctcgaactgttacaggaaccgctgtggacggcgcggcagcagttgtgtcaggcgctggcggctaccctggcgagcggtgactggctggcgctgctgccgatactcaatcatgaacaggcggcggttcgcctgcactggctggcgtcgctgctggtcgatgcgcaaaaacgacagcaggggattaccctggtgagtaaccctgacgtctggccgctgctggagcagctggcgcacagcctgcccgccgcccggctgcaggcgattgcccatgacgtctgtacctgccgcgagcaattgctcaacgttgtcggtgtcaaccgcgaactgctgcttaccgagcgcctgctgcgctgggaacattacctgcaacccgggacggttttacccgtctcccacctctga

SEQ ID NO: 139063 - DNA, 642 bp, Enterobacter cloacae
atgcgcagtaactatatcgtcatcgaggggctggagggcgccgggaagaccaccgcacgtcaactggtggtggagacgctgcagtcggcgggtattcacgatatggtgtttacccgcgagccggggggcacaatccttgccgaaaaactgcgtagcctggtgctggatatccagtccacgggcgatgaagtgattaacgataaagcggaagtgctgatgttttacgcggcgcgcgtccagttggtggagaccgtgattaagcccgcgctggcccgcggccagtgggtgatcggcgatcgtcacgatctgtcgacgcaggcctatcagggcggcggccggggaattgaccgcacgatgctggcgacgctgcgcgacgcggtactcggtgattttcgccccaatctgacgctgtatctcgacgtcacgccggaagtggggctgcagcgcgcccgggcccgcggcgagctggatcgcattgagcaggagtccatgaactttttcaaccgtacccgcgcgcgctatcttgagctggccgccgccgatccttctatccgcacggttgacgcaactcagccgctggatgccgtggcgcgcgacattcgcgccacgatcgcccagtggatggcggagcaagcggcatga

SEQ ID NO: 139064 - DNA, 1023 bp, Enterobacter cloacae
atgaagaaaatgttacgttttatcctgttgctggtcgtgctgttgggcatcgccgcggcggcaggcatgtggaaggtacgccagctggcggacagcaagctgctgattaaggaagagaccatctttaccctcgaagcaggcaccggccggctggcgctgggccaggatctctatcgcgagaaggtgatcaatcgcccgcgcgttttccagtggctgctgcgggtggaacctgagctgtctcacttcaaggccgggacctatcgcttcacgccgcaaatgacggtgcgcgagatgttgcagctgctggccagcggcaaagaggcgcagtttccgctgcgctttgtcgaaggcatgcgcgtcagcgactacctgcgccagctgcgcgatgccccgtacgtgaagcacacgcttgaagacgatagctacgcgacggtggctaaggcattaggtcttgagcatgccgactgggtagagggctggttctggccggatacctggatgtacaccgccaacaccagcgatatcgccatcctcaagcgcgcgcatcagaaaatggtcgccgaagtggcgaaggtctgggaaggacggatggagaatctgccctatgccgatcagaaccagctgttgaccatggcctcgattattgaaaaagagaccgcggtagcggaagagcgcgaccgcgtcgcgtcggtatttatcaaccgcctgcgcatcggtatgcgcttgcagaccgatccgaccgtaatctacgggatgggcgcaggatatactggtaagttaacgcgtaaggatctcgagacgccgaccgcatacaatacttataccatcagcggtttgccgccgggccctatcgcggtgccgggcgaggcctcgctgaaggcggccgcccatccggcgaaaacgccatatctttatttcgtcgccgacgggaaagggggccatacgtttaccacaaacctggtcagtcataaccgtgcggtgcaggattatctgaaagtacttaaggaaaaaaatgcgcagtaa

SEQ ID NO: 139065 - DNA, 810 bp, Enterobacter cloacae
atgttcttgataaacggcgttgtacaggacacgttggcagcgaacgatcgcgccacccagtttggcgacggctgttttaccaccgcccgcatccagcaagggcaggttgcgctactggacgcccatctgcagcgtttacagacaacctgtgaaaaattacatatcccatttaacgactggctgacgctgagcgaagagatgcagcgtctggctcggccgcacgcgcagggcgtgctcaaggtgactctcacccgcggcgttgggggaaggggatacagtacggcaggctgcgtgtcgcccactcgcattctcagcttctcgccatacccggcgcattatgcgcgctggcgggaggagggcattactctgacccagagtccggtgcccctggggcgcaactcctggcttgccggcctgaagcaccttaatcgccttgagcaggtactgatccgctctcatcttgagcagacggacgccgatgaggcgctggtccttgacagtgacgggtggcttacggaatgctgtgccgcgaatttattctggcgtcagggacgtgatgtatttactccgcgactcgattatgccggggtcaacggcattatgcggcagcgctgtatcgcgcagctggcaccatcgacgtttcgcgttgtcgaagtgacagcgcgtcccgagacgttgcgggaggccgatgaagtgctgatctgcaatgcgctgatgccgctggtgccggttcgccgctgggaggagaccacctggtcctcgcgtgagctttaccattttttagcccctttgtgtgagctgtctggttag

SEQ ID NO: 139066 - DNA, 987 bp, Enterobacter cloacae
atgcaggattctggccttgaagtgacggaagagaatgcaacccgtattggcgccgctatcggctccggtatcggcggtctcggcttgatcgaagaaaaccacagttcgctggttaacggcggaccgcgcaagatcagcccattcttcgttccttccacaattgttaacatggtggccggacatctgaccatcatgtttggtctgcgtgggccaagtatctctatcgcgaccgcgtgtacttcaggcgtgcacaacatcggccaggccgcgcgcatcatcgcctatggcgatgccgatgcgatggtggcaggcggcgcggaaaaagccagcaccccgcttggcgtgggcggcttcggtgcggcgcgtgcgctctccacgcgcaatgacaacccgcaggcggcgagccgtccgtgggataaagatcgtgacggcttcgtgctgggagacggcgcgggtatggtggtgctggaagagtacgagcatgccaaaaaacgcggcgccaaaatctacgccgagatcgttggcttcggcatgagcagcgatgcttaccacatgacgtcaccaccggaagatggcgcgggcgccgcgctggcaatggtgaatgctattcgcgatgcgggtatcgaaccgggccagatcggctacgtcaacgcccacggcacctcgacgccggccggcgataaagcggaagcgcaggcggttaagtctgtcttcggtgatgcggcgagccgcgtactagtgagctctaccaaatccatgaccgggcatctgctgggtgcggcaggggcggtagagtcgatttactctatcctggcgttgcgcgatcaggcggttccgccgacgatcaacctcgacaacccggatgaaggctgcgacctcgacttcgttccacacgaagcgcgtcaggtttccggtatggagtacaccctgtgcaactccttcggctttggcggcactaacggttcgctgatcttcaaaaaagtgtga

SEQ ID NO: 139067 - DNA, 2034 bp, Enterobacter cloacae
atgacagatctttcgcaaagcagagaaaaggacaaaatcaatccggtggttttttatacctcggccggactgattttgttgttttccctgatgacgatcttttttcgcgatttttctgccgagtggattgggcgcaccctggactgggtgtcgaaaaccttcggctggtactatctgctggcggcgacgctgtatatcgtcttcgtcgtctgcattgcctgctcgcgcttcggctcggtgaagctcgggccggagcagtcaaagcccgagttcagcctgctgagctgggcggcgatgctgttcgccgccggcatcggcatcgacctgatgttcttctcggtcgccgagccggtgacgcaatatatgcagccgccggaaggggcggggcagaccatcgaggcggcgcgccaggcgatggtctggaccctgtttcactatggcttaaccggttggtcaatgtatgccctgatgggcatggcgctgggatactttagctatcgttataatttgccgctcaccatccgctcggcgctgtacccgatttttggcaaacggatcaatgggcccatcggccacagcgtcgatattgcggcggtgatcggcaccatcttcggcatcgccaccaccctcggtatcggcgtagtgcagctcaactacggtctgagcgtgctgttcgatattccggactcgctggcggcgaaagcggccctgattgcgctgtcggtgatcatcgccaccatctcggtcacctccggggtggacaagggcatccgcgtgctctccgaactgaacgtcgccctcgcgctgggactgatcctgttcgtactgttcatgggggatacctccttcctgctcaatgcgttagtgctcaacgtcggcgactacgtcaatcgctttatgggcatgacgctgaacagcttcgccttcgaccggccggtggaatggatgaacaactggacgctctttttctgggcgtggtgggtggcctggtcgccgtttgtgggcctgttcctggcgcgcatttcgcgcgggcgcaccatccgccagtttgtgatgggcaccctgattattcccttcacctttaccctgctgtggctgtcggtgttcggcaacagcgcgctgtatgagatcatccacggcgacgcggcctttgcccaggaggcgatggcccacccggagcgcggcttctacagcctgctggcgcagtatccggcgtttacctttagcgcgtcggtagcgaccatcaccggtctgctgttttacgttacctccgccgactccggcgcgctggtgctggggaatttcacctcgaagctgaaggacatcaacagcgacgccccgaactggctgcgcatcttctggtcggtggccatcggtctgttgaccctcgggatgctgatgaccaacggcatctcggcgctgcagaacaccacggtgatcatggggctgccgttcagctttgtgattttcttcgtgatggccggactgtataaatctctgaaagtggaagattaccgccgggtcagcgccagccgcgacaccgccccgcgcccgattggcctccaggatcgtctgagctggaagaagcgcctgtcgcggctgatgaattacccgggcacgcgctataccaaactgatgatggagacggtgtgctacccggcgatggaggaggtggcccaggagctgcggctgcgcggcgcggcggtggaactgaagagcctgccgccggaagagggtgagaaccttggccacctcgatctgctggtgcacatgggcgacgagcagaactttatctacaagatctggccgcagcagtactcggtgccgggctttacctatcgggcgcgcagcgggaaatccacctattaccggctggagaccttcctgctggagggcagtcagggtaacgacctgatggactacagcaaagagcaggtgatcaccgatattctcgaccagtacgagcggcacctgaactttatccatctgcatcgggaagcgccggggaacagcgtgatgttcccggatggctaa

SEQ ID NO: 139068 - DNA, 447 bp, Enterobacter cloacae
atgtttaaagctcttaccgctatcgtcgccttagccgcctccgccagcgttatggcgcaaggcgatgtcacgctgaacagtctggctcacgatgccgccacccgggcgtcgtttaaccagatggtcaaaggccatcagctgcccgcctgggtgaccaccggcggcaccggttcgcccgcgcagacggtgaaactgggtagcgaatcctggcaggtgttaagcgcctgcaaaccccacgactgcggccatgaacgtatcgctgtgatctggtcggaaaaaagcaaacagatgtccggcgtttactcagtggtcgatgaaaaaaccgaccaggagaagctgacctggcttaacgtcagcgatgccctgtccatcgatggcaaaaccgtgctgtttgccgccctcagcggcagcctcgacaaccatccggacgcctttaactaccagtaa

SEQ ID NO: 139069 - DNA, 1257 bp, Enterobacter cloacae
atggcgtatgtgaatcatctactgacgtttattgagagtaatccggcgctggcggtggggtttaatcttattctgctgctgctctccggcatatttgcccatcttttatgcaagttcttgctgattaaagtggtgcgtaaggtcttctttagtagccacaaacaggatgtgccgctggagaaggatcgacgcatcgccgaaaagctgtccaatttcattccggttattatcgtctattacgttctgcagtttatgccggcgatgccggcatcgctggtgacggcgattaatactatctgcgggatcttgttttttatttttatgtcggtgtttttcaacgagatgctggatattgtcaacagctcctatctgcgaaagaccaaacgtaaaaatcattccattaagggctatatccagataggcaaaatcttagtccacatcctggcggcgattatgatcctcgccgtgatgtcgaacaaatcgccgatcattattatctccagtctgggggccgtggcggcggtactgatgatcgtgttccagcatactctgctgtcgctggtggcgaacgttcagctgtcgtccaacgacgtgctccagctgggggactggattgaaatgcctgacaagaacctcagcggtgaggtgacggatatcgcgctgcacaccattaccatccgcaactgggacaataccatctcccgtatcccgaccaagaatttcctcaccgagacctataccaactggcaggcgatgttctcctccggggcgcggcggatcatgcgcagtatcgccatcgatcaacactcggtgcgttttctcgaccaggagatgctctcctcgatgctgaccatccgcggggtgagtgagcctctggcgacgctgcttgacggccgggatcccagcggcgtggccgaccgctggtttatcgataacgggctgaccaacctgaccctgtttcgccactatctgatgcactatctcgccgagcggccggatattattaaggagatgtacattgtggcgagaacgctgaaaccgtcgccgtcgggcatcccgctggagatttactgcttcaccacctcaacgctgtggaaagactacgaaaacacccagtcggcgatatttgagtacattaccgcggtggctggacagttttccctgcgcctctatcagtatcccgccgggcacgatttctggcgtctctcccaggagcacgccgcccggacgggcctgccgccgtcggccgaaggctaa

SEQ ID NO: 139070 - DNA, 894 bp, Enterobacter cloacae
atggcagattttccccctgtcgccagcctgcgcagctttgaggcggtggcgcgcctcggcagcgtaacgcaggccgcccacgagatgagcgtgacccattcggcggtcagccagcacatcaaacagctggaagccctggtcggcgtcacgctctttatccgccacggccgcggagtgcgcatcacggaagaaggacggctctatgccctgcaaatccgcgaggcgttacagcacatcgccgacgccacgcgcatggtgcagatcaaaccccgcaccctggaagtgaccctggcgacgctcccctcctttggctgccactggctgctgccgcggctggcgcgctttcaggcgcggcatccgcagatcgcggtgcgcctgctgaccagcctggcggtggttaacctgcaacaggagggtatcgatctggccatacgcatggggcaaggcgactgggaggggatggaaagccggcatctgtttgccgatgaacagctggtggtcgccgcccccggctatcgcggcggtaacctgccgaccaccccgcaggcgatcgccgccagcgatatcattttttccatggagtcctggcatgcctggtgcagccaggcggggctggaaaagccgatcgtcccctcaggcctgcgcctgaacgactccaatctggtgctggaggcggttcgtctgggggccggcgtggcgctggagcggcgctccctggtggcgggggcgatagcccgcggcgagctggtgcagctcaccgccgtcaccgtcccctacccctggcactactggctaaccgtctccccgcaggcggagaaccggccggaagtcgcccggttcatcgcctggctggaggaggagatcgccctctggcgccagcagatcagcgcttag

SEQ ID NO: 139071 - DNA, 825 bp, Enterobacter cloacae
atgattagcaccggcgaactgacgggcaagctcgatttctgctgcctgcagttggcgaatcagcagcaggagcagcagcggctcgccagcaaagtcaaaaaagcgctgcgctacccgctgatcgtgctctctctggcgctgttggtggtgctggggatgctctattttgtcctgcccgagttcaccgccatctaccagacgttcagtacgccgttaccgctgttgacgcggatggtcgttgcggcaggcgacatgctaagtcgcggctggccgctgctgctggccttgctgctgagcccgctgctgctcaaccagctgatccggcggcgcagcgactggttgctgcgccgccagcggttgcttaacgcgctccctctcattggctccctgatcggcggacaacagctgagcctgatcttcaccatcctggcgttaacccaaagcgccggtattagctttctgcaggggctgcaaagcgttgaagagtccctgtcgtgcccgctatggcgccagcgtctggcgcaggcccgcgcgctgatcgttcagggggagccgatttggcaggcgttaagccgctgcggcggttttacaccgctgtgcctgcagctcatccgcacgggggaaagcgcgggagcgctggatcagatgctggaaaacctggcgcatcaccatcgcgagcaaacctatcagcgagccgatagtctggctgcgcatcttgaacccatgatgctggtgataaccggctcgctggtcgggattctggtggtggcaatgtatttgcccgtttttcacctgggcgatgccattggcggggcgggaggatga

SEQ ID NO: 139072 - DNA, 1080 bp, Enterobacter cloacae
  misc_feature (811)..(820): n is a, c, g, or t
atgcgtattgaagaagatctgaagcttggtttcaaagacgttcttatccgcccgaaacgctctaccctcaaaagccgttctgatgttgagctggaacgtgaattcacctttaaacattcaggcctgacctggtccggcgtgccgattattgcggctaacatggataccgtcggcaccttcagcatggctaaagcgctggccacttttggtattctgaccgcggtacataagcactacaccgctgaagaatggttggcgtttacccagggcgcatccgcagacgtactcaagcatgtgatggtttccaccggcacgtccgatgcggatttcgaaaaaacccagcagatcctctctcagaacccacagctgaattttgtgtgtatcgacgtcgccaacggctactctgagcactttgtacagttcgtggcgaaggcgcgcgaagcctggccgcaaaaaactatcatcgccgggaacgtggtcaccggtgaaatgtgcgaagagctgatcctctccggcgccgatatcgtcaaagttggcatcggcccgggatccgtctgcaccacccgcgttaagaccggggtcggctatccgcagctctccgccgtgattgagtgtgccgatgcggcgcacggccttggcggccagatcatcagcgacggcggttgcaccatgccgggcgatgtggcgaaagccttcggcggcggcgctgatttcgtgatgcttggcggcatgctggcgggccatgaagagagcggcggaaccatcgttgaagaaaacggagagaaattcatgctgttctacggcatgagcnnnnnnnnnnaattcatgctgttctacggcatgagctccgagtcggcgatgacccgccatgtgggcggtgtcgcgaaataccgcgcggcggaaggcaaaaccgttaagctgcctttgcgtggaccagttgagaataccgcacgtgatattctcggcggcctgcgttctgcctgcacctacgttggcgcctcgcgtctgaaagagctgaccaagcgtacgacctttatccgcgttcaggaacaagagaaccgggtattcaatagcctgtaa

SEQ ID NO: 139073 - DNA, 621 bp, Enterobacter cloacae
atggggtacacagtcgcgttaacaggcgggatcggcagcggtaaaagtacggtcgccgacgccttcgcgcagcttggggttaaggttatcgatgccgatgttatcgcccgtcaggtggtcgagcccggtaccccggcgctccaggccattgtcggccactttggaccacagatgattgcccccgacggcacgctgaaccgccgcctgctgcgggaaaaaatttttgctcacgtggaggaaaaagcctggctcaatgcgctgttgcacccgctgattcagcaggaaacgcgccgccagatgcaggccgccacctccccttatctcctctgggtcgtacctttgctggtcgaaaaccgcctgtccggccaggccgatcgcgtactggtcgtcgatgtgccgaaagagacgcaaatcgaacgcaccatgctgcgcgataaggtcagccgcgaacatgctgaacatattcttgccgcccaggccacgcgccagcagcgcctggccgtcgcggacgatgttattgaaaacactggcacgccggatgcagtggcatcggatgttgcccgcctgcacgaaaagtatttaacgctggcatcgcaggccgcctcacaggaaaactcgtaa

SEQ ID NO: 139074 - DNA, 744 bp, Enterobacter cloacae
atgcatacccccgttctgtttgaacatcctcttaatgagaaaatgcgcacctggctgcgcatcgaatttctgatccagcagatggctttccgtccgcagattgccagccatgccgatgcgctccattttttccgtaacgccggcgatctgctggatgtcctggagcgcggcgaggtgcgcactgacctggttaaagagctggaacgccagcagcgtaagctccagtcatgggcagaagtgccgggcgtcgatcaggagcgcattaacgagctgcgccaccagttgaagcagtcctccagcaccctgatggccgcgccgcgcattggtcagtttctgcgtgaagatcgcctgattgcgctggtgcgtcagcgcctgagtattcctggcggctgctgcagcttcgatttaccgaccctgcatatctggctccatatgccacaggcgcatcgcgacgagcaggtggccagctggcttgccagcctcgatccgctggtccagtccctgagcctgatcctcgatcttatccgcaactccgcgctgttccgcaaacagaccagcctcaacggcttttatcaggataatggcgaagatgccgatctgctgcgcctgcgtctcgatctggctcaccagctttatccgcaaatttccggccataagagccgtttcgccatccgtttcctggcgctggacagtgaatatgggatcgtgccggagcgctttgattttgaactggcctgctgttaa

SEQ ID NO: 139075 - DNA, 195 bp, Enterobacter cloacae
atgtcagaagagactatcgtcaactgcccgacctgcggcaaaactgtggtgtggggcgagcagagtccgtttcgtccgttctgtagcaagcgctgccaactgatcgatctgggagaatgggctgcggaagagaagcgcatccccagcgcgggggatctctccgatagcgatgactggagcgagcagcaaccctga

SEQ ID NO: 139076 - DNA, 393 bp, Enterobacter cloacae
atgaaaaaactgcaaatcgccgtcgggataattcgcaatccgcaaggcgaaatctttattacccagcgcgccgccgatgcccatatggcgaataagctggagttcccgggcgggaagattgaatctgatgagacgcctgagcaggcgctaatccgcgaactgcaggaggaggttgggattacggtcaccacctcttcgctctttgataagctggagtatcagttccccgatcgccatattacgctgtggtttttcctcgtggaaagttggcaaggcgagccgtggggtaaagaagggcagccgggtcggtggatggcgggaccaacgttggatccggcggcttttcctccggcgaatgaaccggttatcagcaaacttatcgcccagggctga

SEQ ID NO: 139077 - DNA, 1191 bp, Enterobacter cloacae
atggcgggtcgtggtaccgatattatgctcggcggtagctggcaggcggaagtcgctgcgctggaaaacccaacgccagagcagattgagaaaatcaaagccgactggcaggtacgccacgatgcggtactggccgcaggcggtctgcacatcatcggtaccgagcgtcatgaatctcgccgtatcgataaccagctgcgcggccgtgctggtcgtcagggggatgccggttcttcccgcttctacctgtcaatggaagatgccctgatgcgtatcttcgcctccgatcgcgtgtctggcatgatgcgtaaactgggaatgaaaccaggtgaggcgattgagcacccgtgggtcaccaaggcgatcgccaacgcccagcgtaaagtggaaagccgtaacttcgatatccgtaagcagctgctggaatatgatgatgtggccaacgaccagcgccgggcgatctacacccagcgtaacgagctgctggacgtgtctgacgtcagcgaaaccatcaacagcatccgcgaagacgtctttaaggcgacgatcgatgcccatattccgccgcagtcgctggaggagatgtgggatatcgaaggtctgcaggagcgtctgaaaaacgacttcgacctcgacctgccaatcaaagagtggctggataaagagccggagctgcatgaagagaccctgcgcgaacgtattctgcagagcgcggtagaaacctaccagcgtaaagaagaagtggtcggcgccgagatgatgcgccacttcgagaaaggcgtgatgctgcagactctggattcgctgtggaaagagcacctggcggcgatggattacctgcgccagggtatccacctgcgcggctatgcgcagaaagatccgaagcaggagtacaagcgcgaatcgttctcgatgtttgccgcgatgctggagtcactgaagtatgaagtgatcagcaccctgagcaaagtccaggtgcggatgccggaagaagtcgaggcgatggaacagcagcgtcgtgaagaggccgagcgcctggcgcagatgcagcagctcagccatcagagcgatgatgaagccgcagcccaggatctggcggcgcaaaccggcgaacgtaaagtgggccgtaacgatccgtgcccgtgcggctccggcaaaaagtacaaacagtgccacggccgtctgagctaa

SEQ ID NO: 139078 - DNA, 780 bp, Enterobacter cloacae
ttgacgggcgcgctggatagaccaggagatattcaccatcgtccggtggcgggccatctcccgcgccaggtcggcgatgcgctgggcgtccaggccggtaatcgccgccgcccacgccggggttttcgctacgccatcgtgctcgcccaacagataagcgcagtaaggggcaaacccgacggtatggctggcaacaaacgcctggtcgtagagagactcagcgatcagcacatagctcagggccaacagcagtgcggtatcggtacccggctgaatggccagccactcggcgtcgggcaccgcgctgaggtcattgcgcaccggactgatattgataaaccgggtgccgttggcctgcatcttatccagccagtactggagcatatggtcattggcgccgccgccgttgacctgggcattgcgcagcggcagtccgccgatggcgacaaacagctgacactcccgggccagctcggaaaaatgggtatgctgccggtgcagcgggctcagcggcccgagaatatgcggcagaatacgctcgcccgcggcgctgctataggtattggtgctggcggtgtacccgccaaagcccttgagaaaccggtgcagctggctctgcgcatggtgaaagcgtccagcgctggcccagccgtaggagccgccgtagatcgcctcattgccgcagcgcgccttgaccgagcgcagctcgcgcgccagcaggtccagggccacctcccagctgacttcgacaaagggctctttacctcgcccttctcgtga

SEQ ID NO: 139079 - DNA, 981 bp, Enterobacter cloacae
atgtcgcagaaaagaaaattattgcctgccgcgctgggactgctttcccttgcctcgctgagcgtcgctgccgcagacgccctctccttacagggaaaaaccattggcgttgccgtggtcggcactcagcatttctgggatcgcgaggcctttaaaggcgcgacagaggaggtggagaagctggggggcaaagtcattggcgtcgatggcggccgcgataatcaggtgcatgccaataaccacgatattttactgtcacgcaaggtggacgcggtaattagtattctcggcgatagcgccgtcgaaccaaaatttaaagcattgcgtgatgccggtatcccggtatttaccgtagatcatgtttctcaatattcggtcaacaatactacttccgataactacaccttaggctcaaccatcggccgctacatggcggatgaattaggcggcaaaggcaacgtcgccgtatttaacgccttctccagcgcgctgcgtatttgcggaattcgctacgatcagtggaaatatgtccttaaggattatccggatattcatattatccagcccgagctcgcggaacagttcgccaactcgccggaagacgcgcgcaagaaaaccctcgaattactcagccagtatccgaaaggcaaactggacgccatccatgtcgcctgctgggatcaaccggccatcggcatcgtccaggcgctggaagagaccggtcgcgataaagacgtgaaagtgacggccatcgacgccggtccggagaccctggagatcatggcggagcccggcagcccgttcgtggctaacgtcgcgcagcagccgcatctgatcggccagacctcggctgacaacgtggcccgctactttgccggccagaaactaccggtgcaaacctttattccggtggttccggtgaaaggtccgcaggaagcgaaagcggtgtataaacagttgggatacggcgagctgcagtga

SEQ ID NO: 139080 - DNA, 1551 bp, Enterobacter cloacae
gtgattaatcaacatcctggcggggaacgccccgccgctggtctggtcatggagcagatcggtaaacgttttgccagcgtcaccgcgcttaatgcggttaccctgcgcctcaatcagggggagattcatggcctgattggcgagaacggcgccggtaaatcgacgctgatcaagatcctcgccggtgtctatcaggccgacagtggcagcgccaccctcgacggtcacccgctgccccttggcaatccggcagccatcgaagccgccggcatccgcgttatccaccaggaactgaacctgatcccgcactttaccgtcgcggaatcggtgtttctgggccaggagtatcgcacccgctggggggcgctggatcgccgacggatgaaggccgctacggcgcaatttttccagcaaaactggcagctggcgatcgaccccgaacggctggtgcgcgacctgagcctggccgagcgcaagctggtacaaattgcccgcgcgctgatcgacggcgcagcgcggctggtagtgttcgacgaacccaccgcccccctggaggcgcaggaggccagtctggtctcctccgccatcctgcgcctgcgcgaccagggcattgccattctgtatatttcccactacctcaatgagatagccaccctctgcgaccgcggcaccgtgctgcgcaacggggaagtggtcggttacccggaccgcgacctgctgcagaataccgaggcgctgatcgccatgatggtcggccgggaaatcgaccagctgtatactccgcgccagcgcccggcggcagacaatggggccaccccgctgctctcggtgcgccagctgagcgacgggcggcagctgcaggatctctcttttgatattcagccgggcgaaatcgtcggcgtcgccggcctgctgggcgccggacgcgatgtgctggtcgacttactctacggcttacgcccggcggaacgcggcaccatccacctcgagggccggccgcggcgcattcgtacgccaaagcaggcgatccgcgccggcatggcgctggtgccgcgcgaccgccgccatcaggggctgatcctgcccttcaccaccgccgacaatattaatctcgcctcgctgccggagaccgccacctttggctgggagcggcggggtctcgccgagcagaaagcgcgcgactggatagaacagctggcgatccgcccgggacgcccggggctgccggtacgctacatgagcggcggtaatcagcaaaaagcgatcctcgcccgctggctggggaccgatgcccggctgtttattctcgatgaacccaccctgggggtcgatatcggcgcccgccgggatatttatcaacgtacgcgccagctggccgatcaaggacgggcggtgctggtctcctccagcgacgcccccgaactgctcggactatgcgaccggatcctggtcctctggcgcggcgcgctggcggccaatctgcccacccgcggactaacgctggacgccctgctggtggcgatcaacggcggacaggagccttcaccatga

SEQ ID NO: 139081 - DNA, 771 bp, Enterobacter cloacae
atgctggccgaagcgggagtggtggagcaggaactggaacaggataaacacccccagcaggtagaccagcggccagggcaggcccagcacgctgttgtcgcgaaaggcgaccatcagcggatcgctgaccgcgatgcgccgctggccggtcaacagatctgtcaggccggtaaacgccaccgaggtcgagagggtggccagcagcggcggcaggccggccgccagcaccagcaagccgttgatcgccccgcacagcaggcaaaccgccgccagcagcgccagcagcaggagatacggcgtgtgccattcggccagcccgaggctgagcagcgcgacgccgagcaccgccgtcgccggcagggagaggtcgatgccgccggagaccacatcatccccgcccacggcgataacgcagaccaggccgaaacagaggatcgccagcggaacgctctggaccagcatcaggctgatattttgccagctgagaaagtagggcgactgtacgctcagccataccagcagcgccagaaacaggatcaggggaaatttttcaatcagcgtcgccaggcccggacggccgcgacgctggatagcagtactcatggtgaaggctcctgtccgccgttgatcgccaccagcagggcgtccagcgttagtccgcgggtgggcagattggccgccagcgcgccgcgccagaggaccaggatccggtcgcatagtccgagcagttcgggggcgtcgctggaggagaccagcaccgcccgtccttga

SEQ ID NO: 139082 - DNA, 3873 bp, Enterobacter cloacae
  misc_feature (2767)..(2776): n is a, c, g, or t
gtgtgcctgcggtctggcgaggcggtcgatgaagtcgatattcagcaacggcggctgcgcatcgcggaaacctggctgccgtgggatgagctggtgttcgccaccggttcgcggccctttatcccgccgcttccgggcattgatcgtccgcaggttatgcccttccgcaccctggcggacgtggaacgtattctggcgatacccggcccggcggtggtgattggcggtggcgtgctgggggtggaagcggcggcggcgctgcgtcgtcacggcggagaggtcactcttctgcatcgcggcagcggattaatggcgccgctgaccgacgcttttgccgccgatgagctcaggcagcagcttgaagcgcgcggcattcgctgcgtgctggagtgcagcatcgccgccatcgacgccgatggcgtgcggctggcggacgggcgcgtattccgcgccgccagagtggtgctggctaccggcgtgcagcccgacagccgtctggcggcgcagtccggcgtgctgtgccagcgggggatcgtggtcgaccgtcagatggcctcctcgctgccggggatcagcgccatcggcgaatgttgcgaaattgacggccagacctggggactggtggctccctgcctgcgtcaggccgaggtgctggcggatcgcctgtgcggcgcccccggcgagggctttgtctggcaggacgccgggacccgcctgaaggtcaccggcattgaactctttagcgctggcgagcagcaggccggggaacaggatgacatttataccagctgggaccccatcgaccgccactatcgccgcctgctgctgcgcgatggccgcctgcgcggcgtgctgctgatgggcgactgcaccgccgccgccgcgcttaccgcgcgcctggaaagcgatgagcctgccaccgtggactggctttttgacccctcttcaacgcagccgcaggctgcaggaataatgacgatgacgaaacctgtattagtgctggtgggacatggcatggtcggccaccattttctcgaacaatgcgtgagccgcaatctgcatcagcaatatcgaatcgtggtgtttggcgaagagcgttaccccgcctacgaccgggtacatctctccgagtattttgccggacgcagcgccgagtcgctgtcgctggcggccggggatttctttattgaacatggtattgaactccgcctcggcgaggcggtggcgaccatcgaccgcgacgcacggctggtacgggacgccgaggggcatgaaatccactgggataaactggtgctggcgaccggctcgtatccctttgtgccgccaatccccggtaacgatctcgcggggtgctttgtctaccgcactcttgacgatctcgaccgtatcgccgcccatgccgccgcggcgaagagcggggtggttatcggcggcgggctgctcgggctggaggcggccaacgccctgaaacagctggggctggagacgcaggtggtggagtttgccccgaacctgatggccgtccagctggataacggcggggcggcgatgctccgggagaagatcgtcgccctcggcgtgggggtgcataccagcaaagcgaccaccgtcatcgtgcgcgaggccgacggcctgcgcctgaacttttccgacggcggcgcgttgcggaccgacatggtggtcttctcggcggggatccgcccgcaggacgcgctggcccgcggctgcgcgctgcaggtgggcgaacgcgggggaattcacatcgacggccagtgccgcacctctgacccggacgtgctggcgataggcgaatgtgccctgtgggacaataaaatttacggtctggtggcgccgggctatcagatggcgcgcatcgccgcggccactctcgcaggagaggacgccagctttagcggcgccgacatgagcaccaaactgaagctgctgggggtcgacgtggcctcgtttggcgatgcgcagggtcgcacgccgggctgtcagagctatcaatggaccgacggtccgcagcagatttacaaaaaaatcgtcgtcagtcaggacggcaaagccctgcttggcggcgtgctggtgggggatgccagcgactatgccacgctgctgcagatgatgctgaacggcatggcgctgccgccgcgtccggagagtctgatcctgcccgcgctggagggagccgcgccgaaggcgctcggcgtcgcggcgctgccggacagcgcgccgatctgctcctgccataacgtcagcaaaggcgatatctgccaggcggtgaacaatggggcgagggatatgtcggcgataaaaagttgcaccagagcggctaccggctgcggcggctgcagcgcgctggtgaaacaggtgatggagtatcagctggcggagcagggcgtcgaagtgaaaaaagacgtttgcgaacatttcccgtggtcgcgccaggagatctaccacctggtgcgggttaaccatatccataccttcgagcagttgattagccgctacggccaggggcacggctgcgatgtctgcaaaccgctggtggcctcggtgctggcctcctgctggaacgagtacctgctgaagccggcgcacctgccgctgcaggataccaacgaccgctatttcgccaatatccagaaggacgggagctattcggtggtgccgcggatggcggcaggggaagtgacgccggacggactgatcgccatcgggcagatcgccaaacgttaccagctctacagcaaagtgaccnnnnnnnnnngcaaagtgaccggcggccagcgcatcgacctgtttggcgcgcggctggaacagctgccggctatctggcgcgagctggccgacgccgggtttgaaaccggccacgcctacggcaagtcgctgcgcacggtgaaatcctgcgtcggctcaacctggtgtcgctacggcgtgcaggactccaccgggctcgcggtacggctcgagcatcgctataaagggctacgcgccccgcacaaaatcaagatggcggtctccggctgcacccgcgaatgcgctgaagcccaggggaaagatatcggggtgattgccaccgacaaaggctggaatctgtacgtctgcggcaacggcgggatgaaaccgcgtcacgccgacctgtttgccagcgatctcgacgaagcgacgctgatccgcagcatcgatcgtctgctgatgttctatatccgtaccgccgatcgcctgcagcgaaccagcacctggatggataacctggagggcggcgtcgcctatctgcggcaggtggtgctggaggatagtcttggcattggcgaggagctggagcaggagatggcccggatcgtcgacagctaccagtgcgagtggcagaccaccctcaacgatccgcagcgtctggcgctgttccgctccttcgttaatagcgaccagcccgacgaggctgtgcagcgccgcgatctgcgcggtcagccgcagccgctgctgactgagacgttgcccgaaggcgaactcccatcccgaccgtggcaggcggtatgcgatcttgacgccattccggcgcaggcggggatcggcgcccgcttaggggagcggcagattgccctgttccgcttcggcgagcgggtctacgccctcgacaaccgcgagccgggcagcacggccaacgtgctgtcgcgtgggctgttaggggacgtcggcggcgagccggtggtgatctccccgctgtacaaacagcggatacgcctgcgcgacggctggccatgcgacggcgacgaacaggcggtacgcgcctggccggtgaaagtggaaaacggcaaagtgtgggtgggcaaccagcagctgctggcccgcgcggaggcctcctga

SEQ ID NO: 139083 - DNA, 1086 bp, Enterobacter cloacae
atgctcgcggaagacgtcatgcggatgctgccaggcaaacgcctcgcgataccccagcgcctggcccactctggcgatgatccaccagtccgctttcgcctcccccggcggcggcagaaagctgcgctgacgggagatccgccgctccgagttggtgaccgtgccattcttctcgccccaggccagcgctggaaagcggatgtgggcgaaacgtccggtatcggtctgggcggcgacatccgagacgatcaccagcggacaggcggccagcgcctggctcaccgcgtggctgtcagggagcgacaccaccgggttggtacccatgatccagaccgctttgacctcgccgcggccaatggcggcaaacagctccacggcggtcagcccgggggtctgcgccagccgttccgtcccccagaagcgggccagccgctgcagatcgtctggcacaaaatccatgtgcgccgccagcatcgtcgccagcccgccgacttcgcggccgcccatggcgttgggttgaccggtcagcgaaaaggggccgcagccgcggcggccatacttcccgctggccagatggacgttgatgatggcgttacatttgtcgctgccgctggcggattgattgattcccatggtgtagagggtgatcgcccgcggggcggcgatgaactcgcgatagaatcccgccacctcatcggcaggaagaccgcaaaaggccgccaccctcgccacgtcccagccgcgggcggcggccagcgcctgcgggccgtcgcgaaagccatcgacgcaggctcctgcctcagccagggcgttaagcagccccacaaacaacccgccgtcgcttcccggggccagcgccagatggcggtcggcgatctcgcaggtagcggtgcgtcgggggtcgatcgccacgatccgcaatcggggattatcccgcttcgcctgcgccagccgctggaacagcaccggatgcgcccaggcggcgttcgagccgaccagcaccaccagatcgctgttttccacatcatcgtagctgcagggcaccacgtcggcgccaaaggcccgcttgtagccagtgaccgctga

SEQ ID NO: 139084 - DNA, 1023 bp, Enterobacter cloacae
atgccatcgttttccactcaccttacccgcctgctgcaggggctgtttacgctgctgctcacgctgttcgggctgttgctagtcaccttctcgctctccgcgctgtcgcccgtcgaccgcgtactgcagatcgtcggcgaccatgccagccagtcgacctatgaccaggttcgccatcagctgggtctcgaccagccgctgccggtgcagttctggcactacctggtcaacctggcccatggcgatcttggcatcgccagcgccaccggccagccggtgctccacgacctgctggcggtctttccggcgacccttgagctggcgaccctggcgctgatcgtcggcgcggtactgggcatcgtcgccggggtgctgtgcgcccgttacgccggttcgccgtgggatctggcggttcgcacctttaccctgttgggcaactcggtgcccattttctggctcggcctgctgatgctggccctgttctacgcccggctgcagtgggcgccaggcccgggtcgcctcgacgatatttatcagtacaccgtcgagccacgcagcggttttgcgctgatcgacacctggctctccggcgataccgcggcgtttaaaaatgcgatcggccatctggcgctgccggtgctggtgctggcctattactcgctggccagcatcacccgcctgacccgctccgcctgcctgagcgagatgaacaaagagtacattctgctggcgcgggccaaaggggccggagagatgacgattctgctgcgccacgtcctgcccaatatccgcggcactctgctgacggtgaccgctctcgcctggacctccatgctcgaaggggcggtgctcaccgaaaccgtcttctcgtggccggggatcggccgctacctcaccacggcgctgttcgctggggataccacggcgatcatgggcggcacgctgctgatcggcgtgagttttgtgctgatcaataatctgaccgacctgctggtacggttaaccgacccgagggtgcgctga

SEQ ID NO: 139085 - DNA, 1500 bp, Enterobacter cloacae
atgaccaaaaaactgttgcctttactgctactgtcggcgctctccgccgccgcgcatgccgccacgccgcccaacacgctggtggtcgcccagggtctcgacgatatcgtcagcctcgacccggcggaagcgaacgaactctccagcattcagacggtccccagcctctatcagcgtctggtgcagcccgaccgcaacaaccctgaaaaaattgtgccgatcctcgccgaaagctggcaggccgatccggcggcgaaaaccctgaccattaaactgaagccggatgccaaattcgcctccggtaatccgctgcgcccggaagatgtgattttctcttacacccgcgcggtgacgctgaataaatcgccagcgtttattctcaacgtgctcggctggcagccggacaacatcgccagccagctgaaaaaggttgatgaccataccctgacgctgcactggaccgccgacgtcagcccgacggtggcgctgaatattctctccacccccatcgcctctatcgttgatgaaaaacaggtggcgccgaacgcgaaaaataatgacttcggcaacgactggctgaagatgcactcggcgggcagcggggcctataaaatgcgcgtctaccagccgcatcaggccatcgtgctggaagccaacgccagctcccccaccggcgcgccgaagatcaagagcatcattattaaaaacgtccccgacccggcttcccgccgcctgctgatccagcagggggatgccgacgtggcgcgcgatctcggcgctgaccagattgccgccctgcaggataaacccggcgtgaaggtgctgagcatcccgtccgccgagcagaactacctggtgtttaataccgccaacatcaccaaaaatctgctgaaaggccagtactttattcaccaaagcttcctgccggccggcctgccgggggcgctggagactaatccgttcaccttcgacccgcaaaaagctaaggctatccttgataaagcgggcattaaggatgcccacttcaccctcgatgtggagaacaaaccgccgtttatcaccatcgcccaatcgctgcaggccagctttgcccagggcggggtgaaggtggatctgctacccgccgccggcagccaggtctatgcccgggtgcgcgcgaagcagcatcaggcggcgatccgcctgtggatcccggactactttgatgcccactccaatgccagcgcctttgcctggaacgatggtaaatccagcaccgtggccgggctcaacggctggcagatccctgagctgaataaagccaccctcgccgcggtggcggagccggacccggcgaaacgcctcgacctgtacaaaacgatgcaggaaaccctgctccagcattcgccgtacgtctttattgaccaggggaaaacccagatcgtggtgcgtgacaacgtgaagggctatcagcagggactgaacgccgacatggtctggtacgataacgtgaccaagtaa

SEQ ID NO: 139086 - DNA, 696 bp, Enterobacter cloacae
gtgccggaaattaatgagtatggccagcaggtgaacgacctggtccctggctggcagggggcgcaagccctgcggcggacggcgttaaatggccgtttttgccgcctggagccgctggacgttgaccgtcatgcggcggatctgtttgccgcctatgcgctcggcgacaacagcgactggacgtggctggcgtctacgcggccggagagcgtggcggcgaccgcccactggatcgcgggcaaggtgaatgatgatgccctggtgccgtatgcggtggttgacctgcgtagcgagcaggcggtgggcatcgtcagctatatggcgatcgagcgggaaatgggcacggttgagatcggccatgtcacctggtcgcgacggatgaaaaacaccccgctgggtaccgaagcggtctggctgctgctcaaaaacggctttgaccatggctatcgtcggctggagtggaaatgcgattcgatgaatgtcgcctcgcgccgcgccgccgagcggctgggctttagctgggaaggacgtctgcggcagaggctggtgcgtaaagggcggacgcgcgacagcgatatgctgtccatcatcgacggcgagtggcctgcgcgcgatgcggcgctgcgggcgtggctggcggcggagaactttactgccgacggtcagcagattaagcgcctggaggcgtttcgctaa

SEQ ID NO: 139087 - DNA, 1527 bp, Enterobacter cloacae
atgcccgccgcgctggcttatccgctgcagggcaagcgctacaactgggcctacgagaccgaacctgagccgtacatgaacaatcgccgcatggagtgcggacgcggcaaagggctcggcggatcctcgctgatcaacggcatgtgctacattcgcggtaacgcgatggatctggataactgggccaaagagccgggtctggaacactggagctatctcgactgcctgccctactaccggaaagcggaaacccgcgatatcgggcctaacgactaccacggcggcgatggcccggtgagcgtgacgacaccgaagccgggcaataatccgctcttcgaggcgatggttgaagccggggtgcaggcgggctatccgcgtaccgacgatctcaacggctaccagcaggaaggctttggcccgatggaccgcaccgtgacgccgcagggccgtcgcgccagcaccgcccgcggctatctcgaccaggcgcgcggtcgcccgaacctgaccatccgcacccatgcgctgaccgatcacattatttttgccggcaagcgcgcggtgggcgtcgagtggctggagggagagagcacgatcccgtcaaaagcgacggccaacaaagaggtgctgctgtgcgccggggcgattgcctcgccgcagatcctgcagcgctccggcgtgggtaacccggagctgctcaggcagttcgatatcccggtggtgcacgatctccccggcgtgggtgagaacctgcaggaccatctggagatgtatctgcagtacgagtgcaaagagccggtatcgctctacccggcgctacagtggtggaaccagccgaagatcggcgccgagtggctgttcggcggcaccggcatcggcgccagcaaccagttcgaagcgggcggttttatccgcagccgcgcagagttcgcctggccgaacattcagtaccacttcctgccggtggcgattaactacaatggctccaacgcggtgaaagagcacggcttccagtgccacgtcggctcgatgcgttcgcccagccgcggccacgtgcgcctgaagtcgcgcgacccgcacgcccatccggcgatcctgtttaactatatgtcccatgagcaggactggcaggagttccgcgacgccatccgcattacccgggagatcatgaaccagccggcgctggataagtatcgcggccgcgaaatcagtccgggaatagaatgccagagcgatgccgaactggatgagtttgtgcgcaaccacgccgagaccgcgttccacccgtgcgggacctgtaagatgggttacgacgagatggcggtggtcgatggcgagggccgcgtccacggtctggaaggattgcgggtggtcgacgcctcgatcatgccgcagatcatcaccggcaacctcaacgccaccaccattatgatcggcgagaagatggccgacgccattcgcggccgccagccgctgccgcgcagcaccgcgacgtattatgtcgctggcgacgcgccggttcgccgttaa

SEQ ID NO: 139088 - DNA, 537 bp, Enterobacter cloacae
gtggccagcaaatcgtcacgcaaattgttggcgaaatatggcactagcgcgctgctggcaggcggcggggcggtggcgggcacggtgttatggaacaagtatcagcagaaaatgcgcgcgcagaatacgtccgcccaggcgcctgagacggcagcggcgccgacggatgtcgatccgcgcagcgtgcggctgatcacggccctggtatttgccgcgaaaagcgacggtcatattgatgaccacgagcgggcgaatattgaaactcagctgcgggcggccaatattgacgttcaggcccgggtgctaattgaccaggcgctggcccagccgctggatccgcagcgtctcgccgagggcatcatcgacccgcaggaggcgctggagatctactacgtcagctgcgcggtgattgatatcgaccattttatggagcgtagctaccttaatgcgctgggagacgccctggcgctgccgaaagatgtccgggccgatatagaacaggatatccagtcacaaaaacaagcgctaagcgtctaa

SEQ ID NO: 139089 - DNA, 2028 bp, Enterobacter cloacae
atgaccttgcatggcgatacacgcatcgataattattactggctgcgcgacgatgagcgcgcgcgacctgacgtgctggagtatctgcacgcggagaacgcttacggcaagcaagtgatggattcgcagctcagcctgcaggagcgtctgctgaaggagattatcgaccgcattccgcagcgggaagtctctgccccctacagtaaaaacggctttcgctaccgtcaggtgtatgagccgggctgcgaatacgctatctaccagcggcagtcggtgctgaaagaagagtgggatgagtgggagatcctgctcgatgccaaccagcgggcggcgaagagcgagttctacaccctgggtggactgggcattgcgcccaacaaccagctaatggcggtggcggaagattacctttcccgccgccagtacggcctgcgcttttgcgacctcagcaacggcgagtggtacccggaaatcctcgaaaatgtcacctccggctttgcctggagtaacgattcacgctttgtttggtatgtgcgtaaacatcccaccacgctgctcccttatcaggtctggcgccacaccgtcgggacaccggcgcagagcgacgcgctggtctacgaggaaaaagatgagaccttctacgtcagcgtgcataaaaccacctcccagcagttcgtggtaatttatctctccagcgccaccaccagcgaagtgctgctgctcaacgccgaactgccagacgccgagccggtctgctttctgccacggcgtaaagatcatgaatacagtcttgatcactatcagcacgctttctatcttcgttccaaccgggaggggaagaatttcggcctctaccgtaccgtgctgcgtgatgaagaacagtggaccacgctgatccccccgcgtcacgacgtgatgctcgaaggatttaccctgtttaccgactggctggttgtggaggagcgccagcgtggcctgaccagtctgcggcaaattaaccgcaagacccgggaggtggtggggatcgcttttgacgatccggcctatgtcacctggcttgcctataatccggagcccgaaacgtcgcgactgcgctacggctattcctccatgactacgccggatacgctgtttgaactggatatggataccggcgaacgaagagtgatcaaacagcaggaggtaaaggggctggatacgagctgctaccagagcgaacacctgtgggtgaccgcccgcgatggcgtcgaagtcccggtctctctggtctaccatcgcgaacattttcgcaaagggagcaacccgctgctggtctatggctatggctcatatggcgagagtatcgatgccgatttcagcgccagccggctgagcctgctcaaccgcggctttgtctacgccatcgcccacgtccgcggcggcggcgagctgggtcagcaatggtatgaagacggtaaattcctgtgtaagaaaaataccttcaacgactatctggacgtctgtgacgcgctgcttgcccaggggtacggcgatccgcggctttgctacggcatggggggcagcgccggcggaatgctgatgggcgtggccgtgaatgaacggccagagctgttccatggcgtgatagcccaggtgccgttcgtcgatgtggtgaccaccatgctggatgaaactattccgctgaccaccggtgaatttgaagagtggggaaatccgcaggatgaaacctattatcactatatgaaaagctacagtccctatgacggcgtgagggcgcaggcctatccccacatgctggtgactaccggtctgcatgattcccaggtgcaatactgggagccggctaaatgggtggcgaaactgcgggaactgaaaaccgacgataacctgctgctgctctgcaccgatatggattccggacatggcggaaaatccgggcgctttaaaagctatgaaggggtggcgctggagtacgcctttttcatcgccctggcgcaggggacactgccgggaaaagcggcagtgtag

SEQ ID NO: 139090 - DNA, 660 bp, Enterobacter cloacae
atgctgcgcgtcattgataccgaaacctgcggcctgcaggggggcatcgttgaaatcgcctcggtcgatatagtcgacgggcaaattaccaatcccatgagccatctggtgcgtcccgatcggcccatcagcccgcaggcgatggctatccaccggatcacggaagagatggtcgctgataagccgtggattgaggagattattccgcactatcatggcagcccgtggtacgtcgcgcataacgccagcttcgatcgccgggtgttgccggagatgcacggcgagtggatctgtacgatgaagctggcccgacgcctgtggccgggaatcaaatacagcaatatggggttatataaatcacgtaagctgaacgtgactacgccgccgggactgcatcaccaccgggcgctgtatgactgctatatcaccgccgcgctgctgctggatatcatcaatgtttccggctggacccctgacgaaatggccgatatcaccggtcggccggcgctgctgactacttttaccttcggcaaataccggggtaaggccgtcgccgagattgctgaaaacgatccaggctatctgcgctggttattcaacaatctcgaccgcatgagccccgaactgcgcctgacgctcaggcattacctcggggaatag

SEQ ID NO: 139091 - DNA, 231 bp, Enterobacter cloacae
atggaaagaaatctggccaaaatttcgcaagatgagatggataaagtcaatgtcgatctcgccgccgccggcgttgcttttaaggagcggtacaatatgccggtggtcgctgatttagtcgagcgtgaacagcctgcacatctgcgcgactggttccgtgaacgactgatcgcccatcggttggcctccgtctccctttcgcggctaccgtgggagccgaaacagaaataa

SEQ ID NO: 139092 - DNA, 375 bp, Enterobacter cloacae
atgcgacttcttgctggacgcgcgttgcgcctctccgttgcgcttgccgggatgttaaccgcggcgggcgtcttcgcccacgctcacctgcagcagcagatcccgaccgccggggcgcagctttcagcttccccacagacgctgacgctcagtttttccgaaggtattgaacccgcattcagcggcgtgaccgtcaccggtccgcagcagcatgcggtggctaccggaaaactgacccgcagcgccgataatccggccgaggtcacgttacctttggcggaagccttgccgccgggagagtacaccgtggcatggcatgtggtctcggtggatggtcataaaaccaaagggcaatttacctttagcgtgaagtaa

SEQ ID NO: 139093 - DNA, 870 bp, Enterobacter cloacae
atgctgaccgggctctatattaccctgcgctttgggcactttatctccctgatgctggcttttggctgcgtgctgtatggcgcctggtgggcgccggtaccgctgagacgcgtgctgatgctgcgcttttatccactactgcgcccgctgctgctgatcggcgcgatctctacgctggcgctgtatctcctgcagggaggaatgatgggcgagggctggacggatgtctggcgacccgccgtgtggcaggcggtggccgggacccgctttggtggagtgtggatctggcagatcctactggcgtggatcgcactcgcggtagtgtggatccgtccccgtcacggcgcccgccagctggtggccctgctggcggcacagctgctgctttccgccggggtagggcacgccgctatgcacgatggtctcaccggcgtactgcagcggacaaaccacgctgtgcatctcttctgcgtcgccagctggttcggcggtctgttgccctttatctattgcctgcgcctggcgcaggggcgctggcggccggccgcggtctataccatggcgcgcttttcacgttacgggcatctggccgtcgccggcacgattgccagcggagcgctcaatgcgctgttgatccagggaggattgattggcgcatcgccgtggggacgcatgttgttgatcaaatgtgcgctggtcgccgggatggtggtaattgcgttagtgaacaggtatgttctggtaccgcgcatgtcggcaagcggttcgcgggcggaaagcctgatcctgcgaaccacgcaggctgaaatagggctgggcgcgctggcgctgctggccgtcagtctgtttgccacctgggaaccttattga

SEQ ID NO: 139094 - DNA, 339 bp, Enterobacter cloacae
atgaaaaaaattgttctgaccatgttgttactggcaagctccggggctgctctggcagcgccacaaattatcaccgtgagccgttttgaggtggggaaggagagctgggcgttcaaccgggaagaggttatgttgacctgtcgaccgggtaacgcgctttacgccatcaacccgagcacgctggttcagtatccgctcaatgaggtggctgagcagcaggtcaaagccggcaaaaccaccgcgcagccgatctcagtgatccagatcgacgatccgcagcatccgggacaaaaaatgagcctcgcgccctttatcgagcgagcgaagaagctctgctaa

SEQ ID NO: 139095 - DNA, 858 bp, Enterobacter cloacae
atgggtcgctgccggcagcggatcctgccaaatcagatcttctttcggcacttccggcccgaggtaacgggattttggccccatatcacggtgggtcagcttgaaccacgcccgggcgaacgcctcgttaaaggcctgcggatcgttgaggaagcggcgggagattttttcaaactccgggtcgaagcgcagggtcaggtcggtgaccagcatggtcggtttgcgctttttctccgggttaaacggatccgggataatctccggcgcgtctttggcttcgaactggatcgcgccagccgggctgcgggtctgcacccattcgtatttgaacaggttttcgaaaaagtagttgctccactgggtgggcgtctgcgtccagaccacttccagaccggaggtgatggcgtccgcgcctgcgccgctgccgtagctggagtgccagcccagaccctgcgcttccagcggcgcggcttccggctcggcgccgacgtggctggtttctgcggcgccgtgggttttgcccagcgtatggccgccggcgatcagcgcgacgatctcttcatcgtccatcgccatattgccgaaggtggcgcgaatggccgccgcggcggacagcggctcgccgctggcgttcggaccttccgggttgacataaatcagacccatttcggtggcgccgatggcctgtttcgccaggctttccggatgacggtgggccagccactctttctcatcgccccagtcgacgtcgagatccggttcccagacgtcttcgcgaccggcgccaaagccaaaggtgcggaagccggcgttttccagagcgacgttacccgccagcatgtaaaggtcggcccatga

SEQ ID NO: 139096 - DNA, 933 bp, Enterobacter cloacae
atggccgatgccagcagcgtcgattttcgcgcccttcagcttttcatcgcggtttacgataaccagagtttttccgtagtggcccgccgcgaaggggtctctccctcgctgatctcgcgaaccatccagcagctggaagatgccctcgggcagcagctgttctaccgcaacacccgtgccgtggtaccgaccgaagcaggacgctttttcgcagcgtccgcccgcgaactgctgggacagtacgccgacgcgcaacgggcgttacaggatcgggcacaggtccccggcggactggtgcggatcaatgcgccggtctattttggtcagcgtcatatcgccccctggcttccggaactggcggcccggcatcccaaactgcagtttgacctgatgctgaccgacgattttatcgatccccatcgcgatgcgacggatatcctttttcgcatcagcagcctgccggacgcgggctatcacgccagagtgtttggcagccagcgctattacctgaccgcctccccggagtatgtttcacggtacggcagcccgacttcgccggaggcattgcatcaacatcgcacgctggtgtatggcggttcgcagggagccaaccgctggctgtttcgccagcgcgaagaggcatgggtgcactatccgttgaccccgctcatgacctcgaacaatgccgatgccctgctcacttcagccatcggcgggatggggatcgtgttatttcccgactggatggtcagcggggcgctgcacaacgggacattagtcacgctgatggatcgctattcggcggccatcagccacacgccatcgtatatcgcggcgatttatccttatacccgccatccctctctcaacgtgcggacagtgattgactattttgccgacgtgtttggatcgccgccctactggcagcgctaa

SEQ ID NO: 139097 - DNA, 435 bp, Enterobacter cloacae
atggcgttattattcattttattagtgattgccggcggcatgggattatcggtcgaggccggcctgctggggccgctggcgagccaggtgggggatctgtgggcaaccatgagcatctttgggattggcgcagtgttaaccttttttctgatgctctttttcagcccgcgtagcagcccgtcgttcttttctctgcccggctggcaactcaccggcggtctgttgggggcggggtacgtggtgatcttgaccatggcgacgccggtgattggtattgccatgaccatgatcggcatcctggcgggtcaggtggcgaaaagcctggcgatcgaccattacgggttattcggcagcccacggcgcaaaatcgatccgcggcgcgccatggcgctgatgttgattatggcggcgttactgctggtggctctgggttaa

SEQ ID NO: 139098 - DNA, 477 bp, Enterobacter cloacae
atggatacgatagtgatcattctggcactgtgcggcggcgcattgcttagcgtccaggcggcgataaatggccgtcttggcagccaggtgggggtgctgcgcagcgcctttttaaccttcgccaccggcgcgctggtgacgggattgctgatcctgttttttgctccagcgacgtcggtaaacctgctacaggtgcctaagtggcagctgctgggcgcattttgcggcgtgccctacatcgtcattatggtgctggcggtgcagcggataggcaccgctacggccaccgtggcggtgatctttggccagctgacgatgagcctgctgatcgacaactttggctggctgggcaacagcacgatggcgttctcgccggcgcgactggcggcggtgatatgtctggccctcgcgctgtacttaatctatacctcagggaagtcggctacctcccacgtggcggcccgcgcagaacagtga

SEQ ID NO: 139099 - DNA, 558 bp, Enterobacter cloacae
atggtcgcgcagacgcaccgggatcattttggcgttataggtctggttttgcttcaggctaaagacctgcgaggtcccggacttcgccgcgatctgatacggcgcagtatgaaacagcttatagccggtgccgttgggctgattcgccatcccatacatgccgttgcgcacaatgccccagtacggggatttcgggtcacccacctgcggcaggttcgccggctgctgataacgttccacatggttgccctgcttcatcgaatagagcagatgcggatcctgtactttaccattgttcagcagagtggtaagcgccttcaccatctggatcggggtggcgatccagtacccctggccgatgccgaccgagatggtgtccccctgataccagggctttttatgcacccgctgtttccactcccggctgggcagcaccccggcgtactcctcattaaggtcgatgccggtggactggccgtagccgaacttgctcagccattcatggatccggtcaatgcccatctcgaaggcgacctgatagaaaaaggtgtccgctga

SEQ ID NO: 139100 - DNA, 894 bp, Enterobacter cloacae
atgaaatatacggcattgatagtgacattcaatcgtctcggcaaactgaaaaaaacggttgaagagaccctcaaacttgaattcactaatattgttattgtcaataacgggtccacggatgggacccaagcctggctttcgtcaattgttgatacacgagtcattgtattaaccctcaccaagaataccggtggggcggggggctttaaaaccggtagtcagtatatctgtgaacagctggcaagtgattgggtatttttctacgatgacgatgcttacccctatccagacacgttgaagtccttttcacagctggataagcagggatgtcgggtatttagtggactggtgaaagatccgcaaggaaaaccgtgtccgatgaatatgccgttctcgcgtgtgccaacttcacttggcgacactgtacgctatttacgctaccctggagagtttatcccggcagctaatcgttctatgttcgtacaaacggtttcatttgttgggatggtcatacatcgtgatctgctcgcgaccagtcttgaccacatccatgaacagctttttatctactttgatgatctttactttggctatcagctatcactagctggtgagaaaattatgtatagcccggagttgcttttttatcatgatgtgagtattcagggcaaacttattgcacctgaatggaaggtttactatctctgccgtaatttgatcctgtcgaagaaaatattccagaaaaatgccgtgtatagcaattcagcgatagcgatacgcatcctaaaatatatattaatcctgccatggcaacgtcaaaaatattcctatatgaaatttattcttcgtggaatttcacatggcataaaaggtattagtggtaagtatcattaa

SEQ ID NO: 139101 - DNA, 1155 bp, Enterobacter cloacae
atgaaaagaaaaaaaatattgatcgtaggcgctggtttctctggtgcagttatcggtcgccaacttgctgagaagggacatcaagtccatattatcgatcagcgtgatcatattggggggaattcctatgatgcacgcgactctgaaacgaatgtgatggtacatgtttatggaccccatattttccatactgacaatgaaacagtgtggaactatgtcaacaagcatgcagagatgatgccctatgtgaaccgggttaaagcgacagttaatggtcaggtattttccctgcctattaatttgcatactatcaatcagtttttctcaaaaacttgttcgcctgatgaggccagagcgctcattgctgagaaaggggacagcactattgctgatccacaaacttttgaagagcaagcgttacgctttattggtaaagagttatatgaggccttttttaaaggatatacgattaaacagtgggggatgcaaccctcggaactgcccgcatctattcttaaacgtcttcctgttcgttttaactatgatgataattattttaaccacaaatttcagggcatgccgaaatgtggttatacgcagatgattaagtcaattctcaatcatgagaatatcaaggttgacttacagcgggaatttatcgttgacgagcgaactcattacgatcacgtattctatagcggtccattagatgcgttttatggctaccaatatggccgtctgggctatcgaacattagattttaaaaagtttatctatcagggtgattaccagggatgcgcagtgatgaactactgttctgtggatgtgccctatactcgcatcactgaacataaatatttttctccctgggaacaacacgacggctctgtttgttataaagagtatagccgtgcttgtgaagaaaatgatattccttactatcctattcgccagatgggagaaatggctcttcttgaaaaatatttgtcattggccgagaatgaaaccaacatcacttttgtcggtcgtcttggaacctaccgttaccttgatatggatgtgaccatcgccgaagcattgaaaacggcagaagtctatttaaattcactcactgaaaatcagccaatgcctgtgtttacggtttctgtacgatga

SEQ ID NO: 139102 - DNA, 1896 bp, Enterobacter cloacae
atgaacaatagcgttaaaatctataccagccaccataagcctagtgcttttcttaatgctgcaattatcaaacctctgcatgtcggcaaagctaattcttgtaatgaaattggttgtccaggagatgacactggcgataatatttcctttaagaatccgttttattgcgaactaactgcgcattattgggtttggaaaaacgaagagctggcagactatgtcggtttcatgcactatcgccgtcatcttaatttttccgaaaaacaaactttttctgaggatacctggggggtcgtgaaccatccatgcattgatgaagaatatgagaagatctttggattaaacgaagaaacaattcaacggtgtgtcgaaggtattgacatcttgctgcccaaaaaatggtctgtcactgcggcgggaagtaaaaataattacgatcactatgaacgaggtgaatacttacacattcgtgattatcaggctgccattgccatcgttgaaaaactatatccagagtatagcacggcaataaaaacgtttaatgatgccagtgatggctattacacaaatatgtttgtcatgcgcaaagatatttttgttgactattctgagtggctcttttccattctggataatctcgaagatgccatctcgatgaacaattataatgctcaggaaaaacgcgttattgggcatatagcagaacggctgtttaatatttacattattaagctgcaacaagatggtgagcttaaggtaaaagaattacagcgtacttttgtcagcaatgaaacattcaatggtgcactgaatccagtttttgattctgcggttccagtggttatcagtttcgatgataattacgcagtcagcggtggtgcattaattaattctattgtccggcatgcggataaaaataaaaattatgatatcgtcgtactcgaaaacaaagtaagctatttgaataaaacgcggttaataaatctaacctcggctcatccgaatatttctcttcgtttttttgacgttaatgccttcactgaaataaacggtgtgcatacccgagcgcattttagcgcatcaacgtatgcccgtctttttattcctcaactgttcagacgatacgataaagtcgtatttattgattcggataccattgtaaaggctgacctgggtgaactgcttgatgtccctctgtgcaacaatttagttgcagcggttaaggatatcgtcatggaaggttttgtaaaattttctgcaatgtcggcatcagatgatggcgttatgccggcaggcgaatatttaaaaaaaaccttaaacatgaataaccctgatgaatattttcaggcagggattattgtttttaatgtcaaacaaatggtcgaagaaaatacttttgctgaattgatgcgggtattaaaggcaaaaaaatactggttcctcgaccaggatatcatgaataaagtcttctactctcgagtcacatttctgccattagagtggaacgtttatcatggtaatggcaacacggatgatttcttccctaatcttaagtttgcaacgtatatgaaatttttagcagctcgcaagaagcctaaaatgattcattatgcgggtgagaacaaaccatggaataccgaaaaagtcgatttttatgacgactttattgaaaacatcgctaacactccatgggagatggaaatctataaacgtcaaatgtcgttagcggcttcgattggtttaacccatagcgagccgcaacaacaaatcttgttccagaccaaaatcaagaacgtactgatgccttatgttaataaatatgcaccaataggcacgccaagaagaaacatgatgactaaatattattacaaagtacgccgtgctattcttggataa

SEQ ID NO: 139103 - DNA, 741 bp, Enterobacter cloacae
atgcacccagttattaacttcagtcatgttacaaaagagtatcctctgtaccatcatattggctcaggaatcaaagatttaattttccatccgaaacgcgcttttcaattgctgaaggggcggaaatatttagctatcgaagacgtatcctttacagttggcaaaggtgaggctgttgctctgattggacgtaatggggcaggaaagagtacctctcttggcctggttgccggcgtgattaagccaactaagggaaccgtcaccactgaaggacgggtggcatcgatgcttgaactcggcggaggctttcatccggaacttaccgggcgtgagaatatttacctgaatgctactctgctgggccttcggcgtaaagaggtccagcaacgtatggaacgtattattgaattttcggaactgggagaattcatagacgagccaatcagagtgtactcaagcggaatgctagctaagttaggtttttcggtcatcagtcaagttgaaccggatattttaattattgatgaagttctggcagtaggtgatatcgcttttcaggcaaaatgtattcagaccatcagagattttaagaaaagaggcgtgacaatattgtttgttagccacaatatgagtgacgttgaaaaaatctgcgacagagtcatctggatcgaaaatcataggctcagagaagtggggtctgcagagcgaatcattgaactgtacaagcaagcaatggcttaa

SEQ ID NO: 139104 - DNA, 642 bp, Enterobacter cloacae
atgatttactattttatatttaagctggtaatgagagtacaaattccaaattatacagttttcctcattaccggcttgtttccgtggcaatggtttgccagttcggccactaactcattattttcattcatcgctaacgctcaaattatcaagaagacagtttttccccggtccgtgattccgctaagtaatgtaatgatggaagggttgcattttctttgtaccatcccggttattgttgtctttctttttgtttatggcatgacgccgtccttgtcctgggtttggggtatacctctcattgctattggccaggtgattttcacctttggtgtttcaatcatcttttcaacgctgaacctgtttttccgtgacctggagcgctttgtcagtctggggattatgctgatgttttattgtacgccgattttatatgcgtctgatatgattccggaaaaatttagctggataattacctacaatccgctagcgagtatgattcttagttggcgtgatttattcatgaatgggactcttaattatgagtatatttctatactctattttacgggaattattttgacggttgtcggtttgtctattttcaataaattaaaatatcgatttgcagagatcttgtaa

SEQ ID NO: 139105 - DNA, 1218 bp, Enterobacter cloacae
atgtcccccatcgaaaaatccagcaagttagagaacgtctgttatgacatccgcggcccggttctgaaagaagccaaacgtcttgaagaagaaggcaataaggttctgaaactgaacatcggcaacccggcgccattcggcttcgaggcccctgacgagatcctcgtcgacgtcatccgcaatttgcctaccgcccagggttactgcgattcgaaaggattgtactcggcgcgtaaagctatcatgcagcattaccaggcccggggtatgcgcgatgtcacggtggaagacatctatatcggcaacggcgtgtccgaactgattgtgcaggcgatgcaggcgctgttaaacagcggcgatgagatgctggttcccgccccggactacccgctgtggacggcggcggtgtcgctttccagcggcaaagcggtgcactatctgtgtgacgaatcctctgactggttcccggatctggacgacatccgcgcaaaaatcacaccgcgcacccgcgggatcgtgatcattaaccctaacaaccccaccggcgcggtctattccaaagaattgctgcaggagatcgtggagatcgctcgtcagcataatctgatcattttcgccgatgaaatttacgacaagatcctctacgacgaagcccagcatcactctattgccgccctggcgccggacctgctgacggtgacctttaacggattgtcgaaaacctaccgcgttgccggcttccgtcagggctggatggtgttgaatggcccgaaaaaacacgcgaagggctatatcgaagggctggagatgctggcttcaatgcgtctttgcgccaacgtgccggcccagcatgctatccagacggcgctgggcggctatcagagcatcagcgaattcatcatccccggcggacgcctgtatgaacaacgcaaccgcgcctgggagcttatcaacgatattccgggcgtctcctgcgtgaagccaaaaggcgcgctgtatatgttcccgaaaatcgatgccaaacgcttcaatattcatgacgaccagaaaatggtgctcgacttcctgctgcaggagaaagtcctgctggtgcagggcaccgcctttaactggccgtggccggatcacgtacgcatcgtgaccctgccgcgcgaagacgacctggagatggctatctcccgctttggccgcttcctctccggctaccatcagctttaa

SEQ ID NO: 139106 - DNA, 600 bp, Enterobacter cloacae
atgagtcagagtcatttctttgcccacctctcccgcctgaaactgattaaccgctggccgctgatgcgcaacgtgcgcaccgaaaatgtctccgaacacagcctgcaggtggcgatggtcgcccacgcgctggcggcgattaaaaaccgcaaatttggcggccaggtcaacgccgagcgtatcgccctgctggcgatgtaccatgatgcctcggaagtactaactggcgacctccctactccggtgaaatatttcaattcgcagattgcccaggaatataaggcgattgagaaaattgctcagcaaaagctggtggagatggtccctgacgagctgcgcgatattttcgagccgctgattgatgagcatcactacagtgaggaagagcagtcgatcgttaaacaggctgacgccctctgcgcttacctgaagtgcctcgaagagctgtctgcaggcaataacgaatttctgctggccaaaggtcggctggaaaagaccctggcatcgcggcgcagcgcggagatggattactttatgcaagtgttcgtcccaagcttccagctgtcgctggacgaaattagccaggattcgccgctgtaa

SEQ ID NO: 139107 - DNA, 1833 bp, Enterobacter cloacae
gtgaacggtgaattgatttgggttttatccctcctggccatcgcggttgtgctgtttgctaccggcaaggtgcgcatggatgctatcgccctgatggtcattgttgcctttgtcctcagcggaacgctgacgttaaatgaagctttttccggattcagcgatcctaacgtgatcctgattgccgccctgtttattatcggcgatggcctggtgcgcaccggagtcgccaccaaaatgggggcatggctggtgagcgtggcggggaacagcgaaaccaaaatgctgatctacctgatgctcaccgtcgccggtctgggcgcgtttatgagctccaccggggtggtcgccattttcatcccggtggtacttagcgtctcggcgcggatgaatacctcgccatcgcggctgatgatgccgctgagcttcgccgggcttatcagcgggatgatgaccctggtggcgacgccgcccaacctggtggtcaacagtgaattgctgcgcgagggactgcacggcttcagctttttcagcgtcacgccgattggcctggtggtgctgatcctgggcatcgtctatatgctggcggtgcgctttatgctgaagacggataatggcgactccgcacgcgatgggcgaaaaagaagcaccttccgcgatttgatccgcgaatatcacctcaccggccgcgctcgccggctggccatccgcccgggttcgccgatgatcggtcagcggctggatgatttaaagctgcgtgagcgctactgcgccaacgtgatcggcgttgaacgctggcggcggttccgccgggtaattgtcaacgtcaacggggtatcggaatttcgcgcccgcgacgtcctgctgatcgatatgtccgcctccgatgtcgatttacgccagttctgcggcgagcaaatgcttgagccgatggtgctgcgcggcgagtattttgccgatcaggcgctggatgtggggatggcggaggtggcgctgatcccggattcagagatgattggcaaaacggtgcgtgagatagccttccgcacccggtttggtctcaatatcgtcggcatgaagcgcgatggcaaagcgatggatggttcggtggtcgatgagccgctgcagctcggcgatatcctgctggtggtcggcaactggcggcaaattgccctgctggcgaagcgcggccgggatttcgtggtactcaatatgccggttgaggtcgatgacgcttcgccggcccacagccaggctccgcatgcgattttctgcctggtgctgatggtagccctgatgctcaccgatgaaattcccaacccgattgccgcgattatcgcctgtctgctgatgggcaaattccgctgcatcaatgccgagagcgcctacaaggcgatccactggccgagcattattttgattgttgggatgatgccgtttgccctggcgctgcaaaaaaccggcggggtggatctggtggtgaagggactgatggatgtcgccggaggcgaggggccttatctgatgctcggctgcctgttcatgatgtgcgcggcgattgggctgtttatctcaaacaccgccacggcggtgctgatggcgcctattgccttagcggcggcgaagtcaatgggcgtctctccctatccttttgccatggtggtggcgatggcggcttcggcggcgtttatgaccccggtctcctcgccggttaacaccctggtgcttggccctggcaagtactcatttagcgattttgtcaaaataggcgtgccctttaccatactggtgatggtggtctgcgtcctgctgatcccggtactgtttccgttttaa

SEQ ID NO: 139108 - DNA, 660 bp, Enterobacter cloacae
gtgcagtgtaaaggtttcctgttcgatttagacgggacgctggtggattccttgccggtggtggagcgttcatggtgcaagtggggggatcgtttcgccattgaccatgatgaaattctcagttttattcacggcaagcaggccattacctccattcgccattttatgccggggcgcagcgaggaggatatccaggccgaatttcgctacctcgagcagatagaagccactgatattgagggtatcgtcgcgctgccgggggcattagccctgctgaatacgctcaatgaggtcgggatcccgtgggcgattgtcacctccggttcgattccggttgcccacgcgcgtcaccgcgcggcgggcctgccgatgcctgaggtgttcgtcaccgccgagcaggtgaaacacggcaaaccggcgccggacgcctatctgctgggcgccgagcggctgggtctgcctgccggggagtgcgcggtggtggaagatgcgccggcggggctcctctccggactggcggccggctgtcgcactatcgcggtcaacgtgcccgccgatgcccctcgcctggatgaagccgacctcgtgctgagcagcctggaagatctggtggttgaacgccagactgacggcgtggtaaatgtgcgtcttaaagcgtaa

SEQ ID NO: 139109 - DNA, 516 bp, Enterobacter cloacae
atgatttttaccaaaatcattaggggattcatcagtgcgcagcgtctgattttatccaatcagtacaaaatgatgacgatgctcgacccggataatgcggaacgctaccgtcgtctgcaaaccatcatagagcgagggtatgggctacagatgcgtgaactggaccgcgagtttggccagctgacggaagaaacctgccgtaccgttattgatatcatggagatgtaccacgcgctgcacgtctcctggaccaacctgaaagacgcggcgggtatcgatgaacgccgggtcaccttcctcggatttgatgccgccaccgaagcgcgttatctcggctatgtgcgttttatggtcaacgttgaaggccgctacagccattttgacgccggtacccatggctttaactcgcagactccgatgtgggagaaatatcagcggatgctgagcgtctggcacgcttgcccgcgccagtatcatctgagcagtaatgaaattaatcaaattatcaacgcctga

SEQ ID NO: 139110 - DNA, 204 bp, Enterobacter cloacae
gtgcccggactccctcagtgcgctgatgatttgccacccgtcgaggaaaggcagcatcacgtccagtattatcaaatcatactgtcccttcgacgcggccccgagaccatcgcggccattattaaagagatcggcctgatagccttcctcaaccagtccctgctgcaggtaacgacctgttttttgttcgtcttcaacgattaa

SEQ ID NO: 139111 - DNA, 1818 bp, Enterobacter cloacae; identical to SEQ ID NO: 19853

SEQ ID NO: 139112 - DNA, 522 bp, Enterobacter cloacae
gtggaagatgaaacccgcacccaggagcgcctgcgccgtggcgaagtagtgggcgcagtgagtatccagccgcaggcgctgccaagctgcctggtggatcagttgggggcgctcgattacctgtttgtcgcatcaaaagagtttgcgcaacgctatttcccgaatggcgtgacgcgttcggcgctgcttaaggcgccggtcgtcgccttcgaccatctggacgatatgcatcaggcgttcctgcagcaaaacttcgacctgccgccgggcagcgtcccctgccacatcgtcaactcgtcggaagctttcgtgcagctggcgcgccagggcaccacctgctgtatgatcccgcatctgcagatcgaaaaagagctcaacagcggcgaacttatcgatctcaccccgggcctgttccagcgccgcatgctctactggcaccgcttcgccccggaaagccgcatgatgcgccgggtgaccgatgcgctcattgactacggacacaaggtgctgcgtcaggattaa

SEQ ID NO: 139113 - DNA, 768 bp, Enterobacter cloacae
gtgaagttaaaagtcttagccctggcggcaacactcggattgaccacgatggcggcacaggccagcgaattgccggatggcccgcatattgtgacttcaggcacagcaagcgttgccgcggttccggacatcgccaccctggcgatcgaagtgaacgtgtcggcaaaagacgccgcgtcggcaaaaaaacaggctgacgatcgcgttgcgcaatatctctctttcctcgaaaagagcggtattgctaaaaaggacatcaactcggcgaatctgcgtacccagcctgattacgactatcagaacgggaaaagcattctgaaaggctatcgcgcggtgcgcacagtggaagtgaccttgcgccagctggataaactcaacggtctgctggatggcgccctgaaagcgggtctcaacgaaattcgctccgtctcgctgggcgttgcgcaaccggacgcctacaaagataaagcgcgtaaagcggcgatcgacgacgccgtgcatcaggcgcaggagctggccgcaggcttccacagcaagctgggtccggtgtacagcgtgcgctaccatgtctccaactatcagccgagcccgatggttcgcatgatgaaggccgctgacgctgcgccggtttctgcccaggaaacctacgagcaggcgactatccagtttgacgaccaggtcgatgtagtctttgagctgcagccggcgcaagccgctgctccagccaccccggcgaaaccggcggaaacgccgaaaccggcccagtaa

SEQ ID NO: 139114 - DNA, 636 bp, Enterobacter cloacae
atgtttacttattactttcaggggcttgccctgggagcggctatgatattgccgcttggcccacaaaatgcctttgtgatgaatcaggggatccgtcgtcagtatcatctgatgattgccctgctatgcgcggtcagcgacttgctgttaatctgcgctggcatttttggcggtagcgcactgctgatgcaatccccgtggctgctggcgctagtgacctggggcggcgtggcctttttgctgtggtatggcttcggcgcattgaaaacggcgttcagtcagagtcttgaactcgccaatgcagaggtaatgcagcaggggcgctggaaaatcattatcaccatgctggcggtgacctggcttaatccgcacgtttatctggacacctttgtggtgttaggcagcctgggaggtcagctggcggtggagccgaagcgctggtttgcgctagggaccattagcgcctctttcctgtggttctttggcctggcgctgttagccgcctggctggcgccgcgactgcgtaccgccagagctcagcggatcatcaatattgtggtcggcgccgtcatgtggtttattgcgtttcagctggcaagagaaggcgtcagccatatccaggcgttgcttaactaa

SEQ ID NO: 139115 - DNA, 858 bp, Enterobacter cloacae
atggaagatttgaacgttgtcgatagcatcaaccacgccgggacgtggctggcacgcaaccaggagctgctgctgagctatgccgtcaacatcgtcgcggctatcgctatcctgatcgtcgggatgatcgtggcgcgcgtcgtctctaataccgtcaaccgcctgatgctggcgcgtaaaattgacgctaccgtggccgattttctctctgcgctggtgcgctatgcggttatcgcttttacgctgattgccgccctggggcgggtaggcgtgcagaccgcctcggtgattgcggtgctgggtgctgccggtttggcggtgggtttagcgctgcagggatcgctgtcgaaccttgccgcaggcgtactgctggtgatgttccgcccgttccgcgctggcgagtatgtcgaccttggcggcgtggcaggtacggtgttgaacgtgcagattttctccaccaccctgcgtaccgcggacggtaaagtagtggtggtcccgaacgggaaaatcatcgccggcaatatcattaacttctcccgggagcctgcgcgtcgcaatgagtttattatcggcgtcgcttacgatgctgatatcgacaaggtaaagcagctgctgacctcgattatcgaatctgacgatcgaattctgcgcgatcgggaaatgaccgttcgtctgaacgaactcggcgcctcgtcggtgaacttcgtggtgcgcgtgtggagcaaaagcagcgatctgcaaaacgtctactgggatatcctcgagcgtatcaagcgtgaatttgacgccaacggcatcagcttcccttacccgcagatggatgttcatgtggtgcgcctgccggaaaaagcagagtaa

SEQ ID NO: 139116 - DNA, 1080 bp, Enterobacter cloacae
atgtctaaaatttttgatttcgtaaaaccgggcgtcatcactggcgacgacgttcagaaagtgttccaggtagcgaaagaaaacaactttgcactgccggcggtaaactgcgtaggtactgattccatcaacgccgttctggaagctgcagcgaaagttcgctctccggttatcgttcagttctctaacggcggcgcagcgttcatcgcaggtaaaggcgtgaaaactgacgttcctcagggtgctgctatcctcggcgctatctctggcgcccaccacgtgcaccagatggctgaacactacggcgtgccggttatcctgcacactgaccactgcgcgaagaaactgctgccgtggatcgacggcctgctggacgccggtgaaaaacacttcgccgctactggcaaaccgctgttctcttcccacatgatcgacctgtctgaagagtccctgcacgaaaacatcgagatctgctctaagtacctggcgcgcatggccaaaatgggcatgaccctggaaatcgaactgggctgcaccggcggtgaagaagacggcgtggataacagccacatggacgcttccgccctgtacacccagccggaagacgtggattacgcctacaccgagctgagcaaaatcagcccgcgcttcaccatcgccgcttccttcggtaacgtacacggcgtgtacaaaccaggtaacgtagttctgaccccgaccatcctgcgcgactctcaggaatatgtttccaagaaacacaacctgccgcacaacagcctgaacttcgtgttccacggcggttccggttcttccgctcaggaaattaaagactccgtcagctacggcgtggtgaaaatgaacatcgataccgacacccaatgggcaacctgggacggtatcctgcagtattacaaagcgaacgaagcttatttgcagggccagctgggcaacccgaaaggcgaagatcagccgaataagaaatactacgacccgcgcgtatggctgcgtgctgcccagacttccatggtgactcgtctggagcaggcatttaaagagctgaacgcgatcgacgttctgtaa

SEQ ID NO: 139117 - DNA, 864 bp, Enterobacter cloacae
gtggctgccggtgaactggtggtgctggaaaacgttcgcttcaacaaaggcgagaaaaaagacgacgaagaactgtctaagaaatacgctgcgctgtgcgacgtgttcgtgatggacgctttcggtactgcgcaccgcgcgcaggcttccacccacggcatcggcaaatttgctgacgtggcgtgcgcaggcccgctgctggccgctgaactggacgcgctgggtaaagcgctgaaagagccagctcgtccgatggtcgctatcgttggtggttctaaagtgtccaccaaactgaccgttctggattccctgtctaaaatcgctgaccagctgatcgtgggcggcggtatcgctaacaccttcgttgccgctcagggccacaacgtcggtaaatccctgtacgaagcagatctggttgatgaagccaagcgcctgctgggcacctgcgatatcccggttccgaccgacgttcgcgtagcgaccgagttctccgaaaccgcaacggcaaccctgaaatctgttaacgacatcaaagatgacgagcagattctggaccttggcgacgtttccgcacagaaactggctgaaatcctgaagaacgccaaaaccatcctgtggaacggcccggttggcgtattcgaattccctaacttccgtaaagggactgaaatcgtggctaacgctatcgcggacagcgaaggtttctccatcgccggcggcggtgacaccctggcagcgatcgacctgttcggcatcgctgacaaaatttcctacatctccactggcggcggcgcattccttgaattcgtcgaaggcaaagtcctgccggcagtagcgatgctcgaagagcgcgctaagcagtaa

SEQ ID NO: 139118 - DNA, 1005 bp, Enterobacter cloacae
atgaaaaccaaacgcgtaactatcaaagatatcgccgaactggcgggcgtctccaaagcgaccgccagcctggtactcaacggtcgtggtaaagagctgcgcgtggcgcaggagacgcgcgagcgcgtgctggcgatcgctcgcgaacagcactatcagccgagcattcacgcgcgctcgctgcgcgataaccgcagccataccattggtctggtggtgccggagatcaccaactacgggtttgccgttttctcccacgagcttgagacgctctgccgggaagccggcgtgcagctgcttatctcctgcaccgacgaaaaccctggccaggagagcgtggtggtcaataacatgatcgcccgccaggtcgacggcctgattgtcgcctcttgtatgcacagcgatgccgactatcagaaactcagcgaacagctgccggtggtgctgtttgaccgctcccccagcgacagcgccctgccgctggtgatgaccgactcggtcaccccaacggccgagctgatctcccgtatcgcgcctcagcatgcggacgagttctggtttctcggcggccagccgcggctgtcgccgtcgcgcgaccggctggcggggttcacccagggcctggcccaggcggggatcacgctgcgccctgagtgggtgatcaacggcaactaccaccccagctccggctatgagatgttcgcggcgctctgcgcgcggctggggcgtccgccgaaggcgctcttcaccgcggcctgcgggctgctcgaaggggtgctgcgctatatgagccagcatcatctgctggattccaatattcatctcgccagcttcgacgatcactatctgtatgattcgctttccctgcgcattgataccgtgcagcaggataatcgccagctggcctggcactgctacgatctgctcagccagctgatcgacggtcaggccccggagccgcttcagcgctacctgcccgccaccctgcagattcgccatccctga

SEQ ID NO: 139119 - DNA, 1401 bp, Enterobacter cloacae
atgtcattaccgtcacgcctgcctgcgatcctgcaggccgttatgcagggccagccgcaggcgctggccgacagccattatccgcaatggcatctggcgccggtcaacggactgctgaacgatcctaacggcttttgccaggtcgccgggcgttaccacatgttttatcagtggaacccgctcgcctgcgaccatacctataagtgctggggacactggagctctgccgatctgctgcactggcggcacgaacctatcgccctgatgccggatgaagagtatgaccgcaacggctgctactctggcagcgcggtcgagttcgagggcgccctgactctgtgctacaccggcaacgtgaaattccccgacggcgggcgcaccgcctggcaatgtctggcgaccgagaatgctgatggcaccttccgcaagctggggccggtgctgccgctgccagaaggctataccggccatgtgcgcgaccctaaagtgtggcggcaggacgggcgctggtacatggttcttggggcgcaggatgtgcaacagcgcggcaaagtgctgctgtttaccgccagcgacctgcgggagtggcgcctggtgggcgagatcgccgggcacgacgtgaacggcctggcgaacgccggctacatgtgggagtgcccggatctctttccgctggcggacacccacctgctgatctgctgcccgcaggggctggcccgcgaagcgcagcgctttctcaatacctatccggcggtgtggatggcaggccgcttcgacgccgaacgcgggatcttcgaccacggcccgctgcacgagctggacagcggatttgagttctacgcgccgcagaccatgcaggccgatgatggccgccgcctgctggtcggctggatgggcgtccccgacggggacgagatgcatcagcccacccgcgcgcagggctggatccatcagatgacctgcgtgcgtgagctggagtggcaggctggcactctgtatcagcgtccgctgcgcgagctggtcgccctgcgcggggaagcccagggctggtgcggacagaccctgcccctcgccccgatggagctggcctttgacatcgcccccaacagcacgctggggctggactttgccggcgccctgcagctcaccgtcaatcgcgacggcctgcgtctgtcgcgtcgcggcctgcagacggcggagatgcatcaccgctactggcgcggcgaggcgcgacgcctgcggatctttatcgaccgctccagcgtggagattttcatcaacgatggcgagggggtgatgagcagccgcttcttcccgggctatccggggcagctcatcttcagcggtgcgacgccggtggcattctgccgctggctgctgcggccatgcatggtagaataa

SEQ ID NO: 139120 - DNA, 1371 bp, Enterobacter cloacae
atggattttgaacagatttcccgctcactgcttcccctgctgggcggcaaggaaaatatcgccagcgccgcgcactgcgccacccgcctgcggctggtgctggtcgacgacgcgctcgccgatcagcaggcgattggcaaaatcgacggggtgaaaggctgctttcgcaatgccggacagatgcagatcatcttcggcaccggggtggtcaataaagtctatgccgcctttatccaggccgcaggcatcagcgaatcgagcaaatccgaagccgccgacctggcggcgaaaaagctgaacccgttccagcgcatcgcccgcctgctgtccaacatcttcgtgccgattattccggccatcgtcgcctccggcctgctgatgggcctgctggggatggtgaaaacctacggttgggtcgacccgagcaacgctctctatatcatgctggatatgtgcagttcggcggcgtttatcattctgccgatcctgatcggctttaccgccgcccgcgaatttggcggtaacccctatctgggcgcgaccctcggcgggatcctcacccatccggcgctgaccaacgcctggggcgtcgccgccggcttccacaccatgaatttcttcggcatcgaagtggcgatgatcggttaccagggcaccgtcttcccggtgctgctggcggtgtggtttatgagcatggtcgagaagcggctgcgccgcgtgatccctgacgcgctggacctgatcctcactccgttcctgacggtgattatctccggctttatcgccctgctgctgatcggcccggccggtcgcgcgctcggcgacggcatttcgtttatcctcagcacgcttatcagccacgccggctggctggcgggcctgctgttcggcggcctctattcggtgatcgtcattaccggtatccatcacagcttccatgccatcgaagccggactgctgggcaacccatcgattggcgtcaacttcctgctgccgatctgggcgatggccaacgtcgcccagggcggcgcctgctttgcggtatggtttaaaaccaaagatgccaaaataaaagccatcaccctgccgtcggcgttttcggcgatgctggggatcaccgaggcggcaatcttcgggattaacctgcgctttgtgaaaccgtttatcgccgcgctggtgggcggtgccgccggcggcgcctgggtggtgtcgatgcacgtctacatgaccgcggtaggcctgacggcgatcccggggatggctatcgtgcaggccagctcgctgctgaactacattatcggaatggcgatcgccttcgccgtggccttcgcgctctctctgacgctgaaatacaaaacggacgctgaataa

SEQ ID NO: 139121 - DNA, 1287 bp, Enterobacter cloacae
gtggccaggcgcaccactcaactggaagaaaaagccgaacggcccggcggctttgagttccacggctatgcgcgttccggggtgatcatgaacgactcggccgccagtaccaaatccggcgcttatatgacccccgccggggagaccggcggcgccattggtcgcctgggcaaccaggccgacacctatgtggaaatgaacctcgaacataaacagaccctggacaacggggcgaccacccgtttcaaagtgatggtggccgacggacagaccacctataacgactggacggcaagcagcagcgatctgaacgtgcgccaggcgttcgtcgagctgggcaacctgccgaccttcgaaggcccgttcaaaggctcgaccctgtgggccgggaaacgctttgaccgcgacaacttcgacatccactggattgactcggatgtggtgttcctcgccgggaccggcggcgggatctacgacgtgaaatggaacgacagcctgcgcagcaacttctcgttatacggccgcaactttggcgatatcgccgacagcagcaacagcgtgcagaactatatcgtcagcatgaataactttgccggcccggtgcagatgatggtcagcgggatgcgggcgaaagataatgacgaccgccaggacgcgaacggcaatctggtgaaaggcgatgccgctaacaccggggttcatgccctgctgggcctgcacaatgagagcttctatggcctgcgcgacgggaccagcaaaacggccctgctgtacggccacgggctgggcgccgaggttaaaggcatcggctccgacggcgcgctgcgcccgggggccaatacctggcgcttcgccagctatggcactacgccgctgagcgatcgctggtttattgccccggccgtgctggcgcagagcagtaaagatcgttatgtcgatggcgacagctatcagtgggccaccctcaacctgcgtctgattcaggaagtgacgcagaacttcgccctcgcctgggagggcagctatcagtacatggatctgcagcctgaaggctacaacgatcgccatgcggtcaatggcagcttctacaagctgaccttcgccccgaccttcaaggtgggcagcatcggcgacttcttctcgcggccggagatccgcttctatacatcgtggatggactggagcaaaaaactggacaactacgccaacgatgacgcgttaggcagcaacggattcaaatcgggcggcgaatggtcgttcggtatgcaaatggagacctggttctga

SEQ ID NO: 139122 - DNA, 1572 bp, Enterobacter cloacae
atgagccagcaagtcattattttcgatacgaccttacgtgatggcgaacaagcgttacaggcaagcctgagtgtcaaagagaagctgcagatcgcactggcccttgagcgaatgggggtcgacgtaatggaagtcggtttcccggtatcctcgccgggcgattttgaatcggtgcaaaccatcgcgcgcaccattaaaaacagccgcgtgtgcgccctggcgcgctgcgttgagaaagatatcgacgtggcggcggaatcgttaaaagtggccgaggctttccgtattcatacctttattgccacctcgccgatgcatatcgccaccaaattgcgcagtacgctggatgaggttattgagcgcgcgatctatatggtgaagcgggcacgcaactacactgacgacgttgagttctcctgtgaagacgccggccgtacgccgattgccgatctggctcgcgtcgtggaagcggcgatcaacgccggcgccaccaccattaatatcccggataccgtcggctataccatgccgttcgaatatgccaacatcatcagcggcctgtatgatcgcgtgccgaatatcgacaaagcaattatttccgtccacacccatgacgatctgggcatcgctgtcggtaacgccctcgccgcggtccacgccggtgcgcgccaggtagaaggtgcgatgaacggtatcggcgaacgcgccggcaactgcgcgctggaagaagtgatcatggcgatcaaagtgcgcaaagacatcatgaacgtgcacaccaacattaatcatcatgaaatctggcgcaccagccagaccgttagccagatctgcaatatgccgatcccggcgaataaggccatcgtcggcaccggcgccttcgcccactcctccggcattcaccaggacggcgtgctgaagaaccgcgaaaactacgagatcatgaccccggaatctatcggcctgaaccaggtgcaactgaacctgacttcccgctccggccgcgcggcggtgaaacaccggatggaagagatgggctaccaggagagcgattacaacctggatcatctgtacgacgcattcctgaagctggcggacaaaaaaggccaggttttcgattacgatctggaagcgctggcctttatcaacaagcagcaggaagagccagagcatttccgcctggattacttcaacgtccaatccggatccagcgatatcgccaccgcctcgatcaaactggtctgcggggatgagatcaaaaccgaagccgccaacggcaacggtccggtcgatgctatctaccaggcgattaaccgcgtcaccgactacaacattgaattagtgaagtatggcttaagcgcgaaaggccacggcaaagacgccctgggccaggtggatatcgtcgttgactacaatggccgccgcttccatggcgttggtctggcaacggatatcgtagagtcgtcagccaaagcgatggttcacgtgctgaacaacatctgttgcgccgccgaagtcgaaaaagaattgcaacgcaaagctcagaataaagagaacaataaggaaaccgtgtaa

SEQ ID NO: 139123 - DNA, 1092 bp, Enterobacter cloacae
atgtcgaagaattaccatattgccgttttgccgggtgatggcattggcccggaagtgatgaaccaggcgatgaaagtactggaagccgtgcgccaacgttttgccatgcacattaccaccagccagtatgacgttggcggggcggccatcgaccgtcagggaactcccctgccgcaggcgaccgtcgccggatgcgagcaggcggatgcgatcctgttcggctccgttggcggtccgaaatgggagcacctgccgccggcggaacaaccagagcgtggcgcgctgctgccgctgcgtaaacactttaaactgttcagcaacctgcgcccggccaaactgtatcaggggctggaagagttctgcccgctgcgcgccgacatcgctgctaacggcttcgacattctctgcgtacgcgaactgaccggcggcatctacttcggccagccgaaaggccgcgaaggcagcggtcagcatgagaaagcctttgataccgaggtgtatcaccgctttgagatcgagcgtatcgcgcgcatcgcttttgaatccgcccgcaagcgtcgtcacaaagtgacttccatcgataaggccaacgttctgcagtcctccatcctgtggcgcgaaatcgtcagcgagatcggcaaggagtatccggacgttgagctggcgcatatgtatatcgataacgccaccatgcagctgattaaagatccgtcccagttcgacgtgctgctgtgctccaacctgtttggcgacatcctctccgacgagtgcgcgatgatcaccggctcgatgggtatgctgccgtccgccagcctcaatgaacaaggttttggcctgtacgagccggcgggcggttccgcaccggatatcgccggcaaaaatatcgccaacccgatcgcgcagatcctctccctggctctgctgctgcgctacagcctcgacgctgacgaagcggcgaccgccattgaaaacgcgatcaaccgcgccttagaagaaggggttcgaaccggcgacttagcgcgcggcacggcggcggtcagcactgatgaaatgggcgatattattgcccgctatgtcgcagaaggggtgtaa

SEQ ID NO: 139124 - DNA, 1401 bp, Enterobacter cloacae
atggcgaagacgttatacgaaaaattatttgatgcgcacgtagtgtatgaggcgcagaacgaaaccccgctgctgtatatcgaccgccatctggtgcacgaagtcacctctccgcaggcgtttgacggtctgcgcgcccatggccgccaggtgcgccagccgggtaaaaccttcgctaccatggatcataacgtctcgacgcagaccaaagacattaacgcgtccggtgagatggcccgcattcagatgcaggagctgattaagaactgtaaagagttcggcgttgaactgtacgacctgaaccacccgtatcagggcatcgtccacgtcatgggcccggaacaaggggttaccttgccggggatgacgatcgtgtgcggtgactcccataccgccacccacggcgcgttcggtgcgctggcgttcggtatcggcacctccgaagtggagcatgtgctggcgacccagaccctgaaacagggccgcgcgaagaccatgaaaatcgaagtccagggcaaagcggcgccgggcattaccgccaaagatatcgtgctggccatcattggtaaaaccggtagcgccggcggcaccggccatgtggttgagttctgcggcgaagcgatccgcgatctgagcatggaagggcgtatgaccctgtgcaacatggcgatcgagatgggcgccaaagcgggcctggtcgcgccggacgaaaccaccttcaattacgtacgcggccgtctgcatgcgccgaaaggcaaagattttgacgatgccgtagcgtactggaaaaccctgaaaaccgacgacggcgcgacgtttgataccgtggtgacgctgcaggcggcggaaattgccccgcaggtgacctggggcaccaacccgggccaggtgatctcggtgacggataacatccccgatccagcgtcgttcagcgatccggtggaacgcgccagcgccgaaaaagcgctggcctatatggggctgaaatccgggatcccgctgacggaagtcgctatcgataaagtgtttatcggctcctgcaccaactcgcgcatcgaagatttacgcgccgcggcggaaatcgctaaagggcgtaaagtggcgccgggcgtccaggcgctggtggtgccgggttctggtccggtgaaagcgcaggcggaagcggaaggtctggataagatctttatcgaagccggctttgagtggcgcttacctggttgctctatgtgtctggcaatgaataatgatcgcctgaatccgggcgaacgctgtgcctcaaccagcaaccgtaactttgaaggccgtcagggccgcggcggacgcacgcacctggtgagcccggcaatggccgcggcggcagccgttaccggccatttcgccgatatccgtaatctgaagtaa

SEQ ID NO: 139125 - DNA, 606 bp, Enterobacter cloacae
atggcagagaaatttacccaacataccggcctggtggttccgctggatgctgcaaacgtcgataccgacgcgatcatccctaagcaatttttgcagaaggtcacccgcaccggctttggcgcgcacctgtttaacgactggcgctttctcgacgataaaggtcaacagccgaacccggagttcgtgctgaattttcctgagtaccagggggcatcgatactgctggcgcgggaaaacttcggctgcggctcctcgcgcgagcacgcgccgtgggcgctgaccgattacggctttaaggtcgttatcgccccgagctttgccgatatcttttacggcaacagcttcaataaccagctgctgccggtgaccctgagcgacgagcaggtcgatgagctgttcaagctggtgcaggccaacccgggcattacgtttgaagtggatctggaagcgcaggtagttaaagccggggataaaacctacagctttaagatcgacgatttccgccgccactgcatgctcaacggcctggatagcatcggcctgacgctgcagcatgaagcggcgatctccgactatgaacgcaagctgccggcgtttatgaattaa

SEQ ID NO: 139126 - DNA, 1386 bp, Enterobacter cloacae
atgactgagaaaaaagcggagctccagcgtggactggaggcccggcatattgaactgatcgcccttggcgggacgattggcgtggggttgtttatgggggcggccagtaccttgaaatgggctgggccttccgtgctgctggcgtatattatcgctggcctgttcgtctttttcattatgcgctcaatgggcgaaatgctgttccttgagcctgtcactggctccttcgcggtgtatgcgcatcgctatatgagccccttcttcggctatctgaccgcgtggtcctactggtttatgtggatggcggtggggatctcggagattaccgccatcggggtctatgtgcagttctggttcccggagatggcgcagtggatcccggcgttaattgctgtgggactggtggcgctggcgaaccttgcggcggtccggctatacggtgaaatcgagttctggttcgccatgataaaagtgaccaccattatcgtgatgatcgtcgtgggtctgggcgtcattttcttcggctttggcaacggcggccactccatcggttttggtaatctcaccgaacatggtggtttctttgctggcggctggaagggcttcctgacggcgctgtgtatcgtggtcgcgtcctatcagggggtggagctcatcggcattaccgcaggtgaagcgaaaaacccgcaggtgacgctgcgcagcgcggtgggcaaagtgctgtggcggatcctgattttctacgtcggcgcgatttttgttatcgtcactatcttcccgtgggatcaaatcggctccaacggcagcccgttcgtactgacgtttgccaagatcggtattaccgcggcggcgggaattatcaacttcgtggtgctgacggcagcgctttccggctgcaacagcggaatgtacagctgcggacgtatgctgtacgccctggcgaagaaccgtcagctgccggcggcgatcggtaaggtatcgcgcaacggcgttccgtccgtcggtgtggcgctgtcgattctgatcctgctggtgggctcctgcctgaattacattattcctaatccgcagcgggtgttcgtctatgtctatagcgccagcgtcctgccggggatggtgccctggtttgtgatcctgattagtcagctgcgtttccgtcgcgtgcatcaggcggcgattgccagccatccgttccgttcgctgctgtttccgtgggccaactatttcacgatggccttcctgatctgcgtgctggtcgggatgggactgaatgatgaaacccgcatgtcgctcttcgtcggcattatttttctggccgccgtcaccctgatttataaggtgtttggcctcggaagacaggggcaagtcaataatacggctgaataa

SEQ ID NO: 139127 - DNA, 741 bp, Enterobacter cloacae
atgactgggaccatttccgcgccgttgtacctgttaagagggctgcagctcataggctggcgcgatatgccgcacgctctggattatttgtttgccgacggcgcgctccgggaggggacgctggtggccattaatgctgagaaaatgctggccgtagaagataacccggaggtacgggcgctgattgaggcggcggagtttaaatatgccgatggcatcagcgtggtgcgttcgctgcgcaaaaaatacccgcaggcccaggtatcccgcgtcgccggggccgatctctgggaagcgttaatgcagcgcgctggcgctgaagggacaccggtgtttttggttggtggtaaacctgaggtcctggcgcagacagaatccaggctgcgtcagcgctggcaggtgaacatcgtcggcagccaggacggttatttcacccctgagcaacgccaggcattgttcgaacgcattcgcgacagcggggcgaaaatcgtcaccgtcgcgatggggtcgccgcgccaggagatcttcatgcgcgactgccggcgcctgtatccgcacgcgctgtatatgggcgtcggcggcacttacgatgtttttaccgggcacgtccatcgggcgccgaagttctggcaggatctggggctggagtggttctatcgcctgcttttgcagccgagccgcatcaagagacagttccgcctactgcgctatttacgttggcattattccggtaagctctga

SEQ ID NO: 139128 - DNA, 1347 bp, Enterobacter cloacae
atgacgttaatgcaatttagcgggctgctggtggtctggctgctgtcgacgctgttcatcgccaccgccacctggtttgagttccgtcgggtacgctttaacttcaacgtttttttctcgttgctgtttctgctgacctttttcttcggcttcccgctgaccagtattctggtgttccgctttgacgtcagcgtggcgccgccggagattttgctgcagacgctgctgatcgcggtgtgcttctacgcagtctactacgtgacctataaaacgcggctgcgttcggcatcgcgtgaggttgcgcatcgcccgctgtttaccatgaaccgggtggaaacccatctggcgtggggcattttgatggggctggcgctgctgtgcgtcggcatcttcttcgcccacaacggtttcctgctgtttaagctcaactcctacagccagattttctctgctgaagtgtccggcgtggcgttgaagcgcttcttttacttctttattccggcgatgctggtggtctattttctgcgccaggattataaggcgtggatcttcttcctcgtcagcacggtggcttttggtttgctgacctacgccatcgtcggcgggacgcgcgccaatattatcatcgccttcgccatctttctgttcatcggtattattcgcggctggatcagcctgtggatgctggcggcggcgggtgtgctgggtattgtcggcatgttctggctggcgctgaagcgctacgggatgaacgtcagcggcgacgaagcgttttatacctttctgtatctcacgcgcgacaccttctcaccgtgggagaacctggcgctgctgctgcagaactacgacaagatcgatttccaggggctggcgccgatgatccgcgatttctacgtctttatccccagctggatgtggcacggtcgcccgacgatggtgctcaataccgccaactactttacctgggaagtattaaacaaccattcggggctggcgatttcgccgacgctgattggctcgctggtggtgatgggcggcgtctggttcgtaccgctgggcgccgtggcggtagggttgattattaaatggttcgactggctgtatgagctgggcaaccgggagagcaatcgctataaagcggctatcctgcacagtttctgtttcggcgctatcttcaacatgatagtgctggcgcgcgaggggctggattcgttcggctcccgcgtggtgtttttcctcgtgatctttggtatctgcttgctggcggcgaaactgctgtactggttcctggatagcgtgggactgattcataagcgcgtaaaaccgctttcgcaaccgcaagtctga

SEQ ID NO: 139129 - DNA, 1077 bp, Enterobacter cloacae
atgacagcactgatacatgtactgggatcggatatcccgcatcataaccagaccgtactgcggttctttaacgacgaactggccgccgacccgcaggccaggagatttatgatcgtcggtgatgaggccagcgtgcgtgatgggtatccggcgctggatgtcacctgttatccggggaaaaaggcgctggcgcaggcagtgattgctaccgcgaaagccaaccgccagcagcgctttttcttccacggccagttcaataccgggctgtggctggcgctgttgagcggcggcatccgcccgtcgcagtttaactggcatatctggggggcggatctgtatgaaaattctgccagcctgaagtttcgcctgttctatccgctgcgccgtatggcgcaggggcgggtagggcgcgttttcgccacccgcggcgatctcagctggttcgctaaccgccatccgcgcgtcccgggcgagctgctctacttcccgacccgtatggatccggcgctgaataccctggccgataacgctccgcgcggtgataccctgactattctggtgggcaactccggggatcgcagcaatgaacatattgccgcgctgaaggcaatccatcagcagtttggcgatacggtaaacgtgatcgtgccgatgggctatccagcgaaaaacgacgcctatatcaatgaggttcgcgaggcgggggcggcgctgtttagcggtgagcatctgcagatcctcagcgagaagctggagtttcatgattatctggcgctgctgcgccgctgcgatctgggctattttctgtttgcccgccagcaggggatcggcaccctgtgtctgctgattcaggcgggcatcccctgcgtgctcaatcgggaaaacccgttctggcaggatatggccgagcagcatgtgccggtgctgttcaccagcgacgcactggacgtcagcgtggtgcgcgaagcgcagcgtcagctggcgagcgtggataaatccgctatcgccttcttccggccgaactatctgacgggctggcggcgggcgctacggttagcggcggaggggcaggcatga

SEQ ID NO: 139130 - DNA, 264 bp, Enterobacter cloacae
atgcgtgacctgtttgcctggcagctggtgggcgacgttttaaaagtaggcgcctacgtctatggctatctggtgatcgccaaagcgtcgctgcgtttttatattctgacggaaatcagccagttcgcactgctgaccgcattctcacactggcttataccggcgcacggcgcggttggcgcggcgcaggcatatatggccacttatattgtttatttcgccctttgtagtggcgtgtttttactctggcgtaaacgggtatga

SEQ ID NO: 139131 - DNA, 213 bp, Enterobacter cloacae
atggttggtactttctatcgtacgccgagcccggacgcgaaagcgtttgtggaagttggccagaaagttaacgtgggcgacaccctgtgcatcgtcgaagcgatgaaaatgatgaaccagatcgaagccgacaaagccggcgtggtgaaagccattctgatcgaaagcggccaaccagtagaattcgacgagccgctggtagttatcgagtaa

SEQ ID NO: 139132 - DNA, 1350 bp, Enterobacter cloacae
atgctggataaaattgtcatcgctaaccgtggcgagatcgcactgcgcatcctgcgtgcctgtaaagaactgggcatcaagactgtcgctgtgcactccactgcggatcgcgatctaaaacacgtattgttagcggatgagacggtctgcatcggtccggctccgtccgtaaaaagctatctgaacattccggccattatcagcgccgctgagatcactggcgcggtagcgattcacccgggttatggcttcctctctgagaacgctaattttgctgagcaggttgagcgttccggctttatcttcatcggcccgaaagccgacactatccgcctgatgggcgacaaagtgtccgcgatcaccgccatgaagaaagccggcgtcccgaccgttccgggttctgacggcccgctgaccgacgacatggacgctaaccgcgcccatgctaaacgcatcggctacccggttatcatcaaagcctccggcggcggcggcggtcgcggtatgcgcgttgtacgtagcgacgctgaactggcacagtccatctccatgaccaaagcggaagccaaagcggctttcaacaacgacatggtctacatggagaaatacctggaaaacccacgccacattgaaattcaggtgctggcggatggtcagggtaacgctatctatctggctgaacgtgactgctccatgcagcgccgtcatcagaaagtggtcgaagaagcgccggcgccgggcatcaccccggaactgcgtcgctacatcggcgagcgttgcgcgaaagcctgtgtggatatcggctaccgcggggcgggtacctttgagttcctgttcgaaaacggcgagttctacttcattgaaatgaacacccgtatccaggtagagcatccggtaactgaaatgatcaccggcgttgacctgatcaaagagcagctgcgtatcgcagccggccagccgctgtccatcaagcaggatgaagtggtggttcgcggccatgcggtggaatgccgtatcaacgccgaagacccgaacaccttcctgccgagcccgggcaaaatcacccgtttccacgcgccgggtggctttggcgtgcgctgggagtcacatatttacgccggttacaccgtaccgccgtactatgactccatgatcggtaaactgatctgctacggcgaaagccgtgacgtggcgattgcccgcatgaagaatgcgctgcaggagctgatcatcgatggcatcaaaaccaacgtcgatctgcagatgcgcattatgagcgacgagaatttccagcatggtggcaccaatatccactatctggagaaaaaactcggcttgcaggaaaaataa

SEQ ID NO: 139133 - DNA, 243 bp, Enterobacter cloacae
atggacaaacgctttgttcaggcccacaaagaagcgcgctgggcgctgtggctgacccttctctaccttgccgcctggctggccgccgcctatctgccgggggtggctattggctttaccggcctgccacactggtttgaaatggcctgcctgctggtaccgctgctgttcattctgctgtgctgggcgatggtcaaactgattttccgcgatatttctctggaggacgatgatgcagtttga

SEQ ID NO: 139134 - DNA, 1452 bp, Enterobacter cloacae
atgcagtttgaggtcattattcccctgatcgcctacctggtggtggtgttcggtttatccctctacgccatgagaaaacgcgcctcaggtagctttcttaatgagtactttctcggcagccgctcgatgggcggcttcgtgctggccatgacgctaaccgccacctatatcagcgccagctcatttataggcggacccggcgccgcctataaatacggcctgggctgggtgctgctggcgatgatccagctccccgccatctggctgtcgctgggcgtgctggggaaaaaattcgccatccttgcgcgtcgctataatgctgtcaccctcaatgacatgctgtttgctcgctatcagagtcgcctgctggtctggctggccagcctgagtctgctggtggcctttgtcggcgccatgaccgtccagtttatcggcggcgcccgcctgctggagacggctgccggtattccttacgataccggcctgctgatcttcggggtcagcatcgcgctgtataccgcctatggcggctttcgcgccagcgtgctcaacgacacgatgcagggcatggtaatgctgatcggcacgatcgtgctgctggtgggcgtgatccacgccgccgggggggttggccatgcggtagagacgctgcagtcgatcgacgtcaagctggtgtccccgcagggcgcggaggatatcctctcgccaacctttatggcctcgttttgggtgctggtctgcttcggcgttattggtctgccacataccgcagtgcgctgtatctcctacaaagacagcaaagccgtgcatcgcggcatcattatcggcaccatcgtggtggcgatcctgatgtttggcatgcatctggctggggcattaggccgggcggtgatccccgatttaaccgtgccggatctggtgatcccgacgctgatggttaaagtgcttccgccctttgccgccgggatcttccttgccgcgccgatggcggcgattatgtcgacgatcaatgcccaacttctgcaaagttccgctacgatcatcaaagatctgtacctgaactggcggccggatcaggcgactaacgaaaagcggcttaaacgcatgtccgccggcatcacgctcctgctgggggtcttgttgctgctcgcggcctggcggccgccggagatgataatctggctgaacctgctggccttcggcggcctggaagccgtcttcctgtggccgctggtgctgggcctttactgggaacgcgccaacgcggctggcgcgctgagcgccatgatcgtaggcggcgtcctgtatgccgtactggccacgctgaaagtgcagtttctgggctttcacccgatcgttcccgcgctgctgctgagtttgctggcgtttgtggcggggaaccgtttcggtcgtcccgccccacagccccccattttgactactgataaataa

SEQ ID NO: 139135 - DNA, 882 bp, Enterobacter cloacae
atgccatggatccaactgaaactaaataccaccggcgcgaacgctgaagatcttagcgatgcgctgatggaggccggatcggtctcgatcaccttccaggatacgcacgatacgccggtatttgagccattgcccggggaaacccgcctgtggggggataccgacgtaatcggcctgttcgatgctgaaaccgatatgaaagcggtcgttgcccaactggagcagcatccgctgctgggcgccgggttcgcgcataagatcgagcaactggaagataaagactgggaacgggaatggatggataacttccaccccatgcgcttcggggagcggctatggatctgcccaagctggcgcgatgttccggatgaaaatgccgtcaacgtgatgctcgatccgggtctggcctttggcaccggtacgcatccgacgacatccttgtgtctgcagtggctggatggactcgacctcaacggaaaaacggtgattgatttcggctgcggctccggcatcctggcgattgccgcactgaagctgggggcggcaaaagcaatcgggattgatatcgacccgcaggctattcaggccagtcgtgataacgcgcagcgtaacggcgtttctgaacgcctggagctctatcttcctcaggaccaaccggagtcgatgaaagccgacgtggtggtcgcgaatatcctggcaggcccgttacgtgagctggcgccgttaatcagcgtcctgcccgtttcaggcggtttgctggggctttccggcatccttgccagccaggcggagagcgtctgtgaagcctatgccgatctcttcgcccttgacccggtggtcgagaaggaagagtggtgccggattaccggccggaaaaactaa

SEQ ID NO: 139136 - DNA, 1221 bp, Enterobacter cloacae
atgaaataccattcagcaccgctcatcccgcacaaatccgccctcatgtccgcgccggctaatctgctggcggaagaggtctgtctacccgccgcgctgctaaaaaagtcggcgctggaaaataatatttcatggatgcagcgctacgccgacgcccgcggcgtatcgctggcgccgcatggtaaaacgacaatgacgccatggatatttcaggcgcagcagcgagcgggggcgtgggggatcggcgtgggcagcgcctggcaggctagcgcggcaatggccagcggcatccaacgcgtcctgatggtcaatcagctggtcggcaaagccaatatgcaggtggtcgcgcagctaaaagcccactatcgggcggtggattttatctgctgcgtcgatagcgaggtcaacgtgcgcgccctctccacattcttcgcagaccagggacaaacgctggatgtgctgattgaacttggcgtgcctggcgggcgctgcggctgtcgtagcgtcaatgacgcgctggcgctggcgcagcgggtaagcgacctgccggggttacggctacgcggactggaattgtatgaaggggtgctgcacggcgacgatccgcagccgcaggtggaagcgctgttacagcaggccgcggcgcttgcctgccgcatggagccgctggttgacggcgaatttattctcaccggcgcgggcaccgtctggtatgacgtggtgtgcaacatctggctggcggcggcaaaaccgcgccgctgccgtatcgtcatccgccctggctgttatatcacccacgatcgcgggatctacgatctcgcccaacaagagctgatcgcccgcgatccgattgcctgcgatctcgccggcgatcttacatcagcgctggagctgatggcgatggtgcaatcggtgccggaggcggatcgcgcggtggtaaacttcggcaagcgcgactgcgctttcgacgccgggctgccgcagccgatcgcccattatcgtaacggccagcagttagcgctgcgcgcggagtcgatcgtcagcaccggcatcatggatcagcactgtatgctgcgcctggcgccgggcagcgatgtgcaggtcggcgatattctgctgttcggcacctcgcacccgtgtctgacctttgataagtggaagacgttgctgctggtcgatgacgactacaacgtgctggacgagctcgacacgctgttttga

SEQ ID NO: 139137 - DNA, 1017 bp, Enterobacter cloacae
atggagtcggtaactctatcgttacctgaagcttatgacctggcgctggaggtactcagcgccaatggatttagcgccgaccacgcggcggcgattgcccgcaatgtgaccgccggggagcgcgacggctgcgcttcccacggcctgtggcggctgttgggcattgtcgataccctgcgcaaaggtaaggtatcgcccgatgccgagccgcagatccatgaccaggcgccggcgattgcgcgggcggacgccgggggcgctttttcattgctggcctacgagcgcgcgctgccgctgctgctggagaaggcgcgccacaatggcattgcggcgctggcaatcaatcgctgcgttcatttttccccgctgtttgccgatattgagccgttgaccgaggcagggctggtagggctggcctgtacgccaagccacgcctgggtcgccccggcgggcggcacacgtccgctgttcggcaccaaccccatcgccttcggctggccgcggcaggataagccgccgtttattgttgatatggcgaccagcgccgcggcgcgcggcgagatccagctgcatcagcgcgccggcaaagcgctaccggaaggctggggaatcgacagtcagggacagccaacgaccgatgccgcagaggtgctgaacggcgcgatgttgactttcggcggccataagggctcggcgctggcggcaatggttgagctgttggccgggccgcttatcggcgatatgaccagcgccgaatcgctggcgtgggataacggcgcgggcggtctcccctacggcggcgagctgattctggcgctggatccgcagcgttttctcggcgcacaggcaccagagcagctggcgcgcgccgaaacgctgttcatgggtatgcaggaacaaggggcgcggctgccgggcgagcggcgttttgcctgccgccagcagagtgaacggcagggggtcattatcagtcgttcattgcatgatgagatttgcgccttgcgccagggcgggtaa

SEQ ID NO: 139138 - DNA, 1602 bp, Enterobacter cloacae
atgaccattcactctacgcataacagtcaaacccgcgttgcagagtcgggtaagtttaaaaaacagctgaccctaaccgatctcacctttatcggcctgggagcaattttcggctccggatggttattcgctgccagccacgtcgcatccatcgctggtccggccgggatcgcatcgtgggtgatcggcggctttgcggtgctgctgctggggattgtctactgcgagctgggggcggcgctgccgcgcgccggcggcattattcgctacccggtcttttcccacggcgagctgatgggctatctactggggttcatcaccctgattgctttctccagcctgatctcgattgaaattgtcgccgcccggcaatatgccgccgcctggtttccggcgctgacccaaccgggctccagttcgccgacgctgctggggtgggtggtgcagttcttgctactctgtttcttctttgcgcttaactactacagcgttaagaccttcgcccgatcgaacaacttcatcagcgtgctcaagtttctggtgccgctgctggtggtggtgacgctgttcgccttctttaaaccggagaacctgcacgctcaggggattgcgccgttcggcatgtccggggtggaagcggcaattagcgcgggcggaattatcttcgcttatctggggctgacgccgattatctcggtggccagcgaagtacaaaagccgcagcggactatccctattgcgttgattttatcagtggtgctgtcgacgattatctacgtgctgctgcagctggcgttccttggcagtatccccaccgagatgctgaacggcggctgggccgaggtgagcaaacagttctcgctgccgtatcgcgatatcgccattaccctcggcatgggttggctggcctttatggtgataagcgatgcgattatctccccgagcggcaccggcaatatctatatgaacgcgacgccgcgggtgatctacggctgggcgaaggcgggtactttctttaaggcctttacccatattgataaagcgtccgggattccgcgcccggcgctatggctgacctttgggctgtcgattttctggacgctgccgttcccctcctgggaacagctcattagcgtggtatcggcagccctggtgctgagctacgccatcgccccggtgactgccgccgggctgcgccgcaacgcgccggatctaccacggccgttccgcgtgcgcgccttcggcatcatcggcccgatatcgtttatgatctcggcgctgatagtctactggtccggctggaatacgctctcgtggctgttggggctgcaaatcgtgatgtttgtcgtctacgtgatgtgcaaaggtaaggtgccggaacataccgtgagcctggcgcagcaggttaagtcttcgctgtggctgatcgttttttatgcgttgattatcatcttttcctggctgggcagcttcggcgggcttaatgttatcggtcacccctgggatacggtgctggtggcggcgatgtcgttggggatttactactggggcgcgcgcagctgcctgccgcaggctaactttagcggagacgaagaagagtaa

SEQ ID NO: 139139 - DNA, 600 bp, Enterobacter cloacae
gtgttgctcaatgcgccgacccttcagcactaccgtcagggcgtggcggcgcttgcggcgcacccgcgtatcgagaagttggcgagcggcatcgccgccggcgccgggcaggcgcagaccctgctgtggcaggctcaggtcgaggatctgttggcgcaggatacgctgctgcagaccgaagttttcggcccgttatcgctactggtggaagtggatgatgaggcccaactgaaggcggtggtgaaagcgcagcagggtcagctcaccgcgacgctgcatgccgaggcggatgatggcccgctggcggcgagccttctaccgctgctttgtgagaaggctggacgggtgctgtttaacggttatcccaccggcgtggaagtgtgcgatgcgatggtccacggcggcccgtggccggcgaccaccgacgcacgcgggacctcggtcggcagtcgggcgattgaacgctttctgcgcccggtctgtctgcagaacgcgcccgccgccctgttaccgccggcgctgcaggatgcgaaccctttgaacctgctgcgcctggtcaacggccagtggacccgggaagcgatttcctcctctcattga

SEQ ID NO: 139140 - DNA, 453 bp, Enterobacter cloacae
gtgtttggcgccagcaactttccgttggccttttccaccgccggcggcgataccgcctcggcgctggcggctggctgtccggtggtggtgaaggcccatccgggccatatggccaccgccgagctgaccgccgaggcgatcgtcagggcggtggtacggtgcggtttacccggcggcgtattcaatatgattttcgggaccgatatcggcgccgaattggtccgtcatccggcgattcaggccgttggctttaccggttcgttagccggcggtaaggcgctgtatcagctggcgcagcagcgcccgcagccaattccgctgtttgctgaaatgtcggcgattaacccattgattattctgccgcaggcgctgcagacgcgggccgaggcgctggcaaacgagctggcggcgccgggctggaacgctttaagtcggcgctgtgcgcggcggtag

SEQ ID NO: 139141 - DNA, 495 bp, Enterobacter cloacae
atggaagtgacgcagttcacctacttccagcaggtcggcggcctcgagtgtaagccggtgaccggcgagatcacctacggtctggagcgtctggcgatgtacatccagggtgtggacagcgtctatgacctggtctggagcgatggcccgctggggaaaaccacctacggcgacgtgttccaccagaacgaagtggagcagtccacctataacttcgaatatgccgacgtcgacttcctgttcacctgcttcgaacagtatgagaaagaggcccagcagctgctggcgctggagaccccgctgccgctgccggcctacgagcgtattctgaaagcggctcacagcttcaacctgctggatgcgcgtaaagccatctccgtcaccgagcgtcagcgctatatcctgcgcattcgcaccctgactaaagcagtggcggaagcgtactacgcttcccgtgaagcgctcggcttcccgatgtgcaacaagaataaataa

SEQ ID NO: 139142 - DNA, 2070 bp, Enterobacter cloacae
atgtctgagaatacttttctggtggaaatcggcactgaagagctgccaccaaaagcgctgcgcagcctggcggaatcttttgctgcgaatgtgaccgcggagctggataacgctggacttgcgcacggtaaagtggaatggtttgccgccccgcgtcgtctggcgctgaaggtggccaacctggcggcggcgcaagccgatcgcgaagtggaaaaacgcggcccggctattgcccaggcgttcgatgccgaaggcaagccaagcaaagcggccgaaggctgggcgcgcggctgcggtatcaccgtcgatcaggccgaacgtctgaccacggacaaaggcgagtggttgctgtatcgcgcccatgtgaagggcgaaagcaccgaagcgctgctgccgaacatgattgccagctcgctggcgaagctaccgatcccgaaactgatgcgctggggcgcgtctgacgtccacttcgtgcgtccggtacacacggtgactttgctgctgggtgacaaagtgatcccggccactatcctcggtattccgtccgatcgcgtgattcgcggccatcgctttatgggcgagccggagttcaccatcgaccatgccgaccagtacccgcagatcctgctggagcgcggtaaagtcatcgccgattacgaacagcgtaaagccaaaatcaaagctgatgcgcaagaggcggcgcgtaagattggcggtcaagccgatctgagcgaaagcctgctggaagaggtcacctcgctggtggaatggccggtggtgctgacggcgaagttcgaagaaaaattcctcgcggtgccgtctgaagcgctggtttacaccatgaagggcgaccagaagtacttcccggtctacgacaacgccggcaaactgctgccgaactttatcttcgtggccaacatcgagtccaaagatccgcagcagatcatctccggtaacgagaaggtggtccgtccgcgtctggccgatgccgagttcttcttcaataccgaccgtaaaaaacgtctggaagataacctgccgcgtctggaaaccgtgctgttccagcagcagctgggcaccctgcgcgacaagaccgatcgcatccaggcgctggcgggttggattgccgaacagattggcgctgacgtgaaccacgcaacccgcgcgggcctgctgtccaagtgcgacctgatgaccaacatggtcttcgagttcaccgacacccagggcgtgatggggatgcactacgcgcgccatgacggcgaagcggaagacgtggccgtggcgctgaacgagcagtatcagccgcgatttgctggcgacgcgctgccatctaatccggtggcctgcgcggtagcgattgccgataagatggacaccctggcgggtatctttggtatcggtcagcatccgaaaggcgataaagacccgtttgcgctgcgtcgcgccgcgctgggcgtgctgcgtatcatcgttgagaagaacctggatctcgatctgcagacgctgaccgaagaagcggttcgtctgtacggtgagaagctgaccaacgccaacgtggttgatgatgtgatcgactttatgctgggccgcttccgtgcctggtatcaggacgaaggctacggcgtcgacacgatccaggcggtactggcgcgtcgtccaacccgcccggcggatttcgatgcgcgtatgaaggcggtatcgcacttccgtactctggaagagtcctccgcgctggcggcggcaaacaaacgtgtctccaacatcctcgcgaaatccgatgagacgctgaacgacatcgttcacgcttcggtgctgaaagaagcggcggaaattaagctggcgggtaatctggtggtgctgcgcgacaagctgcagccgtatttcgccgcaggccgttatcaggatgcgctgattgagctggccgcgctgcgcgagccggtggatgagttcttcgagaacgtgatggttaacgctgaagacaaagatgttcgcatcaaccgtctgaccctgctgtccaaactgcgtgaactgttcctgcaagtggcggatatttctctgctgcagtaa

SEQ ID NO: 139143 - DNA, 153 bp, Enterobacter cloacae
atgccgcaaaagtatctgttgtttggcttagtagtgatttgcttcactattttattattgacctggatggttcgtgattctctatgtgaattacagcgcaggcagggaaatattgagctggtggcattcttagcctgtgatattaaacagtaa

SEQ ID NO: 139144 - DNA, 1620 bp, Enterobacter cloacae
atggctcattgcgcccacatccccgcttttgttttacatcaggtcacctgtcagtttgcgacgggacagaccctgtttggtccgctcagcgtctcgctggaaccgtccctttgcggcctggtcggccggaacggcgtcggcaagacgcgtctgctgcgtctgctggcgggccttgattctcctgccggcggccatattgagcgcgccgccgccgttgcctgggtagcgcagcagccgacgctcacgccggagaccaccctcgctacgctgctgggctatgcgtcggtttttgccgccttgtctcgccttgaacagggccaagggctggccgacgatttcgatctgttagatggtcactgggatctcaccgatcgcctgagtttagcgttccgtgaagccgatctcccgccgttctctgccgatcgccccgcgttttcactcagcggcggcgagcggatgaaggctctgctgtgcggcgccttcgtctcgggcgccgattatctgctgctggatgagcctaccaaccatctggaccgccaggggcgggagtggctctatcaccaactggaaagctggcagggcggggctctgatcgccagccacgaccgcgagctgctgacgcggatgccgaggattattgagctgacgccgacggcgctgcgcagctacggcggcaactatgatgaatatcagcgccagcgtatggcggagcagcaggctgcgcgcgcggcgctggagcatgccgtgaccgaccgacggcgcacccgcgcgcgaatgcaaaaggagcatgacgccgcccagcggcgctcggctcagacgctgcgtaccgttgatacgctaaatatcgcctccttcgagcgcgtgaagtacaaaggcgcggcaaaagagcgcccgggagcgctgcgccgtcagcatcgtgaacagaacagcagtctgaatgccgccgtgcagcaggcgcgggagcgggttgaggaagagaccccagtgatgtttaccctgccgggtagcgaagtggccgccggcaagcaggttctggtggtggagtcattgcagctcgaccatgcgccggctgcgccgctgaactggcgtatcgatggtccgatgcgcatcgcgctaaaggggccaaacggctgtggcaaaaccactttgctgaaaacgctgttggggctggagcaggccgcgtcaggcgatgttcggctttcggtgagcgccgcttacctcgatcaacatctgacgcagctggatttatccctgtcggtaatggcgcacctgagcctggaagataccccgctggatgagggcctcctgcgcacccgcctggcgcagctccagctgggcgcggataaggtcactctgccgctgtcggcgctcagcggcggcgagcgcctgaaagcggcgctggcgtgcgtgctctggcgacgcgagcctgcccaactgcttttgttggatgagccgaccaaccatctcgatttagcatcgacgcaggctattgaaagcgcgctggcggcgtttcccggcgcgatgctggtggtgtcgcatgatgaggcgtttttacaaggtctgaagctgacccatagtctggcgtggcgggagacgggctggcacttttccctgctctga

SEQ ID NO: 139145 - DNA, 294 bp, Enterobacter cloacae
gtggtgaccagcacgccgtcggagccggcgaccgatttcatgtacatcatgttttcaacgccgttgatcgcttcctccagcggcgtcgccacggtctcggcaatcactttcgggttggcgccgggatactccgcgcgcacctggacgctcggcgggacgacgtccggatattcgctcaccggcagcagcgggatagcgattaacccggtgataaaaattaaaatcgacagcaccgcggcgaaaatcggcctgtcgataaaaaagcgggaaaagtccatgtcttggattctctga

SEQ ID NO: 139146 - DNA, 1176 bp, Enterobacter cloacae
atgagcctgcaaaaaacctggggaaacattcacctgaccgcgctcggcgcgatgatgctctcctttctgctcgtcggctgcgacgacagcgtcgcgcagaatgctgcgcctcccgccccgacagtcagcgccgctaaggtgctggtgaagtcgatcagtcagtgggatagttttaacggtcgcattgaagcggtggagagcgttcagcttcgccctcgcgtctcgggatacattgataaagtgaattacaccgacggccaggaggtgaaaaagggccaggtgctgttcacgatagatgacagaacctatcgcgccgcgctggagcaggcgcaggcggcgttggcaagagccaaaacgcaggccagcctcgcgcaaagcgaggcgaaccgcaccgataaattagtccataccaacctcgtctcccgtgaagagtgggagcagcgccggtcagccgcggttcaggcgcaggccgacattcgcgccgcgcaggcggcggtggatgccgcgcagcttaacctcgacttcaccaaagtgaccgcccctattgacggccgcgccagccgggcgctgatcaccagcggtaacctggtcaccgcgggcgacaccgccagcgtgctcaccaccctggtctcgcagaagacggtgtacgtctactttgacgtcgacgagtcaacctacctccactatcaaaacctcgcccgccgcgggcaaggcgcgtccagcgataatcaggcgctcccggtggagattggcctggtgggcgaggagggttacccccaccagggcaaagtggattttctcgataatcagttaacgccgagtaccggcaccatccgcatgcgtgcgctgctggataactcgcagcgtctgttcacgccggggctgtttgcccgcgtgcgtctgccgggcagcgcagagttcaaagccacgctgatcgacgacaaagcggtactgaccgatcaggatcgtaaatacgtctatatcgttgataaagatggtaaagcacagcgccgcgacattatcccagggcggctggcagacggtttacgcatcgttcagaaggggttgaatcctggggatagcgtcatcgtcgacggcttacaaaaagtgtttatgccgggtatgccggttaacgccaaaaccgttgccatgacctccagcgccacccttaactga

SEQ ID NO: 139147 - DNA, 366 bp, Enterobacter cloacae
atgatgaacactggcgccatcattcaggatctgatcgactggatcgacaaccatcttgatagccgtctggatattgacaccgttgcccgacgagccggctattcgaagtggcacctgcagcggatcttcaaagaacataccgggcagcccctcggagaatatattcgggcgaaaaagctgcaaaagtcgatcgaacgcttagcccacagcaacgagccgatcctgaacgtggcgattgccctcggctttgactcccagcagtccttcaaccgcagcttcaagcgccagtacggccaggcgcccggcgtctggcgccggagtatcagccgctctgttgcgcagacatctcgtcagcgatccgcatga

SEQ ID NO: 139148 - DNA, 639 bp, Enterobacter cloacae
atgaacatggcctcaataaatatccagataatcattacgttaaatagcatgcacaaaggaaaaaccatgtccgttcagcctgtcgaaataagtaaggcctatcgtttattgcaggtcgggtccaccaccatgatttccgcaaaatatgatggcgtcgaaaatgtcatgtcagccgcctgggttgggctggcaggcgagcgaaaagtggtggcctatattggcacccaggctttcactcgtcagctggtggaaaagagcggctatttcgtggtgcagatccccgtagtcagccagatggcaaccgtcctctacgctggcgggcgcagctatgccgacgcgccggataaaaatgacaccatccccttcttttatcagccggaatttgatcttactcttgtggcaggctgtgcgggctggctggtgtgcaaagtgatgccctacccggacattcagcagcaacacaatctgtttatgggcgatatcgtcgccgcctggagcgatgaccgggtattccgcaacggacactggatttttgatgatgcgccggacgagctacggaccgttcactatgtcgcaggcgggcagttctatgccatcggcaaaggcagcaaattcgatcatgggccgggccaggactga

SEQ ID NO: 139149 - DNA, 885 bp, Enterobacter cloacae
gtggatcgtattcaggctatgcagatgtttatgcgcgtcgcggaggcaggaagcttcgtgcgtgccgcggaaaccctttccctgccggcctccactgtcaccagtaccattaaaaaccttgagaaatacctgaaggtgcggctgctgaaccggaccacaaggcgggtgagccttaccccggaagggatgcagtatctggcgcagtgccgggaaattctcgccctcatcgaacatagtgaatccaccctgagcgagtctgtcgcgcggcctcaggggcgcctgcgggttgatatgcccgcgggcatcgcgcatttcatcgtcatgccgcatctgccggacttttaccggcgctatcccgatatctacctgatgatcggcgtcagcgatcgccaggtcgatctcattcaggaaggcgtcgactgcgtgatacgaacgggagagctgaacaactccagcctggtggcccgccctctgggccgctttcgctgggtcacctgcgcgtcaccggactatcttcgggaatatggcgtgccgccgtcaccggaggcgctctctcagcaccgggctgtgcattatttctccggtcaggcgagacgggccgatgagttccgcttcgttcgccatggcgagaccttttctgtacccgtcagcggcaacgccgcggtgaatgaaacggggctctatataaaaatgtgcctggcaggatttgggctggcgcagctggcggagaatatcgttgctgaccacctgcaggaggggagactggtggaagtgctgacggactggcagccgcccccggtacccgtcacattgctctatccgcaccagcgctttctctctcccgccgtgcgggcgtttgctgagtggatgagcgaggtggtttga

SEQ ID NO: 139150 - DNA, 801 bp, Enterobacter cloacae
atgcttaatacgctacccgatttacacagaagttttgcagagcaactgaagcttaaattacagtctgattcgcggatccactcccttctcgccggcggctcgtttatccatggcgggtttgatcaatactccgatctggatttcgtggtggtgatcgaccctctctattatgacgaaatcatggctcagcgtatggcgttcgccggaacgctcggccatctgctacatgctttcaccggggaacacgtcggtgagcctcgcctgctgatctgcctgtttggcccggaacttctgcatgtcgatctgaaatttatcaccctggacatgctcactcagcgcgttgaggagcctgccgtgctatttacccgtgataacgatgctctcaagcgacagctggcaaaatttagcgcgcactggccgaacatgacgccggagtggtttgagtcccgggcctggatctggctgcattatgccgtggttaaactgggcaggggggaactcttcgaagcgctggggatgctgtctttcttccgggaacaagtgctgggaccgatgctatttcgtcgcgccaatctaccgcaacgcggcgttcgtcgaatagaagccctcggcattgatcccgatggccttctgacttccactctggcaacacacgatcgtcactccgtcgggattgccattcgaggggctgctgacgcttatgtcaacctgcgggctgatgcgctgcctgacaatatcgcagacgatgcggcgcgtcgggcggtccttgccatgctggacgcgtattctgacaaggggtaa

SEQ ID NO: 139151 - DNA, 507 bp, Enterobacter cloacae
atggagatgctggccgaggggctggtcgatctggcgttgaccacccatcagcctcccggctttacctctttcaccctgagaacatcacctactctctggtattgtgcagcggaatatgtgctggcgaagggggaatctatccccctgatcctgctcgaagagccaagtccattccgccaggatattatcgccgcgctggaaactgctcgcgtcagttggcatctggcccacggagcttcctcgctatcgggcgtgaaagcggcggtgaaggccgggctgggcgtgacggcgcgcccggtcgaaatgatgagcccggatctacgcgtggctggcatcagtgaggggttaccggcgttgccggacacccggtacgtcgtcagctgcaatccgcggacggtgagcgaactgccgcaggcgatttttcagtctctgagccaggagatccatccctgggaaacgggcacagcacttactccggaagagggagggaataccttggttttgtaa

SEQ ID NO: 139152 - DNA, 360 bp, Enterobacter cloacae
atgctcgtcggcggctggtaccttggcggtcgcgcgcgtgcgcgtagtaaaaacacgccgtttgaatcggggatcgactccgtcggttcggcccgcttacgtctttctgcgaagttttatctggttgccatgttcttcgttatcttcgacgtggaagccctgtatctctacgcatggtcgacctctatccgcgagagcggctgggtcggctttgtggaagccgcaattttcattttagtgctactggctggtctggtttatctcgttcgcatcggcgcactggactggacgcctgcgcgttcccgtcgcacgctggttaacccggaaacagacagtcccactaaccgtcatatgcagtaa

SEQ ID NO: 139153 - DNA, 675 bp, Enterobacter cloacae
atggattatacgctcacccgcatagatcctaacggtgagaacgaccgttaccccctgcagaaacaggagatcgttaccgatcctctggagcaggaagtcaataaaagcgtgtatatggggaaactcgaacacgcgctgcatgacatggtgaactggggccgtaagaactcaatttggccgtacaacttcggcctttcttgctgttatgtggaaatggtgacgtcattcactgcggtgcatgacgttgcgcgttttggggcagaagttctgcgcgcctctccgcgtcaggcggacctgatggtggtcgcgggaacctgctttaccaaaatggcgccggttattcagcgtctctacgatcagatgctggagccgaagtgggtgatctccatgggcgcctgcgccaactcaggcgggatgtacgacatctattccgtcgtccagggcgtggataaattcattccggtcgatgtgtacatcccgggctgcccgccgcgtccggaggcctatatgcaggcgctgatgctgctgcaggagtccattggtaaagaacgtcgtccgctctcatgggtggttggcgatcagggcgtttatcgcgccaatatgcagtcggaacgcgagcgtaaacgcggcgaacgtattgcagtgaccaatctgcggacgccggacgagatttaa

SEQ ID NO: 139154 - DNA, 1062 bp, Enterobacter cloacae
gtgcatacggaacccggtaatcgcttccaccagatcgtaaattttctgccgatcggtaaaggcgaagaagaccggcgtcatcgcgccgacgtcctgaataaaggtcgagatatacagcaggtggctgttgatgcggaacagctcggagagcatcacgcggatcacgttcacgcgatccggtacggtgatcccagccagtttttccaccgccagcacgtacggcatctcgttgacgcagccgccgagatattcaatacggtcggtatacgggatgtagctgtgccaggactgacgctcgcccatcttctcggcgccgcggtggtgataaccgatatccggtacgcagtcgacgatctcttcgccgtccagctgcagaataatgcgaaacgcaccatgcgccgatgggtggttcggaccgaggttgaggaacatgaagtcctcgttgtcggtgccgcgcttcatgccccactcttccggtttaaaggtcagcgcctccatctccagatcctgtttggctttggtcagctcaaacgggtcgaactcggtggcacgcgccggataatctttacgcagcgggtgaccttcccaggtcggcggcatcatgatgcgacgcaggttcgggtgaccatcgaaggtaatgccaaacatttcccaggtttcacgctcataccagttggcgttggggaacagtttggtgaaggtcggcagatgcagatcgttttccgacagcgccaccttgagcatgatgtcgcggttgcgatcgatggagatcaggtgatagaaaacggaaaaatccgcggcgggcaggccatcgcggtgcgtgcgcagacgttcgtccatgccgtgcaggtcaaacagcatcacgtaaggcttcggcaatttcttcaggaaatcacccacctccagcagctgttcacgcttcacccataccaccggtacgccggtacgggttggctgaacggtaaaggcatccggcccaaagcggttgcgcagttcgccaatcaccgggtcatcaaggtgatcgcgggtttgccaggctggtgcggcgtcatgcgcggttaa

SEQ ID NO: 139155 - DNA, 207 bp, Enterobacter cloacae
atgacgtgccgggcgcgctcatcaatcaccaccaccgccgggtcgctgagcttgtcattcaccagcggggccagcacccgcacggcaatcccggtggcgccgataaaaatcagcgccgagaagctgctgaacgcctcgcgggcagcgctggcaaagccgccgttgaaggggataaacccctcttcctgcagcgcttcgctggtgtaa

SEQ ID NO: 139156 - DNA, 774 bp, Enterobacter cloacae
atggctgagacttttgatccccattgcgtgtggttcgtcggcgccggtccgggcgatcgcgaactgattactctcaaaggctaccgtctgctacagcaggcgcaggtagtgatctacgccgggtcgctgatcaacaccgagctactggcctactgtccgccacaggcggagtgccacgacagcgccgcgctgcatctggagcagatcctcgacctgatggaggcgggggtgaaggcgggaaaaacggtggtgcgtctgcagacgggcgacgtctcgctatatggctcggtgcgcgagcagggcgaagagctgacccgccgcgggatccgctggcaggtggtgccgggcgtcagcgctttcctcggcgcggcggcggagctgggggtggagtacacggtacccgaagtctcgcagagtctgattattacccgtctggaagggcgcacgccggttcccgcgcgcgaacagctggaagcctttgccagccatcaaacctcgatggcgatttacctgtcggtgcaacgtattcaccgggtggcggagcggctggtggagggcggctaccccgcgaccaccccggtcgcggtgatctacaaggccacctggccggaaagccagaccgtccgcggtaccctcgcggacatcggcgacaaagtacgcgacgccgggatccgcaaaacggcgctgatcctggtcggccccttcctcggcgatgagtatcactactcaaaactgtacgcagcggattttagccatgaataccgtaaagcctga

SEQ ID NO: 139157 - DNA, 570 bp, Enterobacter cloacae
atgaaagatgagctgtttttgcgcggcgcccaggtgccgatgaccaaagaggccgtgcgcgcgctggcgctggcgaagctggagctgcaccgggcgcgccatctgattgatatcggcgcgggcaccggcagcgtcagcattgaggctgctctacagaacccggcgctgcgggtgacggcgattgagcgtcaggccgacgcgctgcgcctgctggcggagaaccggcagcgctttggctgcgacaacatcgctatcgtggcgggcgttgcgccgctggcggtcgccgacaaagccgacgcgatctttatggggggcagcggcggccacctgacggcgctgatcgactggtcgctggcgcagctgcatcccggcggccggctggtgatgacttttattttgcaggaaaaccttcatagcgccctggcgcacctgcggcagagcggcatccacgaggtggactgccagcagctggcggtctccaccctggctaccctgggcagcggccactacttcaaaccccataatcccgtttttgtcatcgcctgtcagaaggaagaaaaccatggctga

SEQ ID NO: 139158 - DNA, 606 bp, Enterobacter cloacae
atgttgacggtcgtgggaatgggcccggcggggctgcagtggctgatcccggccgcgcgcgaggcaatcgccgccgctgaggcgctggtgggcggcagccgccatctccagcagtttcccgacttcgccggcgagcgcttcgcgctgggggccgatatgccggcgctgctggcgtggattgaggcccgtaccgggcgccgcgtcgtggtgctggcctctggcgacccgctgttctatggcattggcacccggctgattgcccattttggccgggaacgagtgcaggtgatccccggcatcagcgcggtgcagtacctctgcgcccgggcgggcatcgacatgaacgatatgtggctgaccagcagccatggccgggcggtgagcttcgatgctctggccgcccaccggaaagtcgccatggtgaccgacggccgctgcggaccgcgggagatagccgcccagctgatggcccgcggcaaaggccatcgctggatggtgataggcgagaacctggcgatggaaaacgagcggatccactggctgccggtcagcgccgtggaggacgaatatgagatgaatgcggtggtgatcctcgatgaaagatga

SEQ ID NO: 139159 - DNA, 1140 bp, Enterobacter cloacae
atgagcgatcagacctttgacgccccggtgtggcatcacggcaaagcgctgcgcaagggctacaccaccggctcctgcgccacagcggcggcaaaagtggctgcgctgatggtgatgcgccagcatctgattcatcaggtctcgatcgtcaccccctccggcgtcaccctgtgcctgaacgttgagtccccgcacgtcgaagggcagcaggcggtcgccgcgatccgtaaagacggcggcgatgatgtcgacgccacccacggcatgctgatttttgcccgggtgatcctcaatgacagcggagagattagcctgcagggcggggagggcatcggcacggtgacccgcaaagggatcggcctgccgacaggcagcccggcgataaaccgcactccgcggcacaccatcgagaccgccgtgcgcgaagcgataggtcctacccgcggcgcgcaggtggagatttttgccccggaaggcgcgcttcgcgcgcaaaaaacctataacgcccggctggggatcctcggcggcatctcgattatcggcaccacggggatcgttaccccgatgtcggaagagagctggaagcgctcgctctccctcgagctggagataaaacgcgccgccgggctggagcgcgtggtgctggtgccgggcaaccacggtgagcgctttgtccgcgagcagatgggcatcgacccgcagatggtggtcaccatgagcaacttcgtcggctacatgattgaagaggcggtccggctcggtttccgccagattgtgctcatcggccatcccggcaaactgatcaaaatcgccgccgggatctttcatacccacagccatatcgccgatgcgcggatggaaaccctcgtcgctcatctggcgctgcttggcgcgccgctgccgctgctgacgctggtcagcgagtgcgacaccaccgaagcggcaatggagcatatcgacgcctggggataccagcgcctctataaccatctggctgagcgaatctgccagcgtgttcttgagatgctgcgcttcactcaacaaccgcccacctgcgacgcggttctgttttcttttgataaccaggtactgggcagcagccgtccgctggcggcaattgcccgggagctgacatgttga

SEQ ID NO: 139160 - DNA, 636 bp, Enterobacter cloacae
atgcagtacatccaacaaccgcaggcgatcgaggcgaaaagcttcgacatcatcagcgagatcatcgccgaaacgcgaccggactaccgtttcgccagcccgctgcacgaggcgattatcaagcgggtgatccacaccaccgctgacttcgactggctggatattctgtggttttctcaggatgccctgattgcgctgagtgaggccttgagcaggccctgcacgctgtataccgataccaccatggcgctgtccgggatcaacaaaaccctgctggcccgctttggcggcgaatgccgctgctatatcagcgacccgcgggtggtgcgcgaggcgcaaagccgggggatgacccgctcgatggcggcggtggatattgcggtgcaggagcccggggagaaagtgttcgtcttcggcaatgcgccaaccgcgctgtttcgcctgctggaacatcgcgagaccgccatcggcggcgtggtgggggtgccggtcgggttcgtcggcgcggcggagtcgaaagcggcgctcagcgagagcggcctgccggccatcgccgcgctcggccgcaaagggggaagcaacgtggcggcagcgattgtgaacgctctgctttaccacctgcgggaggcgcaatga

SEQ ID NO: 139161 - DNA, 792 bp, Enterobacter cloacae
atgtggctggtggttatcggcctgacatggggcgtggcctggggcgtactggcgctggcgcacgggatccacccctggcttggatggctggtggaagtgtggatgatcttcaccgcgctggcgggacgctgtctggcacagtcggcgatagcggtggcccggccgctgcaggccggagatctcgccgaaagccggcataagctctcctggattgtcgggcgcgatacctctcagctccagccagcgcagatcaaccgtgcggtggtggagaccgtggcggagaacacggtggatggcattatcgcgccgctctttttcctgctcctcggcggcgcgccgctggccatggcctataaagcggtcaacaccctcgattccatggtcggctataaacacgaaaaataccgggcgatcggcatggtcagcgcccgtcttgatgatgtagccaacttccttcccgcccggctgagctggctgctgctcagccttgccgcggtgctatgccgggaagatggcgcccgggcgctgcgtacgggctggcgcgatcgctatcagcacagcagtcctaactgcgcctggccggaagcgaccgtcgccggcgcgctggggatccgccttggcggcccgaacgattacttcggccagcgcgttgaaaagccctggataggcgacgccgtccgcgacatcgcggtggacgatatttcccgaaccattcgattaatgtgggtggcgtcaagcctggcgctggcgctgtttatcggcgtgcgctactggctggtcggcgcggcctga

SEQ ID NO: 139162 - DNA, 261 bp, Enterobacter cloacae
gtgccgaatacgctggccggcaatggcgaagaggagaacgtcagactgcgttttaccgacatcaaagattttgaaccggagcaggttgcccggcaaattccgcaactccgcgccatgctggcgatgcgtaatttattacgcgatctcaaatccaatctgctcgataacgccactttcagaaaagagcttgaggcaatcctgaaggatccggcgctgtcccaggaattacgcgacgaaatgagtgcgcttgccccgaaataa

SEQ ID NO: 139163 - DNA, 1344 bp, Enterobacter cloacae
atgatgaaaacggaacgtccgttgtggggccggggcattatggtgtcgcctcagcattttcaacagcaggctgcgtatgcagcctggactgcggaagtgattgcccggatgggtcttaaccacccctggggagtggttgaggcgaccttcgaaccagagatgctcaaactgggccgcctgcaggctcacaggctgcaggtccggttccaggatggcacgatgattgatacggacaatgccgatgcgctgccgtccgcgctgtcgctggacggcgcgtccggcgaggcggtgatcgtgctggcgctgcccctgatgcaggcgaatggcggcaactgtctgaagccggaggaggtggccgaaaggccggtgcgcttccgccagcgctggcgcgatgtccgcaaccagttcggggatgatacccggcagattgccgtcatacagccggagctgaccctccgcttcgcccaccaggacaacagcgattacctgacctgtccgcttgttcgcctgcagcgggactcgcagggggcctggcttatcgacgagacgtttctcccgccgctgctgcagatccagggcagccgctggctggcgacgcagcttgaacagctgctcatccagctccgggctcgtctgacgcgcctgatggctatgcgtcgcgaaagcaatgaacggatggctgattttgccgtagccgatgtctctctgttctggttgctgaatgcgctgaacagcgccgagccggtgctggggtactttctgcgttaccggcaaagcccgccggaacgcctctacccggagctggcgcgcctggctggtagcctgctgaccttttcgctcacccatcaggcgaatgccgtcccgatctatcagcatgaccagctgaacgcggtttttccgccgctgtttgatttactgagcgacctgctggaggcgagcctgccatcgcgggtggtggcgattgccctggagcatgatgcccggctgcacttctggcaggcgcgtctgcacgatgcccggctgcgggaaggggctgattactacctgtcggttcgttcgtcggtaccggtcgcccaactgcaggagcagtttccgcgacagtgcaaagtgggcagtccggatcatgtcaaagccatcgtcaactcctcgcggacaggggtgcccctcacgccattgcgtcatgtgccggcggcgatcccgctacgtctggaaaatcagtatttcagcctcgatgtgtcccaccctctggcgacggaaatgctgcagagcggcacctgtatgttttacgtcccggggatgctcggtgagcctgaacttgaactttttgcggtactacgaacgtga

SEQ ID NO: 139164 - DNA, 690 bp, Enterobacter cloacae
gtgaatgagcctaaacgcggcaacgccgcgtccattgatattgatgcgctgctgcagaacacctggctgcaggttatcagcctgcgccacggcccgcagttccgcgatgaggaagggtacacgctatggcagcgctgtattgctgatgtcgagcgcgtgcaacatgagctgaaggcgagcgggcttgatgacgccagctgtcagcatattctcaccgcccagtgcgcgctgctcgatgaaggcgtgaaagggcgcggcgtggaggatgaggcctgcctgcagtggtatgacattccgctgcaggggcacttcctcggcaccatggacgccggcgacaccctgtgcgagcggatgcgtgatgtgttgcgtgaaccggcgcccaacctggccgtggtcacctgttttcagcgggtgatgctgctgggttttattggcagctttcgctccctccacgaccccgagcgcctgaagctggtcaacgcgctcggtgagcgtgttcctccttttcagtgcccggctaccgctcccgtactggtagagagtcgcgccggtctggggataagcggctggctggccccatggccggtacgtattggcctgagcgtggtggtggtactcgccctgtggtgggggctcaaccactggctcgatcacctgctgctgaccttgttaccgggggaggtgaaatga

SEQ ID NO: 139165 - DNA, 771 bp, Enterobacter cloacae
gtgaccgggagtacgaacgttctggcacttgaacaggcgagaggacaaatcgaaagtacccgcgccgaaatagccaaacgagaaggcgatctggctcaggcaaacaatgccctgcaactggtgctgggaacgtaccgcgcacttccgtcagaaaaagggatgaaaggcggggagatcgcaccagtaaaattgccaccaaatctatcttcacaaattttgctgcagcgaccggatattatggaagcggaatatcagctgaaagcggctgatgccaatattggcgcagcgcgagcggcctttttcccctccattaccctgaccagtggtctttccgcaagcagtacggagctgtcaagcctgtttacgtcaggaagtggaatgtggaattttatccctaaaattgaaattcctatttttaatgctggcaggaataaagccaatctgaagctggctgaaattcgccagcaacagtcggtggttaattacgaacaaaaaattcagtcagcctttaaggatgtttccgacacgcttgcgctgcgcgacagctttagccagcaacttgagtcacagcagcgttatcttgattcacttcagataactctccagcgtgccagaggattatatgcaagtggtgctgtcagttacatcgaagtgctggatgcagaacgttccctcttcgctacgcagcaaaccattctcgatcttacctattcccgacaggttaacgaaattaatctgtttaccgcgctgggtggcggttgggtagagtaa

SEQ ID NO: 139166 - DNA, 354 bp, Enterobacter cloacae; identical to SEQ ID NO: 19861

SEQ ID NO: 139167 - DNA, 282 bp, Enterobacter cloacae
atgatcccactcctcaagccgtttgtgcgcattttcaatcatcacaatggcggcatccaccatcgcaccgacggcaatcgctatccctcccagcgacatgatattggcgttcagtccctggaagtgcatgacgataaaggcgatacacaggccaagtggcagagaaataatcgccaccagggcagaacggacatgccagaggaacagtgcgcaaacgacagcaacaacgataaactcttcaagaagcttgtaactgaggttatcaatcgcccggtcgattaa

SEQ ID NO: 139168 - DNA, 624 bp, Enterobacter cloacae
atgcagctgcgggccttcggcgttcatcacttccaccagggtctcaacgatcagcggatcgaagctgcgcagcggcgcgtgtttgcgcacgaacaggtgggtttcggcgccgaggccgttaatcacccccgccagctcaacggcgatatagcctgcgccgaccaccgccacgcgcttcggcagcgccggcagttcgaagaaaccgtcggaatcaataccgtattcgacgcccggaatatccgggtggctcggccggccgccggtggcgatcaggatatggtcagcggtgatgatctcgccgttgacttccacggtgtgggcatcgacaaagcgcgcgaagcctttgatcacgtcgactttattcttacccagtacgttgtcgtaagaggtatgaatacggtcgatataggcgctacggctggcgaccagcttctcccagtcaaaatggttgatggtggtatcgaaaccgtagtccgggccgtaaagatgaatcgcttcgcggatctgcgccgcatgccacatcacctttttcggcacgcagccgacgttgacgcaggtgccgcccagctctttggcttcaatcagcgcgcacttctggccgtacatggccgcgcggttaattga

SEQ ID NO: 139169 - DNA, 843 bp, Enterobacter cloacae
atgctcagttatcgccacagctttcacgcaggcaaccacgccgacgtcctcaaacacaccgttcagagcctgatcattgaatcactgaaagagaaagaaaaaccgtttctctacctggacactcacgccggcgcgggccgctatcagctgagcggcgagcacgccgaacgtaccggcgagtatcttgaaggcatcgcccgcatctggcagcaggacgacctgccggcagagctggagccgtatatttcggtcgtagaacacttcaaccgtaacggccagctgcgctactacccgggctcgccgctgattgcccgccagctgctgcgcgagcaggacagcctgcagatgaccgagctgcacccgagcgacttcccgctgctgcgcgctgaattccagaaagacagccgcgcgcgcgtcgataaagccgatggctaccagcagctgaaagccaagctgccgccggtatcgcgccgcggtttgattctgatcgacccgccgtacgaaattaaaaccgactatcaggcggtggtcaccgggattaacgaaggctacaaacgcttcgccaccggcacctacgccctgtggtacccggtggtgctgcgcgcgcaaatcaaacgcatgatcaaagagttagaagccaccggcattcgcaaaatcctgcagattgagctggcggtgcgtccggacagcgaccagcgcggcatgaccgcctccgggatgatcgtcatcaacccgccgtggaagctggagcagcagatgaataacgtgctgccgtggctgcacagcaaactggttccgaccggcaccggccacgccaccgtcagctggatcgtaccggagtaa

SEQ ID NO: 139170 - DNA, 1272 bp, Enterobacter cloacae
atgaaaaggcaactctcgctgctggccgtcgcgctgctgctggcgcaaccggttctggctaaagacatcccgctgaacagggcggcggccctcgccaatagcgtgacgccggctgcctccagccaggcgtatgacgatcttgagcaacaggcgctggcgcagctacgccacgctctgcagggggatgccgccacgctgacccgcgatcggctggcgcacaccaaacaaaaccaaactcaggccgataccgcctggctgaaggccagcggctatgacttccagacccgggccaaccagcaggcgggcattgcgctgctgtcggcgttcagcaccctgccggagaccgtcgtgaagcagaatctggcgacggtgaccgccatcaatcgcgacgccgtgcagaccacgcgccgtcaggcgctggccgatgcggaaggcattagctacctctacttcctcagcgacgcgctggggccacgccttggcaaagcgtttctgaccgcctatgaccagggcgcgctggggaaagcggcagcgttgatcaaagcctcggaggtcagcaccggcgaggcgaaaaagcacttcaataatccgcggccgtttctggtgcagggcaacaccattcacctggtgcctgacgatgtggtggtgaaagataaccagccctacaccgccgacggcggctcgttccccagcggccacaccaacaccggctataccgatgcgctgctgctggcggcgatgatcccggagcgctacgacgcgctggtggcgcgcggcgcccgctatggctactcgcgcatcgtgctgggcgtccactacccgctggacgtgatcggctcgcgaatggtggccgagcgcaacgtggcccactatcttaacgatccgcactaccgggtattatttaacgaagcccgcgatcagctgcgcgccgcgctggcgaaggcctgcggcacatcgcttgccgagtgcgcgaagagcagcgtgaaagacgatccctggcgcgatccggcgatgcgtgatttctctcgcttcaccatgacctacgatctgccgcagcagaagggtccgcagccgcgtttacaggtgccggagggggcggaagtgctgctggaagatgccctgccgcatctgtcagcggcccagcgtcgggcgctgatggtcaacaccgcgctgccggcgggttacccgctatccggcaccacccccgaacagcaattctggcagcggctgaatctgtcggcggcctgggagatggcgcaaaaaaggcattaa

SEQ ID NO: 139171 - DNA, 492 bp, Enterobacter cloacae
atgcgtcccagcacatcgtccacttccgccagcggctggcaaagattttcccagctatacggcgcgccatgcgccaccgcgctttccaccgcggcccggcaatcctccagcgctttggtgaccgcagggaccacgtgctctggtttgatcgcagaaaaaggcggcagggagaaaggcgtcaataatggattggtcatatgcgctgtcctgttgaaaagggtgaatgaagcgcgcgtccggcgcttatgcatgagatctagaatgggggatagttgggggaatttcaatgacgggcggtgcgtcagcctgggtattgctgcgataagtccgcccgttgccggaaaagcgcgacacgcagtgcagcgtgccggaaaccacattaatgccttttttgcgccatctcccaggccgccgacagattcagccgctgccagaattgctgttcgggggtggtgccggatagcgggtaacccgccggcagcgcggtgttga

SEQ ID NO: 139172 - DNA, 1017 bp, Enterobacter cloacae
atggtgcagaccgtggccgaactcgtggaacagggtgatcacttcgtcatgggtgaacagcgccggcttgccgttgaccgggcggttgaagttacaggtcaggtaggcgaccggcttctgcagggaaccatccagtttacgcatctggccgacgcagtcgtccatccacgccccgccgcgcttatgctcgcgggcatacaggtcgagatagaagctgccgcgcagctcgttgtgttcgtcatacagctcgaagaagcgcacttccggatgccacacatcgacatcggtacgctctttagcggtaataccgtaaatgcgcttaaccacttcaaacaggccgctaacggctttgttttccgggaaataggggcgcagctgctcatcgctgatgctgtagaggtgctgcttctgtttttcgctgtagtaggcaatgtcccacggctgcagctcatcgacgccaaactcggctttggcgaaggcgcgcagctgggccagctctttttcgccctgcggacgggcgcgttttgccaggtcggtgaggaaatcgagcacctgctgcggatccttcgccattttggtggcgagggatttatacgcatagctgtcaaagcccaacagctgcgccagctcgtgacgcagggcgaggatctccgccatcaccgggctgttatcccatttcccggcgttcgggccctgatcggaggcgcgggtggaataggcgcgatacatctcttcgcgcagcgcctggttatcgcagtaggtcatcaccggcagatagctcggaatatccagggtcagcagatacccttcctgctctttggcctgcgcctgagcctgagcggcggccagcgcgctttccggcatgccggccagatcggcgacatcggtcaccagcttgttccagcccatggtggcgtcgaggacgttgttgctgtactggttgcccagctcagagaggcgcgcggcgatttcaccgtagcgtttctgcgcctccggcggcaggccaatcccggataa

SEQ ID NO: 139173 - DNA, 282 bp, Enterobacter cloacae
atggcaagactgagaacgcggatgagtaaaattaaagaactgttgcgccttaaatttgactgtcacctgcccaacaggaatatctcagcctgtctgaatatcgggtgcagcactgtatctgatgtggtcacccgcttcaggggaagccagctggcgtggcccctgccggaggagatgacggaatcacaactcgaagcgttgctctataccggacgcgccagcgacagccataaacggatgccggactctgagagatcccctcataatttccccaaagcgtaa

SEQ ID NO: 139174 - DNA, 489 bp, Enterobacter cloacae
gtgctcagcgcctctgacagcctgctggtcacgctgctggtggcgatttccaacttcttctggctgccggtgggcggggcgctgtccgaccgctttggccgccggtcggtgctgatcgccatgaccctgctggcgctggctaccgcctggcctgcgctgaccatgctggcgaacgccccgagctttttgatgatgctgagcgtgctgctgtggctgtcgtttatctacggcatgtacaacggggcgatgatcccggcgctgaccgaaattatgcccgccgaagtgcgcgtggcaggtttctcgctggcctacagcctggcgaccgcggtgtttggcggcttcacgccggtgatttccacagcgctgattgagtataccggtgataaagcgtctcccggctactggatgagctttgccgccatctgcggcctgctggccacttgctacctctatcgccgtagcgccgttgcgctgcagacggcacgttaa

SEQ ID NO: 139175 - DNA, 807 bp, Enterobacter cloacae
atgcgtaaaacgacaggaaccctgctagccacgctgctgctggccgccaccggcggcagcgcgctgtccgctgaggtcaccgtgatgatctccggcggcttcaaagcggcgctggaaaagctggccccggcgtgggaaaaacaaaccggcaaccacctcgtggtgatccctggcccgtcgatgggaaaaacgccgcaggcgatccctaaccgtctggcgcgcggcgaacacgcggacgtggtgatcatggtcggggacgcgctgaccagcctcgagaaagcgggccgtacgcaaccggattcgcgccgggagctggccgactcgccgatcggcgtggtggtgaaggcgggggcgccgctgccggctatccacaacgcagaccagctgcgggcgacgctgctggcggcgccatcggtcgcgtactccgacagcgccagcggacgctatgtcagctcgacgctgttccacaccctgggcattgatgacgcgatgcagagtaaagcgcagatggtggagcgcattccggtggcctcggaagtggccaagggacggtatgcgatcggttttcagcaggtgagcgaactgctgccggtgcccggcgtaaccttcgtcggcgaactgccggataacctgcagtacatcacccgctttgccggggcggtgaccatcagcgccgaccacccgcaggaaggcaaggcgctgctgacgtatctggcgtcaccggcggcgcaggagaccatccacgccaccggtatgcgaagcgtagccgccgccgcgccggtcagccagaaggatactgttcaataa

SEQ ID NO: 139176 - DNA, 900 bp, Enterobacter cloacae
atgcccgtaaattttgacttcaacgatctctacgcctttcgcgccctgatggaatatggcagttttcggctggcggccgaatccatctgcctgtcgcagtcggcccttagccgacgcatcgaaaagctagagacggcgctgggcaaccggctgttcgatcgcaccacccggcgggtgaccctcacgctgtatgggcaaaattttgccgaacgttcggagcagctgctggcccatgtcgagacggtgctggcggatatcagccaggtcagcaaggcgcgcaccgggctggtgacggtggcgacagtgccttccgccgcctactactttatgccggaaatcatccgcagctttcaggcgcgttatccccaggtgcgcatccggttgattgacagtagcgtcgggaatgtgatcgaggcggtcagcagcggacaggctgactttggcctctgctttgccaaaaacctgccagccagtatcgaattcacccctcttgccgacgaccgctatgtggccgcctgtcggcacgatcatccgctggcgcgcaacacgcacctaagctggcaggcgtattttgaacaggattatattggcctggatcgggtctccggcaaccggatgctgcttgaccgggagctggcgcatctgacgccggcgcggccaagtatctgcgaaacccgccacgtcaccacgatgctggggatggtggaagcgggcatcggcattgccgccgtgcccgcgatgtcgatgcccgccggggagcattccgttctccgcgctgtgccgctcaccgacccggtggtcacgcgtacggtaggcctgatccgcctcagcggccgtattcagtcctacgtggcggcagagctggagaagctgattattgaacagtatccttctggctga

SEQ ID NO: 139177 - DNA, 483 bp, Enterobacter cloacae
atggcgatgaacggaacaatcacaacgtggtttaaagataaaggttttggatttatcaaagatgaaaacggcgaaaatcgttattttcacgtgattaaggtcgccaatcctgatcttatcaagaaagacgcggcggtgactttcgaacctaccaccaacaataaagggctgtcggcctacgcggtgaaggtcattccggaaagcaaatatatctatattgccggcgagcggttgaagctgacctccatcaaatcctatgtggtgtaccgggaagaagagccggtcgagacccgcgtcgataaagaaaacgccgtgctgtcggtcgggctgctgatgaacagcatccggccaaaagccacggtgcagccgggagagatgcgctcggtgaaaaagctggcgatcaccacctttcaggggacaaccctgatcttttcggaagacgaaatcgatatcgatgccacggtaaaactgcttaaggtgtaa

SEQ ID NO: 139178 - DNA, 699 bp, Enterobacter cloacae
atgtccaccattatcgatacctttgtcgcgccgccgtgtcgcgaacagatcaccctcttgtatcaggacgaacacctggtgctgatcaataagcccgccgggctgctgagcctgtcgggcaaagatccgcgcaacctcgactccgtgcatcaccgactggttcagcgctttccgggctgcaccctggtgcaccgcctggacttcggcacctccggcctgatggtgatcgcccgcaacaagggcattaacgccttgctgtgccaacagttcagccagcgcacggtggacaaggtctatacggcgctgctgtgcggccacctggcggaagacgaggggatagtggaggcggcaatcgccaaagatccggccggtttcccgcgcatggcgctctgcgcccgccacggcaaaccggcgcgttcgcgctatcgggtcatagaccgcctgtatcaggcgcgagaaggcgagagggcgctggcgttaacccgggtgacgctcaccccggagaccggacggacccatcagctgcgtattcactgccagctgctgggctatccgatccttggctgcgatctgtacggtggccgggagctgcccggcacggaatgcgctccgcggctgatgctgcacgccagcgaactgcgttttgtccaccccgtcagccatgagccgatgcatatccagcaggcgagcccgttttga

SEQ ID NO: 139179 - DNA, 540 bp, Enterobacter cloacae
atgacaaaactcaccttacaagagcagatgctcaaagccggcctggtcagcagcaaaaaaatggctaaagtccagaggacggcgaaaaaatcccgcgttcaggcccgtgaggcccgggaagcggtggaagaaaataaaaaagcccagctggagcgtgataaacagcttagcgagcagcaaaagcaggcggtgctggcgaaagagtataaagcccaggtgaagcagctgatcgagatgaaccgcattacggtcgcccggggcgatatcggctttaactttaccgataataatctgatcaaaaaaatcatggtcgacaagcccacccagacccagctgattaacggccgtctggcgattgcccgcctggcggtgaataacaagcccgaaggtgaatatgcgattattccggcggtagtggctgagaaaattgcccagcgcgacgccagcagcatcgtgttgcacagcgccctgagtcaggatgagcaggatgaagacgatccgtacgccgactttaaggtgcccgacgatctgatgtggtaa

SEQ ID NO: 139180 - DNA, 330 bp, Enterobacter cloacae
atgaaaccactatttgtctatgggacgctctgtcccggtcgcagcaatgcgcatattctggaggcgatcgggggcgagtggcgtcccggctacgtcaccggcaccttttacgcgcgcggctggggcgcagccgccgatttcccggggatcgtcctcgacgctcacggcccacgggtcaacggctatctgttcctgtccgatcggctggcggcgcactggcccatgctggacgactttgaggaagggtacgatcgggtgccggtggaagtgaccaccgacgatggacagcagatcagcgcctggatttatcagcttcagccccgggggtaa

SEQ ID NO: 139181 - DNA, 822 bp, Enterobacter cloacae
atgcgtttagcttctaaatttggacatactcactctattcggctggaccgtcctttaacaaatgaagaattgttaacagtagtaccttcaattttctctgaggaaaaacatacttcacgtagtgaacgttatacttatattccgactatcacgcttcttaataagttgagagaagaaggttttcaaccttactttgcttgccagtctaaagtcagaaatgatgataaacgcggtcacactaaacacatggtgcgtttacgtcgtgagggtaacaaccagggtaaagaagtaccggaaattattcttcttaactcacatgatggttcttctagttatcagatgatcccaggtatttttcgtttcgtttgcactaatggtctggtttgtggcgattcttttggcgaaattagagtacctcataaaggtgatgtagtagggcaggtgatcgagggggcatatgaggtagtcggtatttttgacaaggtggaagaaagtgttgatgccatgaagtctatacaactgacaaatgaagagcaaagattgttcggtcaggctgcattaacctataagtatgaagatgagcagaaggcaccagtaactattgaacagattattcatccaagacgatatgaagataaaaaggatgatctgtggactacttaccaacgtgtccaggaaaatattataaaaggtgggctgcctggtataacggaaaaaagaaagcgtacaacaacacgggcagtcaaagggatagatgcagatgttaagctgaataaggctttatggttgatagcggagcagttccgcacatataaaaattag

SEQ ID NO: 139182 - DNA, 309 bp, Enterobacter cloacae
atgtttgagtttttgggtgtgtgcgtcagtacttcacatatgacagaaaaagatgcatcaatactacaggcgcttactactaactactgtgatagagaaaattataacgaatggattcattctacatcttatggttttatcgtcagaatgtatttttttaaaaagaggctactggcgctaaaaaaagcaggtttatcgaaactattcaggaaaaatttactcataatgtaccatgaaaaaggttatcaatgttaccatttcgattgtgatgccgactgctatcctgatcttgatattagtggtttatga

SEQ ID NO: 139183 - DNA, 231 bp, Enterobacter cloacae
atgccagagaatgaaacaggttttgcaggttacaggaaactgattctcattaagaatttcgaagtcaacaataatttcattattatcgtcacgttttatattatggccactggtgcaaaatgttacataaccatgtgcatcagctgctatatgggtggctgttctctctcgaactatcccattaaaattaacttgttcgcgtgtggttaccgttcgtttaatgtgcattaa

SEQ ID NO: 139184 - DNA, 402 bp, Enterobacter cloacae
atgacagatgaacttaaaacccgtacaaatagagtaaacctgacaattccatactctgaactggaggtaattgaccgtcacgtttcagcgaaactcgaagatggtgaaagtcgtgatacggcgaacagatctgcgtttgtaatggaaatgtacagactcggtctacgagtctatgaaagccgtaagaaaaaaggtgacggtgaagtttcgttgaatgatcaactaaagttcatatgcagaaatttactcattacttcttttctgacggaagctgtataccatatagaaaaagaaacagtagacaagagcaaggttattaaaagtgaattgtatattgatgatgaattcttaaccatgatcaatgaacgggtggaaggaaagataagtaaaatgttcaaatag

SEQ ID NO: 139185 - DNA, 1155 bp, Enterobacter cloacae
atgctagtcatttcctttaggcaactgacaacactcaatcgactgctggaatctgaaaaaaaagcattcaataacaaaaacgctttcctgggtaaattgggtcatgaacttagaacaacactacaggctatagttggttcgatagagtcaatcatatactcgcctcaaaaagctccggatcaaaatacattgcacagacttgagaatgcagtttctcaaatagaacgccaaatgaatgacctggctgagtatgctaaaattgacaacggtgcacttaaaataaacaaatcaactattaatgttgctgatttagttacaaaggttgttaacgattgcaacgccaagtacaccaataaaaatatagaggcatcggttgttaatcttccctctgtcaacattaacacagatggaatacgtctttctcagattctggaaaacttgctcaccaatgcatttaaatatacagagcaaggatcaattaccgttgatgttacaactaatcagtcacatcacagctcataccttcatattaaaatttcagacacaggaataggtatagataaagaaaagcaaaaaataatttttcaaccatttgtaagaattgaaaatggttcctctcttatcccaggctctggaatggggctggctattgttgagggtatcgtcaaagcgatggatggcaaaattagtgtcatcagtgaaccaggtaagggaagtatatttacagtatcactacccgttgaaattaatagcatcgatagtacgacaaactccactccattgaacgtcatggagacttctttgaagggactgtctgtattacacatagatgatagcgaattaacatgcagaacaatggcctcaactttaaggagtgttggatatagagcagagtcaaccagctctgttaacagagcaattgaaaagcttatgcgtattccttatgacattatactatgtgacttacaaatgcctatcatgaccggtgacgagctggtagactacattcgtactcgtgaaggtcctaatagaaatacacctgtaattttcatcagcgcttatcctgacaactacttacatgcagagataccgcttattgttaaaccagctagaattgcagatatcaataacgagatatccaaagccataagataa

SEQ ID NO: 139186 - DNA, 570 bp, Enterobacter cloacae; identical to SEQ ID NO: 109939

SEQ ID NO: 139187 - DNA, 546 bp, Enterobacter cloacae
atggctagctatttcccgacgttagacatatctggagaagagttcgatttcactcaccttgagccattcattatgcacgtaaatagcgatatggctaaaaaggtattaaaagtacacgttaggttcacaaatcattgttttacaaaaggttatgaagctttttatcacccagcaggagaacagataatttacgaccatagcgggaatgggagaacgttttgcccaattagatatagattatctttggcattacctgagattatcaaccgtctatgcgatccagcagaaaaggtgtatcaaacatcagcaaagagaaactgggcctactcgattacgattgatgatccagaggggccatatcacttattttttgaaataagacgcgcctcgcgtgatgagaaacacctacaagatttgaacatggttatcgagagtgcctatcctgaagatcgagggtacgggcctccgtccttactagggcgaattggctttgtagggttatgcggtagggtattttgtgggaagcctctggcgattaaaagatga

SEQ ID NO: 139188 - DNA, 210 bp, Enterobacter cloacae; identical to SEQ ID NO: 109941

SEQ ID NO: 139189 - DNA, 402 bp, Enterobacter cloacae
atggccagagtgtctattagtgaggctgcacgactgacgggtaagagtagaacaacactgcacaggttaattaaagcaggtgacctgtccacctgtagcggtgaacgtaatgcaaaaatggtagatacttcagagcttttacgtgtctttggtccctttgagcaaccgaagggtgaacaccattctggacaggtctctgaacagcgtgatacagcctctgctgaccagagtgaacaggtgattcgtcatctgaaacaggagattgaacacctgaacaccttacttttgtccaaggattcgcacattgacagcctgaaacaggccatgctccttcttgaaaatcaccaggcaaaattaactgaatccccggcgccatggtggaaattctggaaaaaatcctga

SEQ ID NO: 139190 - DNA, 192 bp, Enterobacter cloacae
atgacgaaacaacagaaaacagcgctgaatatggcaaaattcatccagaatcagtctctgctcctgctggagaagcttaacgagcttgatctcgatgtcgaggccgacctttgtgagaaactccacgatgatgcggagcatcttttccgtacactgtcctcgagactggatgcattacaggatggtaactga

SEQ ID NO: 139191 - DNA, 552 bp, Enterobacter cloacae
atgcagccccagtctgccgttcacgatggtctgccaggcatcgatgcgcggccggtcggcgcggtcgtagtacggctggagccgcctgccggtcagcagttcggtattggggatcagaaagttcagctccagacgccccttgtccgcgtgctccacccacagaatgctgtactgatctttatcgagtccgggcatcagaatccgctcgaagctggccatcagtttttcccgctggccgggaggcagatcggcctccgcaaacgacagtacgccggaggtgtatttcttcacgtaaggcgacgcgtcaatcagctcccggacttcttccggcttcccctgcaggacgctggcgccttcacgctgccggtctttacccagcagatagtccaccggcccggcgccaccgccgcgaccgcgtggatgaaatttaacgatcatcgtccgttcctttctcaagaacggcgtgccgcagccgctcaagcccggcatcgatggccatcagcgccgccacaatctgtaccctgtcatggccggtgccgccgccggcgttaa

SEQ ID NO: 139192 - DNA, 444 bp, Enterobacter cloacae
atgaatgacgtacttgatgaaattgaccgggcgatcctcacctgcctgactcaggatgccagagtttcgctcaaggtcctgagcgcacgagtggggctgacctcgccgagcaccgccgagcgggtgaagcgcctggaggagcggggtgtcattcagggctatggggcgcgggtaaatctcaccgcgctgggctatagcctgcaggcgctggtgcgggtccggccgctgcctgggctgctgcagaaggtggataaatatatccaggcgatgccggaatgtattgaaagtgacaaggtgaccggggaagattgttttgtgatgcgtctcgtggtgcgcgatattgcccagctggataccctgctggacggtctggcggagtatgcgcagtgtaacacctcggtggtgaaaagctcgccggtaaaaaggcggttgccaccgctgtga

SEQ ID NO: 139193 - DNA, 897 bp, Enterobacter cloacae
atgcaacttacccgcggcgtctggcagatgagcctggcaatgataatctccggctcgatcggcgcgttcgtgctgctctctggtttgccggtgacagatgtggtgttctggcgctgcctgattggcgcgctaaccctgctggtgtttatcgtgttaagccgccagcccttcagccggctaacgcgtttcactctcgctctggcggtgattggcggcgcggcgctggtcgtcaactggctgctgctgtttgccgcctattcacggatctcaatcggtatggccaccgtggtctataacacccagccgtttatgctggtactgatggggatggtgctgggggaacgggtcagcgccgtgaaatggggatggttactgctggcctttggcggcctagtgatcctgctgtcgagcgagctgacgcctgcacacgaagaggggcttaccaccggcgtgttgctggcgctgggcgcggcattcttctatgccctgaccgccatcatcgcgcgcaaactgcatccgctccccgcgcagcatatcgccttcattcaggttctcgtcggcgtcgtgatgctgctgccgctgatgcatgccccagaattgacggccagcttcccctggcgctatctgctgatcctcggcatcgtccataccgggatcatgtatcagcttttatatagcgcgatacagaaactgccgacgcccgttaccggttcgctctcctttatttatccgctggtggcgatggtggtcgactatctggtcttccaccatgcgttatccgcggtgcaattgctcggtgggatgcttattctgtttgctgccgcagggaataatctcggctggggcgaaaaaaaaccccgccgcggcggggtcagtgagcagtcgcgggccagttag

SEQ ID NO: 139194 - DNA, 678 bp, Enterobacter cloacae
atgcacttcctgaatatgttcttctttgacatttatccgtacattgcgggttcggtgttcctgattggcagctggttgcgctatgactatggccagtacacctggcgcgccgcctccagccagatgctggaccgtaaggggatgaacctggcgtcgaacctgttccatatcggcatcctgggtattttcgccggccacttcctcggcatgctgaccccgcactggatgtatgagtccttcctgccgatcgacgtcaagcagaagatggcgatgatcgccggcggcgcctgcggcgtgatgaccctggtgggcgggttactgctgctcaagcgtcgtctgctcagcccgcgcgttcgcgccaccaccaccggagcggatattctgatcctctcgttgctgatggtgcagtgtgcgctcggcctgctgacgatcccgttctccgctcagcatatggacggcagtgaaatgatgaaactggtcggctgggcgcagtcggtggtgacgttccacggcggcgcgtcacagcatctggatggcgtggcgtttattttccgcgttcacctggtgctgggcatgaccctgttcctgctgttcccgttctcccgtctggttcatatctggagcgcaccggtcgaatacctgacgcgcaaataccagattgtccgcgcccgtcgctaa

SEQ ID NO: 139195 - DNA, 711 bp, Enterobacter cloacae
atgattgaactcgtgattgtatcgcgtctgctcgaatatcctgacgctgccttatggcagcatcagcaggagatgttcgaggcgctcgcgtcatcagagaaactcagcaaagaggatgcccacgcgctgggcgttttcctgcgcgatttagtggctcaggatccgctggacgcccaggcggcctatagcgaactgtttgaccgcggccgggccacctcgctgctgctgtttgaacatgtccacggcgaatcccgcgaccgcgggcaggcgatggtcgacctgatggcgcagtacgagcgccacggtctgctgctggatagccatgagctgccggatcatctgccgctatatctggagtatctggcgcagctgccggaagaggaagcgcttggcggcctgcgggacgtcgcgccgatcctcggtctgctcagcgcgcgcctgcagcagcgcgaaagtcgctatgcggtgctgttcgagctattgctgaagctggccaatacgcaggtcgacagccagaaggtggcggagaagattgccgacgaagcgcgcgacgatacgccgcaggcgctggacgccgtctgggaagaagaacaggtcaaattctttgccgaccagggctgcggcgagtcggaaatttccgctcaccagcgtcgttttgccggagccgtggccccgcaatatctgaatatctctaacggaggacagcaataa

SEQ ID NO: 139196 - DNA, 1536 bp, Enterobacter cloacae
atgaaaattcgttcacaagtcggcatggtgctgaatctcgataagtgcatcggctgccacacctgctcggtgacctgtaaaaacgtctggaccagccgggaagggatggaatacgcctggttcaacaacgtggaaagtaagccgggcgtcggtttcccgaacgactgggaaaaccaggaaaaatggaagggcggctggatccgcaaaatcaacggtaaactgcagccgcgcatgggcaatcgcgcgatgctgttgggaaaaatcttcgccaacccgcatctgccgggcatcgatgattactacgagccgtttgattatgactaccagaatctgcataacgcgccggagagcaaacatcagccgatcgcccgtccgcgctcgctgatcaccggccagcggatggacaagatcaccagcggtccgaactgggaagaaatcctcggcggcgagtttgaaaagcgcgccaaagatcagaacttcgacaacatgcagaaggcgatgtacggccagttcgaaaacaccttcatgatgtatctgccgcgcctgtgcgagcactgcctgaacccggcctgcgtcgcgacctgcccgagcggcgccatctataagcgtgaagaagacggcatcgtactgatcgaccaggacaagtgccgcggctggcggatgtgtatcaccggctgtccgtacaagaagatctatttcaactggaagagcgggaaatccgagaaatgcatcttctgctacccgcgtattgaatccgggatgccgacggtatgctccgaaacctgcgtgggtcgcatccgctatctcggcgtcctgctatacgacgcggacgcgattgaaaacgccgccagcaccgagaacgagaaagatctgtatcagcgtcagctggacgtgttcctcgatcccaacgatccaaaagtgatcgagcaggcgctgaaagatggcgtaccgcagggggtcattgaagctgcgcagcagtcgccggtttacaaaatggcgatggactggaagctggccctgccgctgcacccggaatatcgcaccttgccaatggtctggtacgtgccgccgctgtcgccgattcagtccgccgccgatgcgggtgaactgggtagcaacgggatcctgccggacgtggaaagcctgcgtattccggtgcaatatctggcgaacctgctgaccgcgggcgatacccagccggtactgctggcgctgaaacgaatgctggcgatgcgccactataagcgtgcggaaaccgttgacggcgtcatcgatacccgcgcgctggaagaggtggggctgagcgaagcgcaggcccaggaaatgtatcgctatctggcgatcgccaactacgaagatcgtttcgtggtgccgagcagccatcgtgaacaggcgcgagaagcgtttccggagaaaaacggctgcggctttagctttggcgatggctgccacggctctgacagtcagttcaacctgttcaacagccgtcgcatcgacgccatcgacgtgaccagcaaaacggagccgcacgcatga

SEQ ID NO: 139197 - DNA, 555 bp, Enterobacter cloacae
ttgctgacccttgccgcacgccatccggcagcgcagaaactcagtctgctgcagggggagttcgccgtccggcggcggtctgcgcaggcgagctggcgtccggcgcggtatgccgcgctggccctggcgttactggcaggggcaaatagcgtgctggaccatcgcgatctggcgcgtcaggccgaggcggcgcaacaggccagccgggccttctatcaccgctggtttccgacggagaaaaaggtgattaacccgcgactgcagatgcagcagcacctgcaaaccctcacccgtcaggcgcagcatgcccccctcgtcgaccgcctcagcgccttgcaaaacatcctcagcgaaacgccggggatccgtctgcgagcgctgagctgggatgccgcgggcaatcgtctgcagctggatatcgccgcggtctcttcccgggcgctggagcagtttacccagcgggcgcagccgcggtttcgcgtccggccgggcgacatgatcacgaaaccggatggcattgagggacaactgacgctggaggaaaacgatggctaa

SEQ ID NO: 139198 - DNA, 486 bp, Enterobacter cloacae
atggctaatctgcttatctggtggcggcagcgcacgccgtcggagcagcgcctgttgcttggtctgacagggctgctggcggcatgcgccttctggtatgggctgtggcagccctggcgagcccgcgaggcgcagtggcggcaaaccctggtgaaagagcaggccagcctgcgctggatgacggagcaggctccgcgcctgcagcagctcagccagcagcccgcgccggcggcaaaagaggcgctcaccgccctggtgatgcgcgaggcggcgagccacggactgacggtcatccgcctgcagccgcagggaaaacgtctgcagatcacccttcagccctgcgctttccaggcgctgatcgactggctggacgctccggcgatgcgcggcgtcaacgcgatctcgctgtccgtgaccgggcagccgtcgcgacccggctgggtcacggtcaaccatctgctgctggagcgcgacgatgaaggctaa

SEQ ID NO: 139199 - DNA, 747 bp, Enterobacter cloacae
atgaaggctaactggatcgcgggcggactgctgctggtcctctatctgttgtggctcaccgccacggctccggcgcgcctgctggcccccatgctgccgcccggcgtacaggtggggcagtttagcggcagcgtctggcgcggcgcggcgcaaccggtctactggcatggggaacggcttgaacgactggcgtggtcgctgaccctggcgggctggcaggtctctctcagcgatccccgcggcgtgatgggtcaggcccggctgtggggccttcgcgatctgcgcctacaggaggggcggctcaccgcccccgccagcctgctcagccgctggttgatgtcgactatgcccgtcaaggccgcgggggaggtcaccttcagcctgaccgaagggcggttcagcgacggacgctgccggcatatcatcgccggaggcgcgcagtggcggcaggcccgactgcactccccggtcggcagcctggagctggcccaggttaatggcaccttccgctgtacggtggacggcgccgtggcgctgactctccgtcaggactctcatcagctgagcctcagcggccaggggactctgtcgcccgatggccgctatctgtttcgcggcacgctacagccccggcaggggatgccgccgctgctggcgctgctggtcacgcgcccgacagcgaataacgccccgggcccgacgccgtggcagctgcagggaaaatggttaccccaggagcaaaaatga

SEQ ID NO: 139200 - DNA, 801 bp, Enterobacter cloacae
atgacgacactagccgcgttatcgctgcactttccctttgtctggtatggctttctgctgctgttcggcctggcgctgggcagcttttacaatgtggtgatctatcgtctgccgcgcatgttgacccagaccgcggacgacgagcggataaccctcagcaccccgggctcttcctgcccgcagtgccgccagccgatcgcctggcgggacaatatcccgctgctcagtttcctctggctgggccgtcgcgcccgctgctgtcaggcgcccatcgcgtggagctatccgctgaccgagctggccaccggcctgctgtttatcctcgccggagctttgctggcgccgggcctgccgctggcgggcggcctggtgctgctctcgttcctgctgatactggcgcggattgacgcccggacccagctgctgcccgatcgcctgactctgcccctgctgtgggccgggctgctgttcaatcttaacgaggtgtacattgccctgccagatgcggtcgccggggcgatggccggttatctggcgctgtggtcggtctactggctgttccgcctgctgaccgggaaagaggcgctgggctatggcgattttaagctgctggcggcgctgggcgcctggtgcggctggcaggttctgccgcaggtgctgttgctcgcttcggccagcgggctggtgtggaccctgctgcaacgcctgtggacccggcagtcgctgcagcagccgctggccttcggcccctggctggcgctggccggcgggggtatttttctctggcagcagatggtctag

SEQ ID NO: 139201 - DNA, 1995 bp, Enterobacter cloacae
gtgtcctcattgccggttgccgctgtccttccagaactgttatccgccctgcagcatgcgccgcaggttttgctcaacgcgccgaccggcgccgggaagtcgacctggctgccgctgcagatcctcgccgagggcaacatcgcgggacgcattatcctgctcgagccgaggcgcctggcggcgcgtaatgtcgcgcagcggctggctgaactgcttggcgaaaagccgggggagaccgtgggtttccgcatgcgcgccgaaacctgcgtcggaccgcagacccgcctggaggtggttacggaggggatcctgacgcgcatgatccagcgcgatccggagctgacgggcgtggggctggtgatcctcgatgagtttcacgagcgcagcctgcaggcggatctggccctggccctgctgctcgacgtccagcaggggttacgtgacgatctcaagctgctgatcatgtcggcgaccctcgataacgatcgcctgcagcgtctgctgccggaggcgccggtggtggtctcggaggggcgcgcttatccggtggagcgtcgcttcagcccgctctccgcgcaccagcgttttgatgaggcggtggcggtagcggcggcggagctcctgcggcatgaacagggatcgatgctgctgtttctgcccggcgtcggcgagatccagcgcgttctggaacagctgacggagcgcgtggcggaggatgccattctctgcccgctgtatggcgcgttgcccttaagcgaacagcgcaaagcgatcctcccggcgccggccgggaagcgcaaagtggtgctggccaccaatattgccgagaccagtttgaccatcgaggggatccgcctggtggtcgacagcgcccaggagcgggtcgcccgctttgacccgcgcaccggcctgacccggctggtgacgcagcgcatcagccaggcatcgatgacgcagcgtgccggacgcgccggtcgtctctccccggggatctgcctgcatttgctcggcaaagaacaggcggaacgggcggcggcgcagagcgagccggagatcctgcacagcgatctgtcggcgctgttgctggagctgctgcagtggggctgccacgatccggccgcgctggcctggctggatcagccgcccggtcatgaatggcttatcgctccgctgctgctgcagggcagcgcttcgccggatgcccgcatgctgttggctctgccagtggaaatcggcgagctgatcgccgcccgccctgaactggcgaaaagttccgacacggtggagtgggatgaagcgcaggggacgctgaaagcctggcggcggacggtgatcggccagttggtgatcaagacccagccgctggcgaagccctctgaggcagagctgcatcaggcgatgctcaacggtattcgtgagaaaggcctcggggtgctcaactggacgccagaggctgagcagctgcgcctgcggctgcactgtgcggcgcagtggctgccggaagaggcatggcccgcagtggatgacgcttcgctgctggcctcgctggagacatggctgctgccgcagatgaacggcgttcattccctgcgggcgctgaaggcgctggatctgcgtcaggcgctacaggactggctgccatggccgctgcgccaaaagctggatcgcgagctgccgacgcactataccgtgccgaccggcagccgcctggcgatccgataccatgcggagaacccgccagcgctggcggtgcgtatgcaggagatgttcggcgaggccacgacgccggtgatcgccgaggggcgggtgccgctggtgctggagctgctgtcgcctgcccagcgtccgctgcagatcacccgcgatctgagcgccttctggcaagggagctaccgcgaggtgcagaaagagatgaagggacgctatccgaaacacgtctggccggacgatccggccaacgccgccccgacccgccgcagcaaaaaatactcgtag

SEQ ID NO: 139202 - DNA, 507 bp, Enterobacter cloacae
gtgccggatgccatcaaaggcaccagcccgacgccgcagcaggatttggtgcgggtgatgaacgccccgcagctgtacgttggccaggaagcgcgctttggcggtaaggtggtcaatgtgcaaaaccagcaggggaaaacccgcttagaaatcgccaccgtaccgctggacagcggcgcgcggccagtgctgggcgagccgtcccgcggaaggatttttgctgacgtcaatggcttcctcgatccggtggatttccgcggtcaactagtgaccgtggtcggaccgatcgccggggtggttgacggcaaggtgggcagcacgccgtataaatttatgctgatgaacgccaccggctacaagcgctggaacgtagtgcagcaggtggtgatgcctccgcaacctatcgacccgtggatgctgggtccgcgcccctggggctacggctatggcggctggggctggtacaatcccggccctgctgaggtgagaaatgttgtaaccgaatga

SEQ ID NO: 139203 - DNA, 1719 bp, Enterobacter cloacae
atgacgacgaataactatttcagaggtgatgcagtgaaaaaggtttggctaaaccgttatcccgcagatgttccggcggagataaatcctgaccgctatcaatccctggttgaactgtttgaacatgccaccacccgctacgccgaccaaccggcgtttatcaatatgggtgaagtgatgacctaccgtaagctggaggagcgtagtcgcgccttcgccgcttatcttcaggaggggttggggttacagaagggcgatcgcgtggccctgatgatgcctaacctgctgcagtatccggtggctctgtttggcatcctgcgcgccgggatgatcgtggttaacgtcaaccccttatataccccgcgcgaactggagcatcagctcaacgacagcggcgcggcggcgatcgtcatagtctccaactttgcccataccctggaaaaagtggtggcgaaaactcaggtccagcatgtgatcctgacgcgcatgggcgaccagctttccaccgccaaaggtacgctggtgaactttgtggtcaagtacattaagcgcctggtgccgaagtaccacctgccggacgccatctcgtttcgcagcgcgttgcagcacggctatcgcatgcagtacgtcaagccggagatcgttgcggaagatctggcgtttctgcagtacaccgggggcaccaccggcgtggccaaaggtgcgatgctcacccaccgcaatatgctggctaacctcgagcaggtcaatgccacctacggcccgctgctgcatcgcggcaaagagttcgtggtgaccgcgctgccgctgtatcacattttcgccctgaccatgaactgcctgctgtttatcgaactgggcgggcaaaatttgctgatcaccaacccacgcgatatccccgggctggtgaaggagctggcgaagtatccttttaccgccatgaccggggtcaataccctgttcaacgccttgctgaacaacaaagagttccagcagcttgatttctcctcgctgcatttgtccgccggcggtgggatgccggtgcagcaggcggtggccgagcgctgggtaaaactgaccgggcaatatctgctggagggctacggcctgacagagtgttccccgctggtcagcgttaacccgcacgatattgactaccacagcggcagcattggcctgccggtgccctccaccgaagccaaactggtggatgatgatgataacgaagtggcgccgggtcagccgggcgagctctgtattaaagggccgcaggtgatgctgggctactggcagcgccctgacgcgacggatgagattatcaaagacggctggctgcacaccggggatatcgcggtgatggatgaagaggggttcctgcgcatcgtcgatcgcaaaaaagatatgatcctggtgtcgggttttaacgtctatccgaacgaaatcgaagatgtggtcatgcagcatagcggggtgctggaagtggcggccatcggcgtgccgtccggcagcagcggcgaagcggtgaagattttcgtagtcaagaaagatgctgcgttaaccgaagaggcgctgattacgttctgccgtcgccatttgaccggatacaaggtgccgaagctggtggaattccgtgacgaactgccgaaatccaacgtcgggaaaattttgcggcgagaactgcgtgacgaagcgcgcgctaaagtggacaataaaggctaa

SEQ ID NO: 139204 - DNA, 1116 bp, Enterobacter cloacae
atgatcaccaccgacgatggcctgcgcgctgtctgcgaagcggcaagcgcggcctccgccgtcgctctggatacggaatttgtccgcacccgcacctattacccgcagctgggcctgctgcagctgttcgacggccagcaggtctctctgatcgatcccttgacgattaacgactgggcgccgatgcgcgacctgctgctcaaccaggatgtgactaaatacctgcatgccggcagcgaagatttagaagtcttccttaatgcatttaacctgatgccgcagccgctgattgacacccagattctggcggccttctgcggccgcccaatgtcctggggcttcgcctcgatggtggaagagtattccggggtagcgctggataaaagcgaatcccgcaccgactggctggcgcgcccgctgactgagcgtcagtgtgaatatgccgcggccgacgtctggtatctgctgccgatcgccagccagttaatggcggagaccgatcgcgctggctggctgccggcggcgctcgacgagtgccgcgtgatgcagcagcgtcgtcaggaggtggtcgacccggccgaggcctggcgcgatatcggcaacgcctggcagctgcgtacccgccagctgggttgtctacagctgttggcggagtggcgcctgcgcaaagcgcgcgagcgcgacctggcggtaaactttgtggtgcgggaagagcatctgtggagcgtggcgcgctatatgcccaccagcctgggcgagcttgacagcctcgggttgtccggtagcgaaattcgcttccacggcaaaacgctgattagcctggtcgaaaaagcgcaggcgctgccggagtcggccctgccggcgccgctgcagaacctgatcgacatgccgggctaccgcaaagcctttaaagatattaaagcgctggtgcaggaagtgagcacggagaagggcgtaagcgcggagctgctggcgtcgcgtcggcagatcaaccagctgctgaactggcactggcagctgaaaacgcaagccggtgaacctgagctgatttccggttggcgcggggagctgatggccgagcggctgaagaggctgttaaacgactatccgcgctag

SEQ ID NO: 139205 - DNA, 270 bp, Enterobacter cloacae
atggctttactcgacttttttctctcgcgaaaaaagaacacggctaatattgcgaaagaacgcctgcaaatcatcgtcgccgagcgccgccgcggagacgcggagccgcattacctgccgcagttacgcaaagatatcctggaagtgatctgtaaatacgtacagatcgacccggagatggtcagcgtgcagctggagcagcgggacggggatatatccattcttgagctgaacgtgaccctacccgaaacggaagagtcgaaatcctga

SEQ ID NO: 139206 - DNA, 735 bp, Enterobacter cloacae
ttggcccagaagggaaagaaaaccgtcgttatcgacttcgacatcggcctgcgtaacctcgacctgattatgggctgcgaacgtcgcgtcgtttatgatttcgtcaacgtcattcagggcgatgccacactgaaccaggcgctgattaaagataagcgcacggaaaatctctacattctcccggcttcccagacccgggataaagacgctctgactcgcgaaggcatcgacaaggttctcgaagaactgaagaaaatggaattcgatttcatcgtctgtgattccccggcaggcattgaaaccggtgcgctgatggcgctttactttgctgatgaagccatcatcaccactaacccggaagtctcctccgttcgcgactccgaccgtatccttggcattctcgcctctaaatcccgccgcgcggaaaatggcgaagagccaatcaaagagcatctgctgctgacccgctacaatccaggccgcgttaataaaggcgatatgctgagcatggaagacgtgctggaaattctgcgcatcaacctggtaggcgtgatcccggaagaccagtcagtcctgcgcgcatccaaccagggtgagccggtgatcctcgatgccgcctcggacgcaggcaaagcctatgccgataccgttgaacgtctgctcggagaagaacgccctttccgcttcattgaagaagagaagaaaggattcctcaaacgcctgttcggaggataa

SEQ ID NO: 139207 - DNA, 1608 bp, Enterobacter cloacae
atgaagagaattgccatcgtcggcgtggggccgacggggatttacaccttttatgaactggtgaagcgcggtgagccgctggccatcactctgtttgaaaaagaggcgcaggccggggtgggtatgccctacagtgacgataataccgcggcgcaaatgctggccaatattgccagcattgagatcccctccatcgacctgacctacctgcaatggctgcagcagcaaagcgatgactggctggcggcgcgcgggcttgaacggcacgccctgcatgagcgccagtttctgccgcgggttatcctcggcgaatactatcgcgaccgttttctgtacctcgttgagcgggcccgggacgtcggctttgtgattagcgtttgtgaatcctgtgaagtcacggatattgcggttcagcccaccgggatcgccatccacaccgatagtgcagcagacccggtaattgtcgacctggtggcgattgccaccggccatctgtggcctgaagaagagcgcgccagccgacagtacttccccagcccgtggaccggcctgatggaggcccgcattgccccctgtcgggtggggatccttgggacatcattaagcgcgattgatgccgccgtggcggtagtggcccgccacggcgttttccataccgaggacgacaaaacgacccatttttccctccatccaggcagcgaagcgctggagatcaccctgatgtcacgccacggcgtgctgccggaggccgatttttactgcccgatcccgtgggagccgctggagattgccactcccgccgccctcgaagcggccattgcggagggtagcgacgctctgttaaatcggatttttgagctgatcgttaaagagctggaatatgctgcccccgactggagcgaggcgatcgggcttcgtcagctgacgcctgacagtatcgccgacgcctggtttgccgaccgcctcacccatgacccctttcagtgggcgcagcgcaatctgcaggaggtggagcgcaataagcgcgaacaccacacggtgccctggcgctatgccattctgcgcctgcatgaggcgattgaaaccgtggtgccgcagttcaacgacgcggacagccgtcgcttccgccagggcctcgctcgggtatttatcgataactacgccgccattccgccggagtccatacgtcggctgctggccctgcaccgggctggcattctgcggatcctgacgctgggcgaagattatgagctgcagcgggagcctgaccggacgctgattgttcatcatcgtcagcgctgcgaattcgatgtctttatcgatgcccgcggacaaaaggcgctgaaaacccgggatctgcccttcccttcactgcgccagcagctgctggcctgcggcgacgacattccggacgtcggtgatgactacacgctgcaggcgccggagacagtgcgcggccgggtcgccttcggcgcccttccctggctgatgcacgatcgcccctttgtgcaggggctgacggccagcgccgagattggcagcgcaatggcccgcgccgtgtcgcagcaggccgccggccgacggcgccgtctctggtatatcgaatag

SEQ ID NO: 139208 - DNA, 1101 bp, Enterobacter cloacae
atgagtcatctttttagcgcgacgcgaattggtcaactcacccttgataaccgtatcgttatcgccccgatgtgtcagtactccgccgacgagggtaaggcgacctcctggcaccggatccatcttggccaactggctttctccggcgccggcctgttaattctggaagccacggcggtagagcctgcggggcgtatctccccgggggatctggggctgtgggatgatgaaaccgaaaacgccctgcgcggcgtagtcgaagatattcgggcctggtcgccgatccgtctggggatccagctgggtcatgccggacgcaaggcatcctgcgccgccccgtggcagggaggccatcagctggcgctcaacgatggtggctggcagaccgtcgccccttccgccgtggcgtttcacgatggcgatcgcgctcccgctgaactgagccatgccgatctggcgcgcatcaaagcggccttcgtcgccagcgcgctgcgcgcccagcggctgggctttgagctgattgaactgcacgccgcccacggctatctgctgcaccagtttctctcgccgctcagcaaccagcgccgcgacgagtacggcggttcgctggagaaccgaatgcgctatccgctggaagtctttaaggcgatccgcgaggcagtgggcaacaccatggcggtgggcgtcaggctgtcggctaccgactgggtcgaaggcggctgggactgcgagcagtccattaagtttagccagcagctggaaacgctgggcagtgactatattcacgtctccagcggcggtttgtcgccgcagcaggcgatcaccgttgggccggggtatcagttgcctttcgcccgcgatattcgccagcaggtagctatcccggtgattggcgtggggctgatcaccgacccgcagcaggcggaagcggcgctggagaatggcgatgccgacctgatcgccctcgcccgcgcggtactttacgatccgcactggccgtggcacgcagcggccagccttggcgcccaggtccgtgtgccgtcgcagtatttgcgctcggagccgcacggcctgaaaggcaccctgctgccaaaccgttga

SEQ ID NO: 139209 - DNA, 534 bp, Enterobacter cloacae
atgcaacgaatcacaaagctggataacgacttaacctgtaagggaatgctgatgaaactctggaataaaacactactcgcttccgccctgtgcctgaccctgtttggctgcgacgatgcgtcgaaagttgataacaaactggataaggctaaagataatgcggagcagatgaaggatgccgcggcggataaagcgcaagcaattaaacaggatgcggataagcaaatcgatacgctgaaaagccaggctgacgccgaggccgatcgcctgaaggatcaggccagcgccatcaaggccgaggcggacaagaaggcggacgccatcgcccagcaggcgaaagcccaggccgatgcggtgaagcagaacgcaaagcaggaaagtgaccgcatagtcaaagaggcgggtcagatcaaagacaacgccatcggtgacgccaatcagctctcggctgaagcggcgagcaaaaccaaagccatccaggacagtatcgcgaaggataaacagaacgccgcaccgcctgccgcacagcagtaa

SEQ ID NO: 139210 - DNA, 795 bp, Enterobacter cloacae
gtgaccaaagcactgcagcagctggagcaggagagcggggtccggctgctgcagcgcaccacccggcgtctgtatcttacgccggagggggaagagttttatcgtcgcagcaaaccgttgctctcccaggccgacgatctgctggagtcgttcgcgccggaccggccgatccgcggtcagctgcgcgttgatatgccgatcgcctttgcccggctgctggtgatcccgcatctgctggatttttatcaggcccatccggaggtggagattgtcctcagcagctccgacgtacgccgggatatgctgcgcgatggtctggattgcctgctgcgggtgggggatcttgaggatggcgactatgtggcgcgttcactgggggaggtggcgttaaccacctgcgccagtccgggctatctggcgcgctatggggcgcccgcgacgctggaggacctgcagtcgcatctggcggtgaactgggtgaacagcagcagtcggcagattatgccctggcgattccagaccccggagggcatcaggcagatcgccattcccggtaaactggtgctggacaactctgaagtctttactgctgccgggctggcggggctggggatgctgcaggggatgcgtttctttttgcaaccttatatcgacagcgggcaactggtggaagttttgccggactttccggcgccgcgtcgaccgttgtcgctgctctatccgcaccggcatctctcgcataaggttcgggtctttgccgactggctgcaggggctggtagcgaccctggactga

SEQ ID NO: 139211 - DNA, 210 bp, Enterobacter cloacae
atgaaaaacgtaaaattactcgccgctgccggtatgctctccctggtctctttcgctagcttcgctcatccggtgagcgtgacagcagacaccctggacagcgcagaagcgaaaatcgcaaccattgcgaaagaacaaggcgcttcctaccacatcaccgaagcctataccggcaaccaggtccatatgaccgccgagctgtctaaataa

SEQ ID NO: 139212 - DNA, 897 bp, Enterobacter cloacae
atggcttttctctcacgtaatctgattctcgacctgctgctcaccgcgctggcgcccgctatctgggggacgacctacatcgtcacctcccagtttcttccccctgaccgcccatttattgctgcgctgctgagggtgctgccggcaggtatcgccctgctgatctggagccgtcgttttccgcagcgcggcgaatgggcaaagctgatcgttaccggcatcttaaatatcggcgcgtttcaggcgctgttgtttatcgccgcctatcgcttacccggcgggctggcggcggtgatcggcgcgatccagccgctgctggtgatgctcctcgcctggtgcgtcgaccggcagcgctcgccctggctggcggtgttatccgccatcgccggcatactcggtatggccatgctgctgctgtcgccgcacaccgtcctcgacccgctgggcatcggcgcggcgtttctcggggcgatcagtatggcgctgggcacctggctctcccggcgctgggcgctctccctgccgatcgtcgcgctgaccggctggcagctgacgatcggtggggtggtgctggccccggtggcgctgatcgttgaccctcctttgcatcaggtaacagtgctgcaggcggctggctatctgtggctgtgcctggcgggcgccatgctggcctatggcctgtggtttcgggggattggccgcctctcaccggtggccgtgtcggcgatgagtctgctgagcccggtgaccgccgtggtactgggatggatattcctcggacaaaagatccaggggatggcgctgatgggattgatcgtggtgctggcgagcgtgatgtctatccagcgcgcgctggcgcgtcaggcggcgggagcaaaaacgaaaaaagccccgtaa

SEQ ID NO: 139213 - DNA, 507 bp, Enterobacter cloacae
atggacaaatcaccgccgatcgacgccgtggatcgcatcctcgcccagtggcagcgggagcggccagacctcgactgcagccccatggggccgataggtcgcctgaaacgatgcgctatgctgctggagccgcaggtggaagtggcctttacgcgccacgatctggtgcgctgggagtttgacatgctggcgacgctgcggcgcgccggggcgcctttcgtactttcgcccacccagctcttctccacgctgatgattacctccggcaccatgacccatcgtctgaaggcgctggagaaacgcgggtttattacccgcctgcccaatccggaggatgcccgcagtatgctggtcgccctgacttccgccggacgcgaacggatcgatgccgcagtggaaacccacgtcgacaacgaacggcaactgctggcaggactcagtgacggtgaacgccagcagttggatcaggcgctgcgggtgttgatgcgactgctggaaacgggctaa

SEQ ID NO: 139214 - DNA, 957 bp, Enterobacter cloacae
atgacgactccgattgcgctccgcgactggcggctgctggcggccgggtgcggcggccttctactgctggccgccgctatcaccttgcacagccactggggtgactttctcctgtggtgtctcgccacccaaattaccctgcatcgctatctggtgatgtaccttctgttgctgaataaccatcagtacagcggcggtatctggctgctggtgggggcctttctctatggcgtgctgcacgccgtcggaccgggacacggtaaatttatcgtgacgacctacctgagcaccaatcaggagagcctgacggcggcgcgggtggtgccctttctcggcagcctgttgcagggcgtcactgcgatactctttgtctttattcttgcggtggggctgaatctggccgccggcgatcttagcgccagccgctggtacgtcgagaagatcagcgccctgaccatcggcgtctttggggcttatgttatctttcgcgctctgcaaagcctgtggccgacaaaacagttgattcgccgtctgacgccagcgcatcagcatgacgcctcgtgcggctgcggccatcacggcgtggggcaggatctgcagggcgctgactggaagacgcgccttggcgtggtgctggctatcggcgttcggccctgtagcggggcgatcatgattttattattcgccaatgcgttggggattgttagctggggcatcgccgcggtgatgagcatggcgctgggcaccgcgctctcgatcctcggtctgtcgctactggttcactatgcgcgccatcggacggtcaaacgattggccacgaatcaccgcccgcggccctggctggtaccgttggtgaagatcctcggcggtctggcgctgatcctctttgccgtgggattgtttttcagcgtggtgccgatcagcgccaacggcgactttatcgccgctggctgttag

SEQ ID NO: 139215 - DNA, 159 bp, Enterobacter cloacae
atgacgaataacgccgacataaaaaaaaggaacttcctgactcagaatgaaattgagtctttacttaaagcggccgataccggtccttatgctgcacgtaattattgcctgacgttactgtgctctgagagatcccctcataatttccccaaagcgtaa

SEQ ID NO: 139216 - DNA, 357 bp, Enterobacter cloacae
atgagcacacaaaacgtcaacgtaaaaccctccaccaaagaaagcacaaccctccggactgacggttttgtgcgcaacattcattcccgaaacccgttcgatgttatccgcgccgatgtagtgctggaacgtatcgagaaaaaggctggtcggtgctgcgggatgcattacgagctgtatcaggcccatctgctgggtggtgcgctggattatctggatgcgctgccgttgaaagaccgtccggtgttaatgggcgctgcggcaaagcgcggctatctgctgacgctagccgaagaggaacgcgcgctggaagcacgggatgtactgatgagtgaactggcggcaaacgactgctga

SEQ ID NO: 139217 - DNA, 213 bp, Enterobacter cloacae
atgaaagtatacggccatcaacactcatcagaggttttctcccgggaaacttccccatcctgttttgaaccaaaagcggaaaaagtgatcgcttttcacgggaaggacgccagctatgcatacaacgtgctggccgatctgaaagccgcaggtgcctcatatacccgccggaatatcatcgccgatatgttccgccgtctgggtgtggattga

SEQ ID NO: 139218 - DNA, 225 bp, Enterobacter cloacae
atggaatacgagaaaggaaaaatccagcagggggcagggaacgcctattatgcaggaatgcagtggcgcggtattacactcggacacgccgatgctgcagcgcttaatcagtttgatatcgatatcagcaaagctcaggcacccgaagcacgcacctggttgcttcagaacaaagcggaattcatcgctttgatcctgggcattgaagtcgtaaacgtcgggtaa

SEQ ID NO: 139219 - DNA, 312 bp, Enterobacter cloacae
gtgcatgttatatcacgagccccttttgatgaggcggcgagacactatccgaatgatgctgcggccatcgatgacacctatcgtgtactaaagcgggttgtcgcaaaaaaaccggatgagctaaagcgatactttactagtctggatcgcatgaaataccgggaaaaatggtgggttatcgatatcggtggtaataaccttagaatgatgttttttgctgattttgagcgcggaaagatattcgtcaaacacataaccacccatgctgaatatgatcgcttaacgaaatattatcgggagcacaaagaatga

SEQ ID NO: 139220 - DNA, 417 bp, Enterobacter cloacae
atgatttttagcgatgccattaaagcggcgaatgacctggcgagtattgtccctctgctgggtggcagctcgtcccgcaaagattacgaagaggcgcttaaactcgttgaatatcttctggaacatgacccggacagcccgctggttgatatgctgactgcccgcatcgatgcctgggaagataacgcggtggagtttgaagaatttaatacgcgcatcgaagcaggcaaaaacggtgtatcgttgctgcgggttcttatgcagcaacacgggctttcacagtccgattttgaaaacgagataggcaaaaaatcgctcgtcagccggatcctcagtggtgaacgcagtctgacccttgatcacatgcgggcgctggcaaatcgatttcaaatcccggtctcgatgtttgttggctga

SEQ ID NO: 139221 - DNA, 381 bp, Enterobacter cloacae
atgaacacacagaacgtcaacgtcaaaaccgccaccaaagaatctaccgaaagatgggttgaaaaccttctggccaccgcgattagcgagcaaaagagcctcctgctgtatctggtagagcttaaaagcaagcgtatgagagaaagcgaaagaagtgaactggtatggggaacgttgatgcgtatggctgataacgtcctgggggcgggagtggttgactggcacgcggacgttctgcaggtgcatttcggcgttgctcaaccgtggcttcagtcccggaaactcgttgagcttctttatggtgataccggtaaggatgcgtggaatgacgcacgcaaatacattgctgactcaatgcgcgctgaaccctatatgccatga

SEQ ID NO: 139222 - DNA, 348 bp, Enterobacter cloacae
atgaacttacacctgactgaatcctcagcccatccgggaatgctggctacagcagaagcagagcgcgaatactggctgagccggcagaaagcagcggttaaagcaccctcagaaatcgacgttcacacgttccatgacgcgctgggcctgatgtatccgctcaactggtcaacgagtgagaacggcgagtgggaaacgttcatgctgcaggagatggtttgcggtgacgtgacagagatctatgcccgctacggagccagatatttccggctgcgtgatgtgtgtaacctgagccatgcgcagatcacaacgcgcattaaggagggatttaacctgaccgagaaatga

SEQ ID NO: 139223 - DNA, 147 bp, Enterobacter cloacae
atgaatttcgacccgcaaatcgtcgcacaggctaacgcgtttgtaaatgcccttcgcagtggtcagcgagcccgcgttcccgctttaaagctggagtactggcagcagtttatgaccgcggtttacgctggcctcggcctcgcgtga

SEQ ID NO: 139224 - DNA, 834 bp, Enterobacter cloacae
atgtcacagctgagttttgccgatgtgttcaatatggccagagaaaccgctgataacagccctgtcattcaggcagtgcagcagatggcggaacaggtgcctacagttcagcgtatgatgagtgagcagtactgcagggggcgttttatcagcgtatttaaggatacgggtcgccatctggggcgctgggaagtgttcagtgattttctgtcactcgccgccagtgagctggatatggcccggatacgaacgccggagagcatggagcattgccggaaaatctgcgcccggtacgaggccaccgacatcgcgaacatgcaggaaatgttttgcctgatggtctgtgcgctggaggcgaaatttcatgatttcctcggcgcgatttttatggggcttgagctgggtgataactttcgcgggcagtattttaccccgtattccgtgcagtgtctgatggcgcggatgctaatgccaggtgtcagagacactatccgccgggaagggattgccacagtcagcgatccggcgtgtggagctgccgggatgctgatcgcctatgcagagtgcctgcttgaagccgatatcaacccctccatgcacatgttcggcagctgcattgacatcgatccggtggcggcagatatggccttcatccagctgtcactgctggggatagcggcggaagtggtgacgggcaacactctcacgatgcagttccggcgggtgaggtataccccggtttactatctgaatgcctttgaaaagcgactggcagatcttctccggttcagggctatgcgggacttaatttgcaaaatacaggaggctgcgtaa

SEQ ID NO: 139225 - DNA, 135 bp, Enterobacter cloacae
gtggtggcccagggcgtgctggacggcgagcggcatattaccgcccagcaggtgctggccaaacatgatgaaaattacacgccgccggaggtgaaaaacgccatgacgccggagaaaacgggggcgcagccatga

SEQ ID NO: 139226 - DNA, 1953 bp, Enterobacter cloacae
atgatgccggagctgggcaactttttattgtgtctggcggcggggctggcgctgctcctgagcgtctatcccctgtggggcgcggcgcggcaggatcggcggctgatggccctggcgcggccgctggcctgtgggctattcgcctgtatcggcggcgccttcctgctgctggtgcacgcctttgtggtcaatgactttaccgtccgctacgtggcggaaaactccaacagcgcgctgccggtgtggtatcgggtagcggcgacctggggggcgcacgagggctcgctgctgctgtgggttctgctgctcagcgtctggaccttcgccgtcgccatcttcagccgccgtatgccgctcgacgccgtcgcccgggtgctggcggtgatggggatgatcgcctttgggttcctgctgtttatcctcttcacctccaatccgttcagccgcggcctgccgcagtaccccattgatggccgcgacctcaatccgctgctgcaggatatcggcatgattttccatccgccgatcctctatatgggttatgtcggcttctcggtggcctttgccttcgccatcgcctcgctgctggcgggccggctggatactgcctgggcgcgctggtcgcgtccctggacccaggcggcatggatgttcctcaccctcggcatcgtgctgggctcggcgtgggcatactacgaactggactggggcggctggtggttctgggacccggtggaaaacgcctcgtttatgccgtggctggtgggaaccgcgctgctgcactccctggcggtgaccgaaaagcggggcagcttccgcgcctggacggtgctgctggccatcgccgccttctccctgtgcctgctgggcaccttcctggtgcgctccggggtgctggtttcggtgcatgccttcgcctcggatccgtcgcgcgggctgtttattctggtactgctgattgtcgccatcggcggatcgctgctgctgtacgccctgaagggcggccgggtgcgggcgcgggtggaacatacgctgtggtcgcgcgagtcgttcctgcttggcaacaatatcttgctgatggccgcgatgctggtggtgctcctcggaacgctgctgccgctggtgcataaagagctgggcctcggcagcatctccattggcgagccgttcttcaataccatgttcaccgccctgatggcgccgtttgcgctgctgctggggctgggaccgctgatccgctggcggcgcgatgacgtcgccaggcagattaagcgcctgattatcgctctgctggtgacgttgtcactttctctggcgctgccgtggctgctgcaggaccgtatcaccgccatggcggtcataggcctgatgatggccctgtgggtgctgatcttcgccctgctggaggttcacgaacgggccacccatcgccacggcttctggcgcggcctgcgcactctgacccgcagccagtgggggatggtgctcggccacgttggcgtggcggtgaccgttatcggcatcaccttcagccagaactacagcgtggagcgcgatgtacggatgcgccccggcgacagcatcgatatccaccgctatcactttgtgtttaacggcgtgcgcaatatcgtcggccccaactggaccggcggcgaaggcattatcgccgtgacccgcaacggccgcccggaagcggcgctgtatgccgagaaacgcttttacaccgccagccggatgatgatgaccgaggcggcgatcagcggcgggctgacccgcgatctgtacgccgcgctaggggaagagctgagcgacggcagctgggcggtgcgtctgtactataaaccgttcgttcgctggatctggtacggcggggtgctgatggccctcggcggtctgtgctgcatgctcgatccgcgctaccggatgcgtaagaagctgcaggaggcctcatga

SEQ ID NO: 139227 - DNA, 555 bp, Enterobacter cloacae
atgaaccggaagctactgtttatcccgctgttgctgtttctggcgctggccgccgcgctgttctggcaactgatgcgcaacgccgagggcgatgacccgacgaccctcgagtcggcgctgattggcaaaccgctgccggaatttcgccttgaagcgctgaatacccccggtcagacgctggaccgacggacgctgattgacggcaagccgctgctgctcaacgtctgggccacctggtgtccaacctgtcgcgccgagcatcagtttctcaacggcctggcgcagcagggcgtgcgggtggtggggatgaactacaaagacgatcgccagaaggcgatgagctggctgcagcgcctgggtaatccctacaggctgagcctctacgacggcaacggcatgcttggcctggatctcggggtctatggcgcgccggagacgtttctcatcgacggtcagggcattatccgctggcggcacgccggcgacctgaacgaacgggtgtggcgcgaggagctccagccgctgtgggatcaatacaaccggagggcgggctga

SEQ ID NO: 139228 - DNA, 459 bp, Enterobacter cloacae
atgagacgtgtaatagtcatcctgctggcgctgatgctgaccggccagacgtgggccgccatcgatacctggcagtttaaggatgaggcccaggagcaggccttccgcgagatcacctcccaactgcgctgcccgaaatgccagaacaacagcatcgccgactcaaacgcgatgattgccgctgatatgcggcagaaggtgtacgagcttatgcagcaggggaaaacgaaagggcagatcgttgactatatggtggcccgctacggtcattttgtcagctacgagccgccgctgaccgcgggcacggtgctgctgtggctggggccggggttgttcgtgctggcgggcgcgggagtgattatcgcccgcgcgcgccgtcgcgacattcctgacgcggcgctcagcgccgaagagcgccagcggctggcggcattattgcaagaaggaaaagaacgatga

SEQ ID NO: 139229 - DNA, 843 bp, Enterobacter cloacae
atgagcctgttggtggttatcgtcgcgctgctgctggctggcgcgctggggctgctgtacttcccgtggtcgggcaaaggggcggtagaccgcgatgccctcaaccgcgccctgtaccagtcgcgcctgcaggagctggtgcaggagcgcggcgaggacaacccggcgctggtcgtcgaactgcagcgcaccctgttgacggatattccgccccaggcacagtctggcgaacggccgctacgccgctgggcgctgcttccgggcgcgctgctgctggtggtcctgagtctgggcctgtatctgaaaaccagcgatattggtcaggtgctgctctggcagcaggctgaacgacattatcctgcactgttgcagcaggttaaggacccgacggcggcgccgctgcgaatggatgagctggcggagctgcggcttggcctgcgcagccacctgcaggataccccgaacgacctcgccggctggcagctgcttgggcggctgggcctgttgttaaacgatggcgagacggcgatcggcgcctttggccgggcgcatgctctggcggcggacgacccggcggcggctttcgattacgccagcgcgctggtgcgggcgggagatagcggtcaggttcggatgggcgagctgctgctgcgtgacctgcatcagcggcagccgaacagcctgccggtgctggagatgctggccctgagcgcggtgcgcaatgaagattaccccgaggccgtggcggccctgcaggcgttactggcccggctgccggaaggggatgcgcggcgcgcggcgattgtccgccagctggcgcaggcgcagcagcaggcgcaataa

SEQ ID NO: 139230 - DNA, 537 bp, Enterobacter cloacae
atgcagcgtattttttcaccatggattatggcagcactattattttcgcccgcattagcggtagcgatggaaaatcataccctctcggttggctatgcccaaacgcaccttagtgcgttaaagaactctgccagtaaagatcttcgtggcctcgcactaaaatatcgttatgagttcaattctgactggggggtattaacctctcttaccgccactcgtcatgaactacaaaattacaagtgggacgcggggaagttacataaagatggggataatactaccagctatagttcgttaatgattggaccgacctatcggtttaatgactatattagtttgtatggtaatgtcggtatggcagaaatgaagataaaaaaccgggataatcattcctcttcagaaaatgcttttgcctatggagcaggcgttatttttaatccattaacgaatctttcccttggcctctcatgggaaacggccaaattacttttcgttgatacaaatacatttggtgtgagcgtaggttatcgtttctaa

SEQ ID NO: 139231 - DNA, 474 bp, Enterobacter cloacae
atgaatagaataaaatttgcttttggcttttttatttctggcgctatgctgggccttttttataatttgctgaacgataaaatacatcataaggaagagtgcacggcatcgctcgtcgtgttcaagggtaatacacaaactaacttgacgttaaatttcatgtattcgcttgatgaaagcaagggcactgttgcggtcagcggtagttatctggatggagggaaactgcagggccacatcagaagagacgtcatttatgatatggtcaaaaatcatgaatctcatcatttccactcccgagaaataaaccgatacggtaacattgattctgtatcggatacgttcctggccaccatcctgccagatttttacgtttatccggatgaaaaaataagctatatcatctcaaaacaaaatgaacatagcttcctgataaaagttggttcaaggccactactgtattgcgctaactaa

SEQ ID NO: 139232 - DNA, 825 bp, Enterobacter cloacae
atgtattggatcataaacaaaaatatagaattttggcctgaaaataagcggttaatctcgttgaaaaacccggctcaaagcgtcacattgacggctccggcaagccactgtcttgttcttttactggaagccactccggaactggtcagtcagcaagttttctttaaaaaagtgtgggaagatgaagggattctggtcccggcaaataccctgtatcaaaacatatcgatagtcaggcgcggactgcgcgatgtcggggaaacggataattcgatagtcgtgacggttccgcgaaaaggctttcatatcaatcctaacgttaacgttgagaggatggatgaaaaacctttaaattcagaaagttataatgacatcaccatcataagccaggatgacgtcgctgaaaaaaatccgaccacagagtctggtgatatcgtgcaaacggccaccagaaaaaacatcggtgcaaaggctacaacattcttgatcatgctgttaagtttactggcgggttgtttgtcttttcattacatttggcattttcatgatgaaaaacctttttttagcagctatacattggttgaaaacgatcgcgggtgtcatttttataccaaagatgataaccatgctaaagttgataaatttaactattataaatctttgatattcaaatccggacttgattgtaagaagtatcccttcgtttatttttcgatgtcgcaaatgtctcccggatttatagtctttatttgcagaaaaagttacagcgagaaggtttctgccggatgtgttactctctcttttcgtgggatagtatatgaatag

SEQ ID NO: 139233 - DNA, 396 bp, Enterobacter cloacae
atgttttcttatattatgctgggaaccaatgaccctcaagcttcatataaattttatgcgcctttgatgcgtgtgcttggtcatcctctggatgggcgtagcgaaaaaggcgccgcatggggaacattcaaagataaccatactaccggattatgcgttggcatgccgtttgataatctacccgccactcgcggcaatggcgttatggtagcgctgaacgcggtatccgttgacatggtccaggaactttatcgattagcgatagagaatggaggagaggatgaaggtccaccagattatcgtccacattacggcgctgatttttatagtgcttacgtacgcgaccctgacaaaaacaaaatcgcttttgttttttatgacgcgtctaaaagatag

SEQ ID NO: 139234 - DNA, 363 bp, Enterobacter cloacae
atggttactattataaggcacgaagtcaatgaaagcctggcaatatccggtgtggtcgaaacccgtggtctggtctttgtgagttactgtctcgggaacatcggaaaacctatcgaggaacagataaatggtgccttcgataacttgagtgaaaggcttaacgctatcggcctgacgctggagtcagttgttaaaattgatgctttgtttagggacgtgtggaatatcccaataatggaaaagatcatgcgccaaagatttaacggcaattatccagccagaaaatctatccaaaccgagtttgcccatgatggaggagctgcgggtatgctctttcagcttgacgcgattgcctgccggtaa

SEQ ID NO: 139235 - DNA, 759 bp, Enterobacter cloacae
atgaaaattcgctcaaccgtacttgctcttgggatcgcagcaaccctcaccggatgtcagaacatggactccaacggtctgctcagctcaggcgccgaagccttccaggcatactctctcagcgacgcgcaggtgaaaaccttaagcgaccaggcctgtaaagagatggacgccaaagcgaaaatcgccccggccaacagtgaatacagccagcagctgaacaaaatcgcggctgcgctgggcgataacatcaatggtcagcccgtgaactacaaggtctatgagaccaaggatgtcaacgccttcgccatggccaacggctgcatccgcgtctacagcgggctgatggatctgatgaacgataatgaagtcgaggcggtgatcggccacgaaatgggccacgtcgcgctgggccacgtgaagaaaggcatgcaggtcaccctgggtaccaacgccgtgcgtgcggcggcggcctccgcgggcggtatcgtcggtagcctgtcgcagtctcagttgggcgatctgggcgaaaaactggtgaactcgcagttctcccagcgtcaggaatcggaagcggatgactactcttacgacctgctgcgtaagcgcggtatcaatccgtcgggactggccaccagcttcgagaaactggccaagctggaagccggtcgtcagagttcgatgtttgacgatcacccggcctcagaagcgcgcgcgcagcatattcgcgatcgcatgaaggccgacgggattaaataa

SEQ ID NO: 139236 - DNA, 1269 bp, Enterobacter cloacae
gtgaaaaaagaattaccattaatcgcacttggcattattgccgccgcgccggctttcgccagccaacaatctaccagtcagggctttattgaagacagccacctggatctctttttacgtaacgcttatatcaaacgcgattatcgcgatggtttgccggataaagccgaatggggtcagggtatcatcgcgaccttcgagtccggctttagtcaagggccggtcggcttcggcgttgacggcattgcgcagtacgccgtgcgcctcgacggcggccgcggccgcagcggcgcgggcggtatcgactttttcgcccaggatgatgatggccgcgcgaagtccgatttagcaaaatttggcgctaccgctaaaatgcgcttctcgaataccgtcctcagctacggtagccagcgcccgatgctgcctatcgtctacgccgatgactcgcggctgctgtacgagagctataccggtaccatgctgacctcaagagaaatcgacggtctggaaattaacgccggttatctcaccgatcagcagcgcaaaagcgacgacagccacaacagcggcctgaaaagcctgacctttggcggcgccagctatcaattcaacgaccagctcagcggcgcgctttacgcttcgcacgtcgaagacgtgctgaataagcagtatctcggcctgaactacaagaagccgttcgccgccgaccagcagctgattgttgacttcaacggctataactcgcgcttaaatcaagaatatgccgacgccaatggcaccgggcgcagcaacagcatctggagcctggccgccagctatatctgggatattcatacctttaaggtcgcttaccagcaaagcagcggcagcaccggctaccattatggcggctaccagaaccagggcggcgtcggcgatggcggcaacaccatctggctggctaactcctactggtccgattttaacggcgaggatgaacgttcctggcaggcctcctatggcctggattttgccggactgggcgtaccgggcctgagctggaccaccgcctacgttcgcggggataacattaaaaccgccgagaccagcaacggtaaagaacacgaatggtttaaccaggtgcagtaccaggtgcaaaacggcatggcgaaagatttgaaattgagactccgctattcggtgctgcgcgtttccagcaacgccagcgactataacgtcagcgggaatgaagtgcggttctacgtcgaatatccgtttaacgtgttttaa

SEQ ID NO: 139237 - DNA, 1632 bp, Enterobacter cloacae
atgataaccgtcggcgatgccatcgccagaacgctggagcagtatcacgttgaagccatttatggcgtcatttctatccataacctgccgatcgccgatgccgtcggccagcgggaaaaaatccgctttgttccggcgcgcggtgaagcgggctcggtgaccatggctgacgcccacggccgtttttccgggctcggcgtggcgctgaccagtaccggcgcgggtgcgggtaatgcggtcggcgcgctggttgaggcgatgaacgccggtacgccgctgctgcacctgaccggacaggtcgaaaaagcctggctggacgccgacaccggtttcattcatgaaacccgcgatcagttgaccttcctgaaagccagttcgaagcgcgcttaccgcattagcaacgccaaccaggcggtggctatcctgcataaggcgattcaggaggcgcagacgccgccgtgcggcccggtctcggtggagatcccaatcgacattcagagcgccaaaattccgctttcactgctgaccgcgccgctgaaacgcgctccggcggttgagccggaagcgtcgctggtcgatgcgctgtgggcgcagcttaagcaggcgaagcagccgctgctgtggcttggcggcggcgcgttagagagcggcgaggcggtgaagacgctggcggatgccggggtgacggtgatttccagtacccacggccgcggcattctggcggacagccatcgcgccagcctgcgcgcgtttcataattctccctcggttgaagcgctgatttcacaatgtgatttcacacttgttgccggttcccggctgcgcagcaacgaaacgcgctcgtggacgctggaactgcccacgccgcgggtgcagattgatattgacccggcggcggccagccgtaactacttgatggacaataccctggtggcggattgccgggcgctattagcggcgctggcagagcgggtgcagggccggatatggggcgatgcgcgttgggatagccaacttaaagaggcggtagaggcggcggagcaggggctgcgcgaccagtgcggcgattacgctaaattgaatgacgcgattgcgcaggcgctgcccgatgacggcatcctggtgcgcgatattaccgtttctggcagcctgtggggcagccgtctgttccgcgctcacggcccgctgatgaatatccattctctggccggagccatcggtatggggctaccgatggcggtgggtaccgcgattgccaatccgcaacgtaaagtggtcggcctggtcggcgacggcggcctgagcctcaaccttggcgaactggcgaccctggcgcaggagaaggccaatgtgacgctgttgattatgaatgacggcggctacggcgtaatgcgcggtattcaggataagtattttggcggccgccagtattacaacgagctgcacacgccagacttttccctgttggcgcaggcgatgggtctgcaggcgtggagcgtggatcgggctgaggatttccaggcggtgatgaccgaagcgctggcgatgccggggccatcggtggtggaagtgaagatgggccagattggcgcgctgcgctttgccggcccgccgcagaagacgctgtattaa

SEQ ID NO: 139238 - DNA, 555 bp, Enterobacter cloacae
atggcggttgacctggtagaacgtttcatgaagaaaattcagaaactcactacctatcgtaacgctatcccgactcagtctgttctgaccatcacctctaacgttgtgtatggtaagaaaaccggtaacaccccagacggtcgtcgtgctggcgcgccattcggcccaggtgctaacccaatgcacggtcgtgaccagaaaggtgcggttgcctctctgacctccgttgctaaactgccgtttgcttacgcgaaagatggtatctcttacaccttctctatcgtgccaaacgcgctgggtaaagacgacgaagtgcgtaaaactaacctcgcgggtctgatggatggttacttccaccacgaagcgtccatcgaaggtggtcagcacctgaacgtgaacgtgatgaaccgtgaaatgctgctcgacgcgatggaacatcctgagaaatatcctcagctgaccatccgtgtatctggctacgcagtacgttttaactccctgacgaaagaacagcagcaggacgttattacccgtactttcactcagtccatgtaa

SEQ ID NO: 139239 - DNA, 1224 bp, Enterobacter cloacae; identical to SEQ ID NO: 74993

SEQ ID NO: 139240 - DNA, 207 bp, Enterobacter cloacae; identical to SEQ ID NO: 74992

SEQ ID NO: 139241 - DNA, 1650 bp, Enterobacter cloacae; identical to SEQ ID NO: 74991

SEQ ID NO: 139242 - DNA, 123 bp, Enterobacter cloacae
atgacgcgtgatactttctgccacgacgggaaagcgctgacggaacttatagataaagcaataaatattaccggcatgccgcacatgagggccgacaaggtacaaaccaggaaaaagggttga

SEQ ID NO: 139243 - DNA, 345 bp, Enterobacter cloacae
atgcgaatatttgtttacggcagtttacgacgcaaacaaggcaacagccactggatgaccaacgcccagtggctgggcgctcatagtgtcgacgattatcagctgtacagcctgggccactatccaggcgcggtgcccggcgaaggcacagtacatggtgaagtttatcgtattgatgcatcgacgctggccgaactggatgcgctgcgcaccaaggggggcgagtatgcgcgccacctgattcagacgccttacggcagcgcatggatgtatgtctatcaacgttccgttgagggttgtacgttgatagcgaacggcaactggttggatcgcgaccagtattaa

SEQ ID NO: 139244 - DNA, 201 bp, Enterobacter cloacae
gtgaaaagcgttcgctatttcacccttaacttttctggcttcacgaccgccgcctgtgaaaaacaggggtatctgcgccttatcgccggcgaccatgtcttttataccgataaacgctattttaacgacccctcgctttttgaccacctgacgatcaatcagcctctgcatcctggcgcccgtagctattgctcgcgctga

SEQ ID NO: 139245 - DNA, 531 bp, Enterobacter cloacae
atgagcttactcaacgtacctgcgggcaaagatctgccggaagacatctacgtcgtgatcgaaatcccggcgaacgcagatcctatcaaatacgaagtcgacaaagagagcggtgcactgttcgttgaccgtttcatgtccacggcaatgttctatccgtgcaactacggctacatcaaccacaccctgtccctggacggcgacccggttgacgtgctggtcccgactccgtacccgctgcagccgggctccgtgatccgctgccgtccggttggcgttctgaagatgaccgacgaatctggtgaagatgcgaaactggttgccgtaccgcacaccaagctgagcaaagaatacgatcacatcaacgatgtgaacgacctgccggaactgctgaaagcccagatcactcatttctttgagcactacaaagatctggaaaaaggcaagtgggttaaagtcgacggttgggacaacgcggaagcggcgaaagccgaaatcgttgcctctttcgagcgcgctaagcagaagtaa

SEQ ID NO: 139246 - DNA, 957 bp, Enterobacter cloacae
atgtggaagcgcttacttcttgtcacagcagtttccgcagctatgtcgtctatggcgatagctgccccgttaaccgtaggtttttcgcaggtcggttctgaatccggctggcgtgcggcggaaaccagcgtcgcgaaagaggaggccgccaagcgcggtatcaccctgaagatcgctgatggtcagcaaaaacaggaaaaccagatcaaagcagtacgctcctttatcgctcaaggggtcgacgcgatcttcattgcgccggtggtggccaccggctgggaaccggtgctgaaagaggcgaaagaggccaagatcccggttttcctcctcgaccgttccattgatgttaaagataaagatctctacatgaccaccgtgaccgccaacaacgtgctggaaggccagctgattggcgactggctggtgaaaaccgtcgacggtaagccgtgtaacgtcgttgaactgcagggcaccgttggggccagcgtggccatcgatcgtaagaaaggcttcgccgacgcgattgccaaagcgtcgaatatcaaaattatccgctcccagtccggcgacttcacccgcagtaaagggaaagaggtcatggagagctttatcaaagctgagaataacggcaaaaacatctgcatggtgttcgctcataacgacgatatggccatcggcgccatccaggccattaaagaagctggcctgaagccgggcaaagatattctgaccggctccatcgacggcgtgccggatatctataaagcgatgatcgccggagaagccaacgccagcgtcgaactgacgccaaatatggccggcccggcgtttgatgcgctggagaaatacaaaaaagacggcaccctgccggagaagctgaccattaccaaatcgacgctgtacctgccggatacggcgaaagaagagttagagaagaagaaaaatatgggctactga

SEQ ID NO: 139247 - DNA, 1503 bp, Enterobacter cloacae
atgagcgccgaggcacaccaggagatccttcgcaccgaaggacttagtaaattcttccccggcgttaaggcgctggataacgtcaactttagcctgcggcgcggcgaaatcatggccctgttgggcgaaaacggcgccggaaaatcgacgctgatcaaagcgctgaccggcgtttaccatgccgatcgcggcactatctggctggaaggccaggctatttcgcccaaaaataccgcccatgcccagcagctggggatcggcaccgtctaccaggaagtgaacctgctgcccaatatgtcggtggcggataacctgttcatcggccgtgagccgcggcggtttggtctgctgcgacgtaaagagatggaggccagggcgacggcgctgatggcctcctacggcttttccctcgacgtgcgcgagccgctgaaccgcttttcggtggcgatgcagcagatcgtcgctatctgtcgggccatcgacctgtcggccaaagtgctgatcctcgacgagcccaccgccagcctcgatacccaggaggtggagatgctgttcaccctgatgcgccagctcagggataacggcgtcagcctgatcttcgtcacccattttctcgaccaggtctatgcggtcagcgaccgcatcaccgtgctgcgtaacggcagcttcgtcggctgccgcgagacccgcgagctgccgcagattgagctggtgaaaatgatgctgggtcgcgaactggaccacaatgccctgcagcgggcgggccgtaccctgctgagcgataaaccggtagcggcgtttgaaggctacggtaaaaaaggaaccatcgccccgtttgacctgcaggtccgcccgggcgaaattgtaggcctcgccggcctgctgggttccggacgcacggaaaccgccgaggtgatcttcggcattaaaacggcggacagcgggaaggcgtggatcaaaggcaaaccgcagaccttgcgctccccgcatcaggcgtcctgcctcgggatcggcttctgtccggaggatcgcaaaaccgacggcattatcgccgctgcctcggtgcgggaaaatatcgttctcgccctgcaggcgcagcgcggctggctgcggccgatcccccgccgggagcagaatgagatcgccgagcgctttattcgccagctggggatccgtaccccgagcgccgagcagccgatcgagtttctctccggcggcaaccagcagaaggtgctgctctcccgctggctgctgaccaaaccgcagttcctgatcctcgatgagccgacccgcggcatcgacgtcggcgcccatgcggaaattattcgcctgattgaaaccctctgcgccgatggcctggcgctgctggttatctcttctgaactggaggagctggtgggttacgccgatcgggtcattatcctgcgcgatcgccgacaagtggcggagatcccgctcgccgagctctctgttccggcgatcatgaacgctattgcggcataa

SEQ ID NO: 139248 - DNA, 948 bp, Enterobacter cloacae
atgagactcaggaaatacaataaaagtttgggatggttgtcattattcgcaggcactgtattactcagtggctgcgattctgcactactagaccccaaaggacagattggactggaacaacgttcattgatactgacggcttttggcctgatgttgattgtggttattcctgccatcttgatggctgttggtttcgcctggaagtatcgtgcgagcaataaagatgcgaagtatagccctaactggtcacactccaataaagtggaagctgtggtctggacggtacctattctgatcatcctgttccttgctgtactgacctggaaaaccactcacgcacttgagccgagcaaaccgctggttcacgatgaaaaacctattaccattgaagtggtctccatggactggaaatggttcttcatctatccagaacagggcattgctaccgtgaatgaaatcgccttcccggcgaacactccggttcagttcaaagtgacctccaactccgtaatgaactccttcttcatcccacgtctgggcagccagatttacgcgatggccggtatgcagactaacctgcacctgatcgcgaatgaagcaggcacctacgacggtatctccgccagctatagtggcccgggcttctcgggtatgaagttcaaagctatcgctacgccagaccgcgcgactttcgaccagtgggttgcaaaagcgaagcagtctccaaacaccatgtctgacatggcggcgttcgaaaaagtggctgcacctagcgaatacaacaaggtggagtacttctctaacgtgaaaccgaatctgttcaaagatgttattggcaaatttatggttcacggcatgagcatggacatgacccagcctgaaggcgagcacaacacgcaccagggtatggaaggcatggacatgagccacgcggaaaccgctcactaa

SEQ ID NO: 139249 - DNA, 1476 bp, Enterobacter cloacae
atgtccagtcactacttacgtattttccagcaaccgaaatcagctattctgctgatccttggtttcgcctccggtttaccccttgcgctcacctccggcacgttacaggcgtggatgacggttgagaacatcgatcttaaaaccattggtttcttctcgctcgtcggccaggcttacgtctttaagttcctgtggtcgccggtgatggatcgctataccccgccgttcctcgggcgccgtcgcggctggttagtgatgacgcagggtctgctgttgctggccattgccgcaatgggtttccttgagccgtcaacacagctgcgctggatggccgcgcttgcggtggtcatcgccttctgttccgcttcgcaggacattgtttttgacgcctggaagacggacgtcctgccagcggaagagcgtggcgccggtgcggcaatcagcgtgcttggctaccgcctgggtatgctggtttccggcggactggccctctggcttgccgatcgctatctcggctggcagggaatgtactggctgatggccgctctgctgatcccctgcattattgccacgctattcgcgcctgaaccgagcgatgtgattccggtcccccgctcgctggagcaggccgtcgccgcaccgctccgcgacttctttggtcgcaataatgcctggcttatcctgctgctgattgtcctttataagctcggcgacgctttcgccatgagtctgaccaccaccttcctgatccgcggcgtcggatttgatgcgggcgaggtcggcgtggtgaacaaaaccctggggctgtttgccacgatcgtcggcgcgctgtacggcggcgtattgatgcagcgcctgtcgctgttccgtgctctgctgatctttggcatccttcagggcgcatcgaatgccggttactggctgctgtcgatcaccgacaagcatatgatcagcatggcgacggcggtattttttgaaaacctgtgtggcggtatgggcactgcggcatttgttgccctgctgatgacgctatgcaataagtcattttccgccacccagtttgcgctactctctgccctttctgccgtcgggcgcgtatacgttggccccgtcgcgggctggtttgttgaagcccacggctggccgacgttttatctcttctcggtggcggcggcggtgccggggattttattgctgctggtctgtcgccagacgctggaatatacccagcggacggaacatttcatgccgcgcacggaatatcaggctgcttaccggtttgccctgcgtctgctgatggctggttgtcttgcgctggtagtgtggctcgcggtactcatcatgaatgcgacgaccaccttgtcgcttccgtttgaaacccacctgcttgatgctggcgtgtttctcgccatcgtgggtatcctgaccggtgggttgctggatttcatgtcactgcggaaaacgcagatgacatga

SEQ ID NO: 139250 - DNA, 579 bp, Enterobacter cloacae
atgttaaaaaaactcttctttccgttgctagcactctttatgctcgccggctgcgcgactccgccgacgaccattgacgtttcaccaaaaattaccctgcctcagcaggatccaagcctgatgggcgttacggtcagcattaatggcgccgatcagcgtcaggaccaggcgctggcgaaagtgactcgcgacaaccagcaggtcacgctgaccgcctcccgcgacctgcgcttcctgttgcaggaagtgctggagaaacagatgacctcccgtggctacatgattggcccaagcggcgcggttgatctgcaaatcatcgtgaacaacctgtacgctgacgtctcccagggtaacgttcgctacaacattgcgaccaaagccgatatcgccatcatcgctaccgcgaataacggcaacaaaatgaacaaaaactaccgtgcaagctattccgttgaaggcgcattccaggcctccaacaaaaatatcgctgacgcggttaacagcgtgctgactgacaccattgctgacatggcacaggacaccagcattcacgacttcatcaagcagaacgcccgttaa

SEQ ID NO: 139251 - DNA, 315 bp, Enterobacter cloacae
atgatacgtgaacagatagaagaaaaattaagggcagcgttcaaccctgtgtttctcgaagttgtcgacgaaagctatcgtcataacgtgccggcaggttctgaaagccactttaaagtggttctggtcagcgatcgcttcacgggagaacgtttcctgaaccgacaccgcttgatctacagcaccttgacggaagaactctccacaaccgtacatgcgctggcgctgcatacctacaccattaaggaatgggaagggctacaggatacggtattcgcatcaccgccttgtcggggtgcaggctccatcgcctga

SEQ ID NO: 139252 - DNA, 1698 bp, Enterobacter cloacae
atgcgtgataacgctcgtcgtctgcttacgatactgaccgtcatcctggccctgtggctggtgctgggcttctggccgctgtccatcggcaaccaggtgatcttcagtctgtgcatcctgctggcgggcggcgcggcgctctggcgtcagcgtcgccgggcagtcagccgtcagcgatcggaaatcgtcctgccgcccgaggattttcagggggcggtggttctggtctgcggggataccgacggtctgtttcccgggcgttcggcgcacggcgaaacccgtcacggctggtatctccggggtgacagcgcggagcagttgccgcggctggcgcagtacctggcggcggcgcgtccggcgctggtatcgcaggtttccgtgctgctggcggtggtaccggagcaccacccctccggggagcatctggcgcagtcgctgcgcgactggcggcggagtatcgttcagtgccgaacctggctaaacggtctgccgccggtgtggagcgtgttctgggtgacgccgccaggccgccaggccgcggaaagccgctggtttaccatcacgccggagagggctggtctccaggtgcagctgaagggacaagcgccccaggcggttgccgggtggcagcgggagggcagctctgcctcacgcctgcatcagacgctgtggctggagagcattctgaccttggccgaaaacgctcttttccggccattccgcgcccggcaggcagaacttcctccgctgaacctgtgtgccgcgggcatctgccttacgccggtggcggcggtggcgaataacctctggcaacagcaaatcgccgggatcaccacgctctccccgggcatcgacgcggcgccaggtcctcacccgctgccggatcttcttctgtcgtcactgccgcaccgccacggggtcagccgccggatgcgcgatgccggtcttgccgctggggtgggcttcctctttctggcgctggcgatgctggcttcctttatcaacaaccagcgcctggtgcgcagcgtcggcgatcatctggcggtgtatcaccgcctcagcggcacgccgccgacgccgaagctgcaggcgcagcagcgtctgcgtgccgacagccgcctgctggatgactggttgcgccggggggagccgctgcgttatcggctggggctgtatcagggggggcggctgatccccttcgttgaagccgctatcaatgactgggcgccgcccccgccgccgcgtccggtcattaagcaggttgtgcaggggccgcagacgatccgcctcgatagcatggcgctgttcgataccggcaaatcggcgctgaaaccgggttcgacaaagctgctggtgaactcgctgctgggcattaaggccaaacccggctggctgatcgtggtggcaggccataccgacagcatcggcaacgataaatccaatcaacaactctccctgaagcgtgccgaggcggtccgcgactggatgcgcgataccggcgatgtgccggagagctgttttgcggtgcagggctacggcgcaagccgtcctgtcgccagcaacgagacgccagaggggcgggcgcaaaatcgccgggtggagatcagtctggtcccgcagaaggacgcctgtctggcgccgggcacggccaatacctcaggagcagagactaacggattaaaaagcgaaaccgagtaa

SEQ ID NO: 139253 - DNA, 654 bp, Enterobacter cloacae
atgaatacctctgaaagcgatctgatcaacaaaactttttacccgggctggctgatggtcagccagttacgctgcggccagccggtgacggatggcgaggcgctctatcgccaggcctgtcgatgggtgaccgaggcgcgcgaggcgctgacggcggggggagtcagtgaagccagcgctgagcagatgctctatgcctactgcgcgctgctcgatgagagcgtcctcaaccgcgccagtcaggatgatggctaccgcaggtggcgcaaggatccgctgcaggcgcgctttttcagcactctcaacgccggggaagagctctgggaacggatccgccagctgctgcgagagcccacggcggatgcggcagtgctgacctgtttctatcgtactttgcaactggggtttgtcggacagtaccgcgcccaggatgacgaacggcgtgaggacgtggcgcaagcgcttggcgcgcgggtcccgccgttcagcctgacccaggaggcgccggtggtggttcgtgcctcccggctgcgcagcggacggcggatgtactggtgcggctgggcggctggcattttggcgctggcggcgctgtggttgacctgctctgccatgctgtcacagatggtggcgcagatagcagggcagggataa

SEQ ID NO: 139254 - DNA, 1341 bp, Enterobacter cloacae
atgaagattttccgcccattatggcgcgacggggcttttctggtcccgcagcagtttcagcaacaggcccgctgggacgcgcacgtcgccgatacggtctcccgcatggcgctcgcccacccgtggggggtattgcgcgcggagtttgacgcgagcgcgctcaccctttcccggctcaacgctacccggctgatcgtgcgtttcgccgacggaacgctgattgacaccgagctggcggatattttgccaccggtccgcgatgtatcggacgtgatgcaggacagcgtggaggttctgctcgctctgccgctgctcagcgccagcggcggcaatcttgatgacggccaggagagcgcccgcccgcgccgctggcgcgccgagcaggtgaccgtccaggagctggccggccatgaacgcagcgagctggccgttctgcggcacgcgctaacgctgcgtctctccaccgaggaaaatgcagccttcctcacctgcccggtagcgcgtctggtgcgcgacgcccaggggcagtggatcgttgacccggaattcatcccgccgctgctgtcgctggcggcaagcccgacgctggtcagcgagctgggtgagctgttacatcgcctgcaggcccgacgcagacgcctgatggccatgcgtcgtgaaagcaatgcgcggatggctgattttgccgtggcggatgtttccctgttctggctgctcaacgcgctgaacagcgctgaaccggtgctcagcgagctgcatcaggacccttcgcgccatccggagctgctctatcgcgaactggccaggctggccggctgtctgctgactttctcccttgaacatcatctggaagcaatcccccgctaccgacatgcctcgccagagcaggtattcccaccgctgtttgccctgctggatacgctgctcgaagtcagcctgccttcaagggtgatcgccatcgctctggagcagggcgccgaccgggagatctggcggggcaggcttcacgatgcgcggctgcgcgagggggcggatttttatctgtcggtgcgctcttcactcccccctcaccagctacagagccgctttccgcagctctgtaaggcgggtagccatgatgatgtcgccgaggtcgtcaatattgccctcagcggcatcgcgatcaaaccgctgagccatgtgccggcggccattccgctacgtctggaaaaccaatatttcgctctggatctctccaccgatgccgcccgcgcgatgctggaggccggcaactgcaccttctataccccggaatcgcttggcgacgtgaaacttgaactctttgcggtactgcgctcatga

SEQ ID NO: 139255 - DNA, 921 bp, Enterobacter cloacae
atggatcgtttcgatgcaatgcgcgcctttgctcgggtggtagaggcagggagcttcacgaaggctgcccaaacgcttcatatgagcaaaaccacggtgacgcaactcattcagcagctggaatcgcgcctgcgcgtcagattgctccatcgcaccacccgcaagctcggtgtgactcccgatggcgcggtctactacgaacgcgtcatccgtctgctggcggacatggaggatgctgaaaacagcctgtccagtgcggcgatgacgcccaggggacggctacgggtggatgtaccgagtccgctggcccgccttattctggtgccggcgctaccggctttccacgcccgctaccctgatatccagatcgacatgggtgtgagcgaccgggaagtggatctgatcggcgacaacgtggattgcgttctgcgcggtggtcaaatcaccgaccagtccctaatcgcacgccatgtcggcgatttgcaaatcggcgtctacgtcgcccccagctatgtggaacgccttggcgctcccgcacacccgcgcgagctgcaaaatactgaccattgcatagcgggattcttgtcctcacgcaccagtaagattgatcctttggtactgtgcagtgagaatgaacgtattgaaatcacgggcaactacgtacttgccgtggatgatggcaatgcttacctcgaagctgggttagttggcttaggcgtgattgcgctgcccaactatatggcggcagcgcatcaggccgttggcgctttgattccattatttacacaatggcggattagcccaatgcctctgtacctggcgtttccaccgaaccgccatgtcaacgccaagctgcgcgtttttattgactggatcgttgaagtgatgctgcagcatgtccccattgccaacaatcaatga

SEQ ID NO: 139256 - DNA, 567 bp, Enterobacter cloacae
atgatattggttacccaagattactatctttttcaaggtgttaagaatttttttcctgatatcattcagttagattctagcggaaaagcgattttagataatgaggttgatgaagtctctctgctggttgatagccgctcgccgctttgccattacgattatctcgtgctggcagcggcgaaatccagaaagcgaatatgttgtatcgtcctcgatatgcgccatcgggaagagcatttactgagcctgaaatcgtttttaaacatgtcattatcacccgcggatatggcgacattatttggcctttttctggagatgaatagcaagcgtctgaccaaagagtggtttgacgatctgcgcttaagtttgtctgaacagttaatgttacgtttactcatggcggggatgaccatggaggaggtggccgtcaatctcaatacgtcactaaaaagcctttaccgcaagcgtactgcgctttatgagcggttggggttagataattttaatgaagcttgcttatttatctttcgaaataagctgctggagcagaccgaacgttcgttatga

SEQ ID NO: 139257 - DNA, 291 bp, Enterobacter cloacae
atgagaataagggacagtattgctgagcgattagaggcatgcgggctctaccgtcgggcggcatccagatggattgaggtgatgcagcgttgtctggacgatgaggaccgagagtggatccgtcaccatcgcaatcagtgtctgaaaaaggcgcaacgtccgccggcgccgaaagaggagtttgccgacctccaccaggcggcgaaagagactcaatatcgtatgggcattgcgaagccctatggcgaagcattcaggctgcccggcaaagggaaaacggccgccgagtaa

SEQ ID NO: 139258 - DNA, 156 bp, Enterobacter cloacae
atgggtggacccaatgccatttgtaagcaggataaggcatttatgccgccatccggcacaaccgcgggtacggcgtctgatgtgtatcgcccggcggcgctgcgcttgcgcgggcctacgctgtttgaacctgtggaggacccgcaggccggataa

SEQ ID NO: 139259 - DNA, 408 bp, Enterobacter cloacae
gtgaataagcgactgatagcgggggttgtagcggctgcggtaggtggttatctactatggcagtatctgtccccggttgagattgtggcagttcacgatggaaatacgattctggtcaggcattttccatacctgaaaagtcgtcagatagcctggtgggaagccaataaggccgtaatacaggcgaagtacgggattccacacgagggtaaagacggcttttaccatgtatggattgttgattttggggttggatatcgcacggaaccggatgaaaacctactgttttctaccgatgaggttttttgttttaacgacatcccgacagaggatcggtgtattgatagaaagcccctttttgacgttaggtggagtaggaattacgggcttaaatatgagtcgtattaa

SEQ ID NO: 139260 - DNA, 1236 bp, Enterobacter cloacae
atggcgctggaaggctattttcttttccagggagatcgtaccgtctgtggcggtaaaattatcaccggtgctgaagacaccgaatttttcgggcgatcacaggcgcgggaaagcgataaagtgacctgcggaaaacatccggggatctaccgtatttgtggtggcatgggcgacatgtacgaagtaggcggtgtaaaccgccagctagcaggctccatcgaaagttacagctcctgcccgtgtcgggcgaaattcattccgcaagatttggataacacctacgaatataactgcaatgccgggctggctgccgaacgggagagggaagccagcaggaaaaaactgaatgaggcgaaggctaaagggcctcagccaatgccccttccggcgctgatttatgccacgcagagggcaatggatgactacggcgcaaaggacatgcaccacggtgatctgagcgaggaagcactgaaagagcgctttggtctgacggatgtctcggcgaaagtgaacccgtatacgctgacccttgtcccaccagcgcccgccagttcgtatggtgtattttatccgggcagcctgacgggaagtacgccggtcgtggtcagccgggaggaaagtgtccggctgatgtttgatgagttccggggacttgccaaggtattctccttccatggcccatataaaaacatcatcaccgaaatgattaatcatatgcaggggaacagcggcacaccgtacagcagcccattactggacagggcgctgaaagagcagatcctgaatgaccattcgagtgatagctcgttgttggggattaaaagggccttggatgatgctgttagctacgaatatggatttcttcctctcggtaaaaaggacgatttattcgacggaaagggcaactttaaggaagttaataaagctgttctacctaaatttgatcgtcagatcgataagactaacgggctggtgattaccgtccatgatacgtggtcgacgcatatcacgctcgagtcactggaggtgacgggcgacagctaccgggcgaaagtacactaccgggtacaggaccacttcgggcttgatgacgcggatatcctgaaccctgtttttcatcagggccgaattttccggatctggtttgtgctgcagcgctatgtgaaatacggctataggccgttcatcaccgagatgaatgcgaccgtggaaatcagcgggaggcggggtgaataa

SEQ ID NO: 139261 - DNA, 477 bp, Enterobacter cloacae
atgtcacagcaatacaccaatgaactgaccactgatgtactggaacggctgcgtcagccgccatttaccgatgagtttctgtcagaacttgagccacagtcgcgtcagtcactcgtcgcagaaatggaatcaatgttacagcgccctgttctccatattttccggggtgcaacgattggcagcctgacccgtcatggtggcgtgatccgtgagacatccggcaaaagtacccttgacgggcattattctgcgcgggtcggagataaaattgtgtatccggatggacgtgaggcgaccattatttgcggagccggtaaaggtcgggtgatgcagggggaatcgatggcgctcgtgggcagcatgctggataacggtgatgaaatcatttcgacacctcaggggtgtcagatgtttgtattccgtgagggcgatgcactgccggatggctttttaactgtgccgggagataagcactga

SEQ ID NO: 139262 - DNA, 1143 bp, Enterobacter cloacae
gtgagccagagtaaacccaccgtcaatccgccactgtggctgctggcggagctgacctaccgctgcccgctgcagtgtccctactgttccaatccgctggacttcgcccggcaggataaggagctgaccaccgaacaatggatcgaggtctttcgccaggcgcgggcgatgggcagcgttcagctgggcttttccggcggcgagccgctgacccgtaaagatctgccggagctgatccgcgccgcgcgcgacctcgggttctataccaacctgatcacctccgggatagggctgacggagagcaaactggacgccttcagcgaggccgggctggaccatatccagattagcttccaggccagcgatgaagtgctcaacgccgcgttggccggcaacaaaaaagccttccagcagaagctggccatggccaaagccgtgaaagcgcgcgactacccgatggtgctcaacttcgttctccaccggcacaacatcgaccagctcgataaaattatcgagctgtgcattgagctggaagccgatgacgttgagctggccacctgccagttctacgggtgggcgtttcttaatcgcgaagggctgctgccgacccgggaacagatcgcccgcgccgagcaggtggtcgctgactaccggcagaaaatggccgccagcggcaacctcaccaacctgctgttcgtcaccccggactattacgaagagcggccgaaaggctgcatgggcggctggggatcgattttcctcagcgtcaccccggaaggcaccgccctgccttgccacagcgcgcgccagctgccggtggcgtttccgtcggtgctggagcagagtctggaatcgatctggtatgactcattcggcttcaatcgctaccgcgggtatgactggatgccggagccgtgccgctcctgtgatgaaaaagagaaggacttcggcggctgccgctgccaggcctttatgctgaccggcagcgccgataacgccgacccggtgtgcagcaaatccccgcatcatcacaaaatcctcgaggcccggcgcgaagcggcctgcagcgacataaaagtcagccagctgcagttccgcaaccgtacccgctcgcagctgatcttccaaacccgggacctgtaa

SEQ ID NO: 139263 - DNA, 279 bp, Enterobacter cloacae
atgcagaaaacgtccatcgttgcctttcgtcgcggctaccgactgcagtgggaagccgcccaggagagccatgtgatcctctatccggagggtatggccaaactcaatgagaccgccgcggcgatcctcgagctggtcgatggccggcgcgacgtcgcggcgattatcgccatgcttaatgaacgtttcccggaagcaggcggcgtcgatgacgacgtcatcgagttcctgcagatcgcctgtcaacagaagtggatcacctgccgtgagccagagtaa

SEQ ID NO: 139264 - DNA, 756 bp, Enterobacter cloacae
atgctgatcactgacacgctgtcgccgcaggcctttgaagaggctctgcgggctaaaggcgccttctaccatattcaccacccttaccacatcgccatgcataacggcgacgcgacccgcgagcaaattcagggttgggtggcgaaccggttttattaccagaccaccattccgctgaaagacgcggcaattatggccaactgcccggatgcgcagacccggcgcaaatgggtgcagcggatcctcgaccacgacggcagccacggcgaggacggcgggattgaagcctggctgcggctgggggaagcggtcggtttgagccgcgacgatctgctcagcgagcgtcacgtgctgcccggcgtgcgcttcgcagtggatgcctatcttaatttcgctcgtcgcgcctgctggcaggaggcggcctgcagctctctgaccgagctgttcgccccgcagatccatcagtcgcgcctcgacagctggccgcagcactatccatggatcaaagaggaaggctacttttacttccgcagtcgtctgagccaggctaaccgcgacgttgagcatggcctggcgctggcgaaggcctactgcgacagcgctgaaaaacagaaccggatgctggagatcctgcagtttaagctcgacattctgtggtcgatgctcgatgccatgaccatggcctatgccctgcagcgcccgccctatcacacggtcaccgacaaggcggcctggcacacgacccgactggtgtaa

SEQ ID NO: 139265 - DNA, 549 bp, Enterobacter cloacae
atgctgcggcactggaacggcggcctggtgcatcatcccatcgctccgcagcagccttttaccgttgacgcctgtcctgatttgcagtttaccgcggtgcctatcgccagcaacgcgccgccctattcgccgtatcgcgaccggccgctgccgggtcataacgtggcgctgtttatcgaaaaccgccgcaacgggcagacgctgttctatgccccggggctgggtgagccggatgaaacccttctgccctggctgcaaaaagcggactgtctgctgatcgatggcaccgtctggcaggatgatgagctgcaggccgccggcgtcgggcgcaataccgggcgcgatatgggccacctggcgctcggcgatgagcacgggatgatggccctgctggcctccctgccggcaaaacgcaaaattctcattcatattaataacaccaacccgatccttaacgagcagtctccccagcgccaggcgctaacgcaacaggggatcgaagtgagctgggacgggatggcaatcacccttcaggataccgcatgctga

SEQ ID NO: 139266 - DNA, 345 bp, Enterobacter cloacae
  misc_feature (299)..(308): n is a, c, g, or t
atgttcattaaagtcctcggttccgccgccggcggcggtttcccgcaatggaactgcaactgcgccaactgtcagggtctgcgcaatggcaccattcaggctgccccccgcacccagtcgtcaattatcgtcagcgacaacggtaaagagtgggtgctgtgcaacgcctcgccggatatcagccagcagattgcccatacccccgagttaaataaagccggcgtactgcgcggaacgcatatcggcggcattattctcaccgacagccagatcgaccacaccaccgggttgctgagccnnnnnnnnnngcccacatcaggtctggtgcaccccggaggttcatga

SEQ ID NO: 139267 - DNA, 675 bp, Enterobacter cloacae
atggtggcgcatattgagggtgccggaggttttgatggcgagggccgcgacctgcaggccttttatgccgccggggtccgcagcattggtccgttctggaatattgcgaaccgcttcggcagcggcgttaacggttcgtttcccggtagcccggacactgggcctggactgacagcggcaggtatcgatctgattaagcaggccaatgccttgaagatgcagattgacgtgtctcatatgaatgaaaaagcgttctgggataccgcccatcactcgacgtcaccgctggtggccacccactccaatgcccacgccctgtgcccgcagccgcgcaatctgaccgaccagcaactgcgggcgatccgcgacagcggcggcgtggtgggcgtcaatttcggcaatgctttcctgcgcgccgacggccggcgcgatagcgacacgcccttaaccaccattgtccggcatatcgactatcttattaacataatgggtgaggatcatgtggcccttggctcggattttgacggcatcaccctgccggacgagctgggcgatgtggccggcttaccgcggcttatcaataccttgcgcgctagcggctatgatcaattggtgctggataagctgctgtggcggaactggctacgggtattaaaaaatgtttggcaacaatag

SEQ ID NO: 139268 - DNA, 1026 bp, Enterobacter cloacae
atgagtaatatgaaattaacggcggctccggccagcgagggttcctccttcttcgctaatttgcggcataaaatgccgaaagataccggcatctttgtggtgatgctggtgatcgccctgacctttgaaatcgccggctggtatgttcgcgaccagtcgttcctgctcaataccaaccggctggtgctgattgtgctgcaggtggcgattatcggcatcatcgccgtcggcgtcacccaggtgatcatcaccaccgggattgacctctcctccggctcggttattgcccttgcggcggtggtggcggccagcctggcgcaaacctccgatagcctgtcgccaatgttcccggcgctggtcaacctgccggcggtgatccccatttgcgcggggatcggcgtcggcctgctgtgcggcctgaccaacggtttcctggtgacgcggaccggtatcccgccgtttatcgccaccctcgggatgatggtttcggcgcgcggtctggcgcagtattacactcagggcaacccgatcagcttcctctccgacagctttacggcgataggccagggggcgatgccggtgattatcttcttcgtgatcgccgccgtgtttcacattgcgctgaagcatacccggtatggcaaatatgtgtatgccatcggcggcaacatgacctcggccaaagtgtccggcatcaacgtgaataaatatctggtgatcgtctacaccatcgccggggcgctctccggactggcgggggtggtgctggcggcgcgcgtcagcagcggccagtcgagtatggggatgtcctacgagctggacgcgattgccgccgcggtgatcggcggcagcagcttaatgggcggagtggggcgcattaccggcaccctgattggcgcgatgatccttggcctgatcaaaagcggttttacctttgtcggcgtcgatgcctatgtgcaggatattattaaaggcatcattatcgttgcggcggtaaccatcgatatccgtcctgtccagaaataa

SEQ ID NO: 139269 - DNA, 1041 bp, Enterobacter cloacae
atggtggagattgccaaagcggtctcatggaacgcggatatcgtgatcatggatgagcccacctcggcgctgaccgaaggcgaggtggctcacctgttcaccatcatccgcgacctgcgcgcccaggggaaagcgatcatctatatcagccacaaaatggatgagatctttgccatcaccgatgagatcagcgtctttcgcgacggcacctgggtggggagcaaaaacaccaccgaatttacccggcagtcgctgatcacccagatggtgggccgcgaattaacccagctgtttccgaaatttaataacaccatcggcgaagaggtgctgacggtgcgcaacctgacgcgtcagggcgtgttccatgacgtcagctttagcgtacgccgtggcgaaatcctgggcgtggccgggctggtgggcgccgggcgcagcgaggtgatggaaagcctgttcggtatggagcgcttcgacagcggcgaagtgctgatcgacggggcgccggtgaccatcgattccccctccgtggcgattgaaaaggggatggcattattaaccgaagaccggaaaaagtcgggcctgtttctggtgctgtcggtgctggaaaatatgagtatcgtcaaaatgccggaatatatcggcaagagcggttttgtccagcacgtgaaaatggccgaagactgcatggagcaaatacgccggctcaatattaaaacgccgacgatggatcaaattattaataacctcagcggggggaatcagcaaaaagtcctgattgcgcgctggctgttagcgcaaccgaaaatcttaattctcgatgagccgacccgcggtatcgacgtcggggcgaaggcggagatttatcatcttatcagtgaactggcgaatcggggggtggcggtgattatggtctcctctgaactgccggaaatccttggcatgagcgatcgggtcatggtgatgcatgaaggtcgtatcaccggcatcctggaaaaagacgaagccgaccaggaaaccattttgtcgttggcatcccattga

SEQ ID NO: 139270 - DNA, 501 bp, Enterobacter cloacae
atgaacgcttttgcccttgaagccgaaggtatcagtaagttcttccccggcgtgaaggcgctcgataatgtctcattgcgcgtgcgtccgggaacggtgcatgccctgatgggcgagaacggcgccggtaaatccacgctgatgaaatgcctgatcggtatctatcgccccgataaagggtcgattcgcgtgaaaggggagccggtggagtttaccgacaccatggatgcgctgcgctcggggatctcgatgatccaccaggagctcaatctggtgccgcatatgacggtggcggagaatatctggctggggcgcgagccgatgaagtacggctttgtcgaccatggccagctgacccgccagacccaggcgctgctggataagctcaatatccgcttaaccgctgaccggctggtgggcgacctgagcatcgccgcccaagcagatggtggagattgccaaagcggtctcatggaacgcggatatcgtgatcatggatga

SEQ ID NO: 139271 - DNA, 924 bp, Enterobacter cloacae
atgaatattaagaaaacgattgttgcctctttgttagcctgcatgctgcctgcggtggttatggcaaaagatgtctccattggcgtctcgatggcgctgtttgacgataacttcctgacgatcctgcgtacctcgatgcaaaaagagatgaaaaaagatggcgttaaatcgcagatcgaggacgcgaaaggggatgtctcccagcagctgcagcaggtacagaactttatcggccagggggtggacgccattatcgtcaacccggtggataccaacgcggtgaaaccgatcatggatcaggccaccaaagccgggatcccgctggtgtttgtgaaccgccgtccgcaggcggagctgaccgacaagatggcctatgtggggtcggattccattcttgccggccgtctgcagatggaagcgctggcgaaagcgatgaacggtaagggcaatgtggcgatcctgctcggcgacctggcgaatgaatccactcgcgaccgcaccaaaggggtggaagaggtggtagcgaaatacccgaacatcaaaatcgtccagaagcagaccgcgaaatttacccgcaatgacgcagtggatgtggtcagcaactggatgaccagcggtgaggatatccaggccatcgcctccaacaacgatgaaatggcgatcggcgccctgcaggcgctgggcaaaaacccgaaccatattctcatcgccggcgtggatggcaccccggatgccctgcagatgctgaagagcggcaagatgatcgccaccatcttccaggatgcgaaaggccagggtgaaggcgcagtcgacgcggccatcaagctggcgaacggcgagaaagtggaaaaaatcatcgacgtgccgtatcagctgatcaccaaagagaacatggctgaatttaccaaccgtaatcagaaatag

SEQ ID NO: 139272 - DNA, 411 bp, Enterobacter cloacae
atgccgtcggtatatcgtccgctggttaatttcgttgcgaaggccatgcaggccgtgctgaatctggcactgctgtgcctgggaattattctggtggtgttcctgggaaaggagaccctgcatctggcgcacgtactgtttacgccggagccggtgagtaagtacaagctggtcgaagggctggtggtctattttctctactttgagtttatcgcgctgattgttaaatattttgaatccggttttcactttccactgcgctatttcgtctatatcggtattaccgcaattgtgcggcttattatcgtcgatcatgagtcgccgctggcggtgctcatttactccgcggcgatcctgatcctggtgattacgctctggctgtgtaactccaatcgcctgaaacgcgaataa

SEQ ID NO: 139273 - DNA, 891 bp, Enterobacter cloacae
atggctatggtccaacccaaatcgcagaagctacgtttatttaccacgcatctcctgctactgatttttatcgccgcgattatgtttccgctgctgatggttatcgccatctcgctgcgcgagggtaacttcgccaccggtagcctgatcccggataccatctcctgggagcactggcgtctggcgttaggcttcagcgtcgaacacgccgatggccgcgttacgccgccgccgttcccggtcctgctgtggctgtggaactcgattaaggtcgccgggatcaccgcgatcggtatcgtcgctctctccaccacctgcgcttacgctttcgcccgtatgcgcttcccggggaaagcgaccctgctgaaagggatgctgattttccagatgttcccggcggtgctgtcgctggttgccctgtacgcgttgtttgaccgcctgggccagtacatcccgttcgtcggtctcaacacccacggcggcgtcatctttgcctacatgggcggtatcgcgctgcacgtctggacgattaaaggctacttcgaaaccatcgatggctcgctggaagaagcggcggcgctggatggcgcgaccccatggcaggctttccgtctggtgctgctgccgctgtcggtgccgattctggcagtcgtgtttattctgtcgttcatcgcggccatcaccgaagtgccggtcgcctcgctgctgctgcgcgatgtgaacagctataccctggcggtaggtatgcaacagtatctcaacccgcagaactatctgtggggcgactttgccgccgcggcggtgctctccgccattccgatcacggttgtcttcctgctggcgcagcgctggctggttaatggcctgacggcgggtggagtgaaaggttaa

SEQ ID NO: 139274 - DNA, 1545 bp, Enterobacter cloacae
atggatgccgttaaaaagagacactggtggcaaagcccgcaactcacatggtctgtgattggcttactgtgcctgctggtgggttaccttgttgttttgatgtacgcccagggggagtacctgttcgccatcatgacgctgattttaagctcagttggcctgtatattttcgctaatcgcaaggcttatgcctggcgctatgtttatcccggcctcgccggcatgggcctgtttgtcctgtttccgctgatctgcactatcgctatcgcgtttaccaactacagcagcaccaaccagctgacctttgagcgtgcgcagcaggtgctgatggatcgttccttccaggccggcaaagcctataatttcacgctgatcccggcgggtgacgagtggaagctggcgctgaccgacggcgaaagcggtaaaaactacctttctgacgcctttaaatttggcggcgagcagaagctggcgttaaaagaaaccgacgccctgccggaaggcgagcgcgccaacctgcgcgtgattacccagaatcgcaccgcgctgaaccagctgaccgctgtgctgccggatgacagcaaagtcatcatgagctccctgcgccagttctccggtacccagcctctgtataccctcggcgaagacggggtactgaccaacaatcagacccacgttaaataccgcccgaacaacgacgtcggcttctaccagtcaattaacgccgacggcagctggggcaatgagaagctgagcccgggctacactgtgactatcggctgggacaactttacccgcgtcttccacgatgaaggaattcagaaaccgttcttcgcgatcttcgtctggacggtggtgttctcggtgctgaccgtggtgctgaccgtcgcggtggggatgatcctcgcctgcctggtgcagtgggaagcgctgaaaggcaaagcgatttatcgcgtcctgctgattctgccgtacgccgtaccgtcgtttatttcgattctgattttcaaagggctgttcaaccagagctttggtgaaatcaacatgatgctcagcacgctgttcggcattaagccggcctggtttagcgacccgaccaccgcgcgcaccatgatcatcatcgtcaacacctggctgggctacccgtacatgatgatcctgtgcatggggctgctgaaggcgattccggacgatctgtacgaagcgtcggcaatggatggcgccggcccgttccagaacttctttaaaattaccttcccgctgctgattaagccgctaacgccgctgatgatcgccagcttcgcctttaactttaacaacttcgtcctgattcaattgttgaccaacggcggtccggaccgtctcggcaccaccaccccggccggttataccgacctgctggtgagctacacctatcgcatcgcctttgaaggcggcggcggtcaggacttcggcctggcggcggctatcgcaacgcttatcttcctgctggttggcgcgttagcgattgtgaatctgaaagccacgcgcatgaagtttgattaa

SEQ ID NO: 139275 - DNA, 435 bp, Enterobacter cloacae
atgagcacctcgccgtccgtgattcgtcgtttcgttgagtactacgccgggctggatgcacagccgcccgcggcgctggccgcgctgtaccatccggacgcgacgctgagcgatccttttggtcagcatcaggggctgttcgccattcagcgctactttacccatctgctggccaacgtggagcagtgccggttcaccatcgacacgccgctttgcgacggccagcggttcgccgtgacctggaccatgcactggtcgcatccgcgcattgccggcggagaaaccctggccctgccgggctgctcggtggtggacatcgccggggagcaggttctccatcagcgcgactactacgacgccggggagatgatctacgagcatcttcccctgctgggctgggcggtgcgcggcgtgaagcggagggtgcgctcatga

SEQ ID NO: 139276 - DNA, 720 bp, Enterobacter cloacae
atgatgacggtgctcatcaccggcgccagctccgggatcggcgccggcctggcgaaatccttcgcggcggatggccatctggtcatcgcctgcgggcgcgatgcgtcgcgcctggcagcgctccagcagttcagccccaacatcagcgtacgcctgttcgatatgacagacagggacgcctgtcgccaggcgctgacaggctgttttgccgacctgatcattctctgcgccgggacctgcgaatacctcgaccacggacaggtggatgccgccctcgtggagcgggtgatggccaccaacttcctcgggccggtgaactgcctggcggcgctgcagacgcagctggaggcaggcgatcgggtggtgctggtcagctccatggcgcactggctgcccttcccgcgcgcggaagcctatggcgcctccaaggcggcgctgagctggtttgctaacagcctgcgtctggactgggagccgaaaggggtcgccgtcacggtggtctctccgggcttcgtcgacaccccgctgacgcgcaaaaacgacttcgccatgcccggtcgggtgagcgtagatcgggcggtggcggcgatccgccacggtctggcgaagggcaaaaaccacatcgccttccccaccggcttcagcctggccctgcggctgctggccagcctgccatcgggtatccagcgcctgctgttgcgcaggatggtgcgctcatga

SEQ ID NO: 139277 - DNA, 1278 bp, Enterobacter cloacae
  misc_feature (101)..(110): n is a, c, g, or t
atgaacatcgccatcatcggcagcggcatcgccgggctgacctgcgcctggcgactggccggacaccatcaggtaacgctgttcgaagcgggcgccacgcnnnnnnnnnncgccacgccgggcggccacaccgccaccgtggatgtcgccacgccgcagggcacctgggccatcgataccggatttatcgtctacaacgatcgcacctatccgcgctttatgggcctgctcagcgagctggggatcggcgggcaaaaaacgcagatgagcttctcggtccacaacccggccagcggcctggagtacaacggccacagcctgacctcgctcttcgcccagcggcgcaatctgctgaagccggccttctggggactgctgagcgagatcgtccgcttcaaccgcctggcgaaactggcgctgaccgaggcgctggatccaggcgcgacgctggagagcttcctcgcccgccaccgcttcagccccttcttcgcccgccactatattctgccgatgggggcggccatctggtcgtcgtcgctgcaggagatgcgccgcttcccgctgccgctgtttttgcgcttctttgaaaaccacggtctgctggatattcgcgatcgcccgcaatggtacgtggtgcccggcggttcccgggaatacgtccgcgccctgctcgccaggctcggcgatcgtctggatctacgcctcaacgcgccggtgcagcaggtggaccgccacccggcgggggtcaccctgcggctggcgtccggggaggcgcattttgaccaggtgatcttcgcctgccactccgcgcaggccctggcgatgctggcggcgcccaccgattccgaacgagaagtccttggggacatcggctggcagcgtaacgaggtggtgttgcacagcgatccgcgctggctgccggagcgccagcgcgcctgggccagctggaactatcgcctgagcgacggggatcgggcccgggcctgcgtcacctacaacatgaatattctccaggggctgcccgcgggcgcgccgctgttctgcgtcaccctgaacccggacgcgccggtggacgatcgctacgtctggcagcgcttcgtctatgagcatccgctgtttaacccgcaaagctggtcggcccaactgcggcgcgaagagattaacggccagcagcggagctggtactgcggcgcctactggtacaacggctttcatgaggatggggtgcgcagcgcgctcgacgtggtgcagggcatcgccgcggcggagggcaactga

SEQ ID NO: 139278 - DNA, 723 bp, Enterobacter cloacae
atgaacagctgcctctatcagggcgtcctgcgccaccgtcgcctgcagccgaaggcgcaccacttcgtctaccgcctgtttatggcctggctcgacctcgacgaactggacaagctgcctgaggcgggcatccgccgcaaccgcctggccgccgccgcctggtacgacgccgattatccgctgggcgcgccgctgaaggcccaggcgctgaaccggctggagagcctgaccggctgccgcccggcgggccgcgtgatgctcctgacccagctgcgctacttcggcttccattttaatccggtcaacttttactactgctatgacgaggccgacaccctgcgctgggtgctggccgaagtgcgcaacacgccgtggaatgagcgtcattactacgcggtggacggccagcaggcacgcccgctggagaaagcctttcacgtttcgccgtttaacccgatggacatggtctatcactggcgcttcaacgcgcccggcaaaacgctgcacatgcatattgaaaaccatcaggccagcaaggtgtttgacgccaccctggccctgagccgcgtgccgttgacccgcgccaacctgcgcgggctgctgctgcgtctgccgctgatgaccatgaaaaccgtcctcgccatctactggcaggcgctgcggctgtggctgaagcgcctgccgctgtacaaccatcctgtcagcaggagtgaacgctcatga

SEQ ID NO: 139279 - DNA, 882 bp, Enterobacter cloacae
ttggcccaccgcctcaatcatctccaccgacaccagtttgtcgtactcgccgcgcagatcgcggtagtcgcagagcagcacctcgacgcgatcctgcagcccggcgcgggccatgcgctcggtagcccagcggtgctgctcccgggaaagggtggtggtggtgacccggcagccgtaatggcgggcggcgtactcggccagcgccccccagccggtgccaatctccagcagatgatcgccgggagtgagcgccagctggtcgcacagacgcgccatcttggcccgctgggcctgggtcagatcctgctggtcatcggtaaacaacgcgctggagtagagcaggtcgtcatccagaaagtgggcataaaattcgttgccgaggtcgtaatgggcggcgatgttctcccgcgcctgggcgcgagtgttgcggcgggtccagtggcgcagccgggcgacgggcttgcccagcagacggaagccgcgctccagacgccccagcacctcgccgttgcgcgcaaggatctgcagcagcgccgtcagctggtggctctcccagtcgccgtccatccaggcctcggccgccgccaggctgccgccggtcagcagacgccagtacacctccggcgcgcagacccgcgcctcggcgcgcagcgcggcggcggggtcgccaaaatgaaacgtctgcgccccttcgcgcacggtgagcgagccttcgcggaggccactcaacagacgaaagagcagccagcgcgcgagccgcacgttgcgcggcacatcgggttcaagcgcaaagacgggatcggtcatgagcgttcactcctgctgacaggatggttgtacagcggcaggcgcttcagccacagccgcagcgcctgccagtag

SEQ ID NO: 139280 - DNA, 1437 bp, Enterobacter cloacae
atgctgcatacattcctgcagcgctttacgaatcgccaccggatcttcaccagagcgggtgttgttccagcggttgaggcgatccagcgagccttcgatatcggattcgctggcgtcgcgcagtgtgccctgctcggcaatggattcctgcagatgcaggcccgccgcgcggccgaagaccaccaggtcgagcagcgagttgccgcccagacggttggcgccgtggaccgatacgcaggcgatttcgcctaccgcgaacaggcccgggatcaccacgtcttcgcccttctcattcacggtcaacgcctggccggtgactttggtcgggataccgcccatcatgtagtgacaggttgggataaccgggatcggctctttcaccggatcgacgtgggcaaaggtacgggaaagttcaaggatacccggcagacgagattccagaacctctttaccgaggtgatccagtttcagtttcgcgtgcgggccccacggaccgtcgcagccgcggccttcgcggatttcgatcatgatggaacgcgccaccacgtcacggcccgcaaggtctttagcgttcggggcataacgctccataaagcgttcgccgtgtttgttcagcaggtaaccgccttcgccccggcaaccttcggtaaccagaaccccagccccggcgataccggtcgggtggaactgccacatttccatatcctgcaccggcacgccggcgcggatggccatcccgacgccgtcacccgtattgatgtgggcgttggtggtggactgatagatacggcctgcgccgccggtcgccagcacggtggcgcgggctttaaagtagaccacttcgccggtctcgatgcacagggcggtacaaccgactaccgcgccgtcctggtttttcaccagatcgagggcgtaccattcggagaagatagtggtgtggtttttcaggttctgctgatacagagtgtgcagcagggcgtgaccggtacggtcagccgccgccgcggtacgcgccgcctgttcgccgccgaagttcttcgactggccgccaaacgggcgctgataaatacggccatcgtcaagacgagagaatggcagtcccatgtgctccagctcaagaatcgcttccgggccggtcttacacatgtattcgatggcgtcctggtcgccgatatagtccgacccttttacggtgtcgtacatatgccattcccagttatcttcatgggagttaccgagcgcgacggtgatgccaccctgcgcggatacggtatgggaacgggtagggaacactttggagagcagtgcacaggtctgtccgctctgggaaatttgcagcgccgcgcgcatacctgcgccgccggcaccgatgacaacagcatcaaactctctgactggcaatttcattacacaccccacaccacaacaaatccataa

SEQ ID NO: 139281 - DNA, 348 bp, Enterobacter cloacae
atggtaagcaacgcctcagcactgggacgcaacggcgtacatgactttatcctggtccgtgctaccgccatcgttctgaccctctacatcatctacatggttggcttcttcgccaccaccggtgaaatctcatgggaagtgtggaccggattctttgcctccggcttcactaaagtcttcactctgctggctctcgtttccattctcatccatgcctggatcgggatgtggcaggtgttaacagactacgttaaaccactggctctgcgcctggttctgcaactggctatcgttgtggcgctggtggcttacgttctttatggatttgttgtggtgtggggtgtgtaa

SEQ ID NO: 139282 - DNA, 405 bp, Enterobacter cloacae
atgtgggcgttattcatggtaagaaatgtgaaaaaacaaagacctgtcaatctggatctacaaacgatacggttcccaatcacggcgatagcgtccattctccatcgcgtttccggtgtcatcaccttcgtggcggtcggaattttgctttggctgctgggcaccagcctttcctccccagaaggttttctgacggcggcctccatcatggatagcttctttgtgaagttcatcatgtggggcattctcaccgcgctggcctatcacgtcgttgtcggtattcgccatctgatgatggactttggctaccttgacgaaaccctcgaagcagggaaacgttccgccaaaatttcttttgttattactgtcgtgctttcacttctcgcaggagtcctcgtatggtaa

SEQ ID NO: 139283 - DNA, 807 bp, Enterobacter cloacae
atgctccagctccatggccacctgcagcaggtcgtctttggtgcccagctctttcagcacttcatggcaggtttcacgcattacggtggcgcgcggatcgtagtttttgtaaacacgatggccgaagcccatcaggcggaaagagtcattcttgtctttcgcacgacgaacaaattccggaatgtgctcaacggagctgatctcttccagcattttcagcgccgcttcgttggcgccaccgtgtgccggtccccacagggaggcgatgcccgcagcgatacaggcgaacgggttagcgccggaggagcccgcggtacgtaccgtggaggtcgacgcgttctgctcgtgatcggcgtgcaggatcagaatacgatccatcgcgcgctccagcaccggattgacttcatactcttcgcacggtgtcgcaaacatcatgcgcaggaagttgccggcgtaggagaggtcgttgcgcggataaacaaacggctggccgatagaatatttgtaacacatggctgccatggttggcattttggacagcagacggtaggcggcaatctcgcggtgacgcgggttattcacgtcgagggaatcatgatagaacgccgccagcgcgccggtgatcccgcacatcaccgccatcgggtgggaatcgcgacggaacgcgtggaacagacgggtgatctgctcatgaatcatggtgtggcgggtgacggtagttttgaattcgtcatattcggcctgggtcggcttttcgccgtacagcaggatataacagacttcaagataattagattcggtcgctaa

SEQ ID NO: 139284 - DNA, 927 bp, Enterobacter cloacae
atgacaccgtacctacaatttaaccgccaccaatgggctgcacttcgtgattctgtcccgatgacgttaaccgaggaagaaatcacgcggttaaaaggcatcaacgaagatctctctctggaagaggttgccgagatctatttgccgctgtcgcgtttgctcaacttctatatcagttctaacctgcgccgccaggctgttctcgaacaatttcttggcaccaatggtcagcgaattccctatattatcagtatcgctggcagcgttgcggtaggaaaaagcaccaccgcccgcgttctgcaagctttgcttagtcgttggccggagcatcgccatgtcgaactcattaccaccgacggttttttgcaccctaactcggttttaaaagaacgtgggttaatgaagaaaaaaggctttccgcagtcctatgatatgcatcgcctggtgaagtttgtctccgatctcaaatcaggggtaccgcaggcaaccgcgccagtttattcccatctgatttatgatgttattcccaatggtgacaaaaccgtcgcgcaaccggatattttaattcttgaagggctgaatgttctgcaaagtggaatggattatccgcacgatccccatcatgtattcgtttccgattttgtcgacttttctatttatgtcgatgccccggaagaattattgaaaagctggtatatcaaccgctttcttaaattccgggaaggggcgtttaccgatccggattcctatttccataattacgctaagctctcgaaggaagaagcggtagatattgccacttcgctatggaatgaaatcaacctaatgaatcttaaagaaaatatccttccaactcgcgagcgcgccagcctgatcatgactaagagcgccaatcactcagtgaatcaggtacgcttacgtaaataa

SEQ ID NO: 139285 - DNA, 963 bp, Enterobacter cloacae
gtgaaagaccatactatccctttgacgctaatttctatccttgctgatggcgagtttcactctggcgaacagcttggtgagcagttaggcatgagccgggcggcgattaataagcacatccagaccttacgtgactggggcgtcgatgtgtttactgtgccgggcaagggttacagcctgccggagcctattcatctattagatgagaaaaagatttctcaagagatagaccatggtcgagtgacggtccttcccgtcatcgactctactaaccagtatttgctggacaggcttgatgagctgacgtccggagatgcctgtgtggctgaatatcagcaagcagggcgaggccggcgaggcagaaaatggttttcgccctttggcgcgaatctctatctctcgatgtactggcgtctggagcagggcccggcagcggctattggcctaagcctggtgatcggtattgtgatcgctgaagttctgcagcagctcggggccgaacaggttcgcgtgaaatggccaaacgatatttacctgcaggatcgtaagctgtcagggatcctcgtggaactgacggggaaaacgggcgatgccgcacaaatcgtcagcggcgcgggtatcaaccttgtgatgcgtcgcgtggagtctgatgtcgtcaatcaggggtggatcagccttcaggaagcgggggtggtcatcgaccgtaacctcctcgccgcgcgcctgattaaagagctgcgcctgggactggagctgttcgagcaggaaggattggctccctatctaccgcgctgggaaaaactggataactttattcatcgcccggtgaaactgattatcggtgataaagaaatttacggcatttcgcgtggcattgacgcccagggcgcactattgctggagcaggatggtgtaataaaagcctgggtgggtggtgaaatatcattgcgcagtgcagaataa

SEQ ID NO: 139286 - DNA, 1029 bp, Enterobacter cloacae
atgaaccactccctcaaaccctggaatacctttggcattgaacgcttcgccaagacgatagtacgcgccgaaactgagcaacagttgctaagcgcctggcaaaccgctgccgcggcaggcgaacccacgctgatccttggggaaggcagtaatgtcctgtttctgaacgactatgccggtacggtgatcctcaaccggattatggggatcgaggtgagcgaaacgccggacgcctggcgcttgcacgtcggcgccggcgaaaactggcatcagttggtgcagttcacgctacagcatgcgatgccaggtctggaaaatctggcgttaatccctggctgcgcaggatcttcgccgatccagaatattggcgcctacggcgttgagctacagcgggtttgcgaatatgttgactgcattgagctggaaaccgggcgtaagcaacgtctttcagccgcggaatgccgttttggctatcgcgacagtatcttcaaacatgaatatcaggaccgctatgccatcgttgcgattggcgtatcgttagcgaaaacatggcagcctgtactgagttacggtgatttaacgcgtctcgatccgcagaccgtcacgccgcagcaggtatttgatgcggtctgtcatatgcgaatgactaaattgccggatccaaagattaacggtaatgccggcagcttttttaagaacccgatcgtcagcgctcaggttgcgaaagcgctgctggcgcagttccctcatgcaccgcactatccgcaggcaaatggcagcgtcaagctggccgctggctggctaatcgatcaatgtgagctcaaaggacaacgcatcggcggcgcggccgtccatcgacagcaggcgctggtactgattaatgaagatcgagcgaccagcgaggatgtggtaaaacttgctcattatgttcgccagcgggtgggtgcgaaattcgatgtatggcttcagcccgaggtgcgcttcattggcacgcatggtgaagtcaacgcagaggagagcattgcgtga

SEQ ID NO: 139287 - DNA, 822 bp, Enterobacter cloacae
atgcgtttagcatcccgatttggacttactcattccattcgtcaggagcgcccactgactaacgatgaattggtcaaggttgtaccttctgtgttttcagaagaaaagcataattcacgtagtgatcgctatacctatattccaaccattacactgctggataaattacgtgaagaaggtttccagccattttttgcctgtcagtcacgagtaagggatgaggataaacgggggcatactaagcatatggtaagacttcgccgtgaaggggccaataaaggaacagaagtacccgaaatcattcttcttaactcgcatgatggatcgtccagttatcaaatgatcccgggtatgttccgttttgtatgcacaaatggccttgtgtgcggtacgtcgtttggtgagattcgtgtacctcataaaggtgatattgtgggaagggttatcgaaggtgcttacgaagttctgggaattttcgataaaataactgaaggcgttgatgtcatgaagtctattgccttaaccaaggaagaacagcgtctgtttggacaagctgcattaacctaccgatatgaagatgaaaataaatctccggtcagtattgaacagataattcatccgcgccgttatgaagataaaaaagatgacatctggactacatatcaaagggtccaggaaaatctgattaaaggcggtttgcctggccgaactgaaaaagggaaaagaacaacaacccggccagtaaaagcaatcgatggtgatgttaaactcaataaggcattgtggttaattgcggagaaattccgcactcttaaaggctaa

SEQ ID NO: 139288 - DNA, 486 bp, Enterobacter cloacae; identical to SEQ ID NO: 95267

SEQ ID NO: 139289 - DNA, 393 bp, Enterobacter cloacae
atggctaagatccaagtttatgtaaatgacaaagttgcagagaaaattaatgcgatagcagttcagcgtcgtgctgaaggtgcgaaagagaaagatattagctattcaagtattgcatcgatgttgcttgagcttggtttgcgtgtctacgaagcccagatggaacgcaaagaatccgggtttaatcagatggcattcaatagagcgctgcttgaaagcatggttaaaacacagtttactgtgaataaggtgctggggatcgaatgtttgagtcctcatgttcatggtaacccaagatgggaatggtcagggttaatagaaaacatccgggatgacgttaatgctgtgatagagcaattctttccaaaagtggatgacactgacaatgattag

SEQ ID NO: 139290 - DNA, 702 bp, Enterobacter cloacae
atgtgtgcgatggatcgtagtggtgatgacagcttaagtcaatcggttagggatgctcttcttcacataaaggggttgtataacacctcacctgtctctgtttgcgtaagaaaccaacaacgcgatgtcctatattccaacacatcatttgaacaaatgtatgacttttttaaaacagaatgtgtagcaggtagtttctcaggatcatttcatgaactggagttgatgctttcccagttagaacttgattgcatggcgctaggtaaaggttgtgtgttaagtaaaattttttcgtgtggaaaatcaaattttcaaattcgaattgagtgtatcagtcttttggatgatgatttttattttttttggcaaatgaatcttctgataacggctccattatccagccgaaaaatgaaattcataaaatcaaaagacattccggattttgatgaggctattgcaaggataagtgatttgaatatcattcctctttcattttatgttcttggttttagctatatggacatatcaaattatatttctgtgcctgagaagattgtaaaaaaaaggatcgatcgtgcgaaagagaaagtgttggaggtttatccgtcttttagagcatttgtaacggattgctacaggagcaggaaaatatatttttttattgagaatgtttatgaatatgttatgttaataaattgttaa

SEQ ID NO: 139291 - DNA, 1209 bp, Enterobacter cloacae
atggatgacatgtaccaacctgccgcactctttatcggcctacgctatatgcgcgggcgcgcagccgaccgcttcggtcgtttcgtctcctggctctcaactatcggtattacgcttggcgtaatggcgctggtgacagtcctgtcggtgatgaacggctttgaacgcgagctgcaaaacaacatcctggggctgatgccacaggccattcttagcgccaaacaggggtcggtgaaccctcagcaactgccggagcgcgaagcgaaacttaatggggtaacccgcgtagcgccgatcaccaccggcgacgtggtgctgcagagcgcgcgcagcgtggcggtcggggttatgctgggcattgatccggcgcagaacgatcccctgactccatacctggtgaacgtcaaacagagcgatctgcaggcgggcaaatataacgttattctcggcgagcagctggcgggccagctgggggttaatcgcggcgataaaattcgcgtgatggttccttccgcaagtcagtttacgccgatgggccgcgtgccgagccagcgtctgttcacggtcatcggcaccttcgccgccaacagcgaagtcgatggctatcagatgctgaccaacatcgacgacgcctcccgtctgatgcgctatccgctggggaatatcaccggctggcgcctgtggctggataaaccgctgcaggtcgacaccctgagtcagcagacgctgccgccgggaactcagtggcaggactggcgcgagcgcaagggcgaactgttccaggcggtgcgcatggagaaaaatatgatgggtctgctgctgagcctgatcgtcgccgtcgcggccttcaacattattacctcgctggggatgatggtgatggagaagcagggcgaagtggcgatcctccagacccaggggctgacgccgcggcagattatggccgtctttatggtgcagggggccagcgccgggatcgtcggcgcgctgctgggagcggtgcttggcgccctgttggccagccagctgaataatttaatgccgatcatcggcgccttccttgacggcgcggcgctgccggtggcgattgagccgctgcaggtcattgttatcgccctggtggcgatggtgctggccctgttgtctacgttgtacccttcctggcgcgctgccgccacccaacccgctgaggctttacgttatgaataa

SEQ ID NO: 139292 - DNA, 438 bp, Enterobacter cloacae
gtgctcggcatcgcgcttcacctcaaagcggtcgcgccactggctgcggaacagctcaatagcggtctggtcggtggggaactcgtgcgccggcagcaggttaatggccgccacttcctccagcgtgcgctggctgtcaacgtcgaacaggcgcaggctgtcgatttcatcgtcaaagaaatcaaggcggtagggctgatcgctacccatcgggaacaggtcgagcagcgcgccgcgggtagcatattcgccgtgctccatcacctgatcgacatggcggtagccggccccctccagctgatcgcgcagcgcatcgcgcgacaggcgctggccctttttcatcaccagcgcgtggccgtgaaggaagctgtgcggacagacgcgctgcatcagggtgctgaccgggacgatcagcacgccgcgctgcatggtgggtaa

SEQ ID NO: 139293 - DNA, 435 bp, Enterobacter cloacae
gtgttccaggtgaacgaccggctggccgatatgcagttcggcgaggttgcgaatcagagtgtcagggttaatggtgcggcgcgaatcctgacgacggcgcgctacgcgctcgccgagcaggtcgctctcgcaaatcagcgccaggccgcgctggctgtcgataaacccgtgctcggcggcgccaatcatcagatagcggccgttgccggtggcttcctcgagacgcagcacgtgttttggcgcaactttaatccgcgccagcatttcgctcagcgcttcacggcggccttcgctttccaccgagaagatcaccggaccagtaaaggactcgaggaagcggcgcagattatccagcggcgctttgttctgcgcctggacggcgaggtccggcagcgtctggtagcccagattagtatttgccgctttgtccgctag

SEQ ID NO: 139294 - DNA, 660 bp, Enterobacter cloacae
atgccgcacgccaaaccggtgctcttcgtcgacgatcagcagcccgagatcgcgcagcttcacctcgctctgcagcagcttgtgggtgccgatcaagatatcgattttgccttccgcggcctgctcgaggatctgcgcctgctctttagcgctgcggaagcgggagagcatttcgatgcgtaccggccagttggcgaaacgatcgcggaaattgtcatagtgctgctgagccagcagggtggtcggcaccagcaccgccacctgcttgtggttctccacggcgaggaaggcggcgcgcatggccacttcggtcttgccgaagcccacatcgccgcataccaggcggtccatggccagcggctggcacatatcgctgaggacggcgttgatcgcctgcgcctgatccggcgtggtttcaaatgggaagccgtcgcagaacagctgatactgttcgcggtcgtgtttaaaggcaaaacccgccttcgccgcgcgctgggcgtagatatccagcagctcggccgccacgtcgcgtactttctcagccgctttttgtcgcgcccgggtccaggcatcgccgcccagcttgtgcaggggggcgttttcttccgccccgccggcgtagcggctgataagatgcagggacgataccggaacgtatag

SEQ ID NO: 139295 - DNA, 555 bp, Enterobacter cloacae
atggccgttgacctggttgaacgtttcatgaagaaaattcagaaactgcacacctaccgcaacgctatcccgactcagtctgttctgaccatcacctctaacgtggtgtacggtaagaaaaccggtaataccccagacggtcgtcgcgctggcgcgccgttcggtccaggtgctaacccgatgcacggccgtgaccagaaaggtgcagtagcctctctgacctccgtcgctaaactgccgtttgcttacgcgaaagatggtatctcttataccttctctatcgtgccgaacgcgctgggtaaagacgacgaagttcgtaagaccaacctggcaggtctgatggatggttacttccatcacgaagcgtccatcgaaggtggtcagcacctgaacgtgaacgtcatgaaccgcgaaatgctgctcgacgcgatggaaaacccggaaaaatatccgcagctgaccatccgcgtatctggctacgccgtacgttttaactccctgaccaaagaacagcagcaggatgttattacccgtaccttcactcagaccatgtaa

SEQ ID NO: 139296 - DNA, 741 bp, Enterobacter cloacae
atgtcagttattggtcgcattcactcctttgaatcctgtggcaccgttgatggcccgggcatccgctttattacctttttccagggctgcctgatgcgctgcctgtactgccataaccgtgacacctgggatacccacggcggcaaagaaatcaccgttgaagaattaatgaaagaggtggtgacctatcgtcactttatgaatgcttccggcggcggcgtcaccgcctcgggcggtgaggcgatcctgcaggcggagtttgttcgcgactggttccgcgcgtgtaagaaagaaggcatccacacttgcctggataccaacggcttcgtacgtcgctacgatccggttatcgacgagctgctggaggtaacagacctggtgatgctggatctcaagcagatgaacgatgagattcaccagaacctggtgggcgtttctaaccatcgtacgctggaattcgcccagtatctggcgaagaagaatatcaatgtctggatccgctacgtggtggttcccggctggtcagacgatgatgattccgcgcaccgcctgggcgaatttacccgcgatatgggcaatgtcgaaaaaatcgagctgctgccctaccatgagctgggtaaacacaaatgggtagcgatgggcgaagagtacaagctggacggcgtccatccgccgaagaaagagaccatggagcgggtaaaaggcatccttgagcagtatggtcacaaagtaatgtactaa

SEQ ID NO: 139297 - DNA, 1149 bp, Enterobacter cloacae
atgaccatctacacccggccagtgcaaatgctgctctgtggcctgcttttattgaccctggcgatagcggtgctgaatacgctcgtcccgctctggctcgcccatgaaaacatgccaacctggcaggtcggcatggtggggtcatcctattttaccggcaacctggccggtacgttgctggccggctgggtgatcaagcgcctggggtttaaccgtagctattatctcgcatcgttaattttcgccgtcggctgcgtagggctggggatcaccgttggcttctggacatggctgagctggcgttttatcgccggcgtaggttgcgcgatgatctgggtggtggtggaaagcgcgctggtttgcagcggcacttcccgcagtcgcggtcgtctgctggcggcgtacatgatggtctattacgtcggtaccgtactgggccagctgatggtcagtaaattacccaccgatttaatgggcgtcctgccgtgggtgaccggcctggcgctggcggcgatcctgccgttgctgtttacccgcattatggggcaggcagaagagccgcatgaaacggtacgtatctggccgatgctgaagctacgccaggcgcgccacggggtcaatggctgtattatttcggggattgtcctcggctcgctgtatggcctgatgccgctgtggctgaaccatcagggcgtcagcgactccggcatcggcttctggatggcggtgatggtgagtgcggggatcctcggccagtggccggtagggcgcctggcagaccgctacggtcgcctgctggtgctgcgggtacaggtctttgtggtcattctgggatgtctggcgatgcttagtcaggcggcaatggctccggcgctgtttgtgcttggggcatctggtttcacgctgtatccggtggcgatggcctgggcctgtgaaaaagtggagcaccatcagctggtggcgatgaatcaggcgctgctgatgagctataccatcggcagcctgctgggcccgaccctgacggcgatgctgatgcagaacttctcagacaacctgctgtttatcatgatcgccagcgtgtcgtttatctatctgctgaccctgctgcgcaaagccgggcatcatccgacgccggtggcgcacgcctga

SEQ ID NO: 139298 - DNA, 864 bp, Enterobacter cloacae
atgggaaacggatggcatgaatggccgctgatggtctttacggtcttcggccagtgcgtcgtaggcggctttattgttctggcgctggcgctgatgacaggcaagctttcccgtgagcaggagcagcgcgtggtgggcagcatgttcggcctgtgggtattgatggggatcgggtttattgcctcgacgatgcaccttggctcgccgctgcgggcctttaattcgctgaatcgcgtgggagcctcgtcgctgagtaatgaaatcgccagcggggcgatcttcttcgccgtcggcggaattggctggctgctggccgtgtgcaaaaagctgcctgccggcctgcggagcctgtggctggtggtgaccatggtgctgggcgtgattttcgtgtggatgatggtgcgggtatacaacaccatcgacacggtgccgacctggtacaccgtttggacgccgctgagcttcttcctgacgctgtttatcggcggtccactgctgggctacctgctgctgcgcgtcgcaggcgtcgatggttgggcgctgcgcctgctgccggtggttagtttgctggcgctgctggtcagtattatggtggtcgtgatgcagggaagtgaacttgccaccatccgcagctcagttcagcaggcctccgccctggtgccggattacgggttgcttatggcctggcgcgtggtgctgctggccctggccctggcctgctggtgcgtgccgcagattcgcggccgcaaaccggcggtctcgctgctcggcctggcctttgttctgatactggcgggagagatgatcggccgcggcgtattctatggcctgcatatgaccgttgggatggctgtcgccagttaa

SEQ ID NO: 139299 - DNA, 639 bp, Enterobacter cloacae
atgaacagagtgaaacaatgcacaagcgcggcgtttttcatggttttatcatggtcggccgctgcgcatccgcatagcttcatcagcctgcaaagcgagccggtggtcaaggacggtctgctgagcgcctttaaaatgcgctggacgatggatgaaattacctcatcggatctgctctatgatgccggaaacgccaaaccgggcagcgaagtctggaaaaagctggcggcggaggtgatggccaacgtgctcggtcagcactatttcagcgagctgtggcataacggtcagcgggttaaatttgacaatcgtcccgacggttacggcctcgaacgtgacggactgcaggcggtactcacctttactctgccgctggcgacgccgcaacccattgccgggcagacgtttaccttttccaccttcgacccgacctactacgtcgatatgttttatgacaaggatagcgatttttccctgcccgcagggctgcgggccgcctgtaaggcaacggtgatgacgccaaaaccgaacgacaaaatgctctcatacgcccagtcgctggataaagcggatgcgccgccggaggatatggcgctgggcagctattttgcccagaaggtgaccctgacatgtcagtaa

SEQ ID NO: 139300 - DNA, 1278 bp, Enterobacter cloacae
atgatgaccgtcattgaaccaccatctgcgctttccagtccacagcgccgtagccaggtgctcctgatgttttatctgcccggacagtcggtgacgactgaacggcttggcaggatcaacctcgttgatgagaccacggcccggcaggatattgaggagaccggacgcgaaattcagcgttaccaccgtttgaccctccagtcacaggtggacggcagctatcggattgaaggcgccgcgctcgaccaacgtttatgtctgctgcatgcgctgcggcgggggctgcgcctctgcccacagttcgttaatcatcattttaccccggcgctgaaaacgcagcttaaacaggaaggcattgcccgcaccttatacgatgataccaatctgcaggcgctggtgaaccgctgcgcgcgggcgctcaatcgccagtttgactgccgcgacgtgcagtttctgcgcttgtacctgcagtactgtctgctcgaacatcaccggggatactctccggacttcaatgaggaacagcaacgctgggctcaaaccgccgccgagttcaccctggcgcaggagattgtccgccactggcagcgtcgggtcggcgctccgccccatgtcggagaaccttttttcctctcgctgctgtttatgttgctcaaaacccccgacccggtccgcgacggtcacccgcacgatcgccgcctgcggctggctatctccggcctgatccaccgctttcagatcctcgctggcagagcgttcagtgatgagcaggggctcagcgatcaactctatatccatttgtcgcaggcgttgatccgcagcgtgtttgctatcggcatcgacagcacgctcacagaggaagtgacccggctctaccctcgcttactgcgtaccacccaggcggcattgagcgaattcgaggaggcctggcacatccgttttaatgaggaagagaccggtttaatcgcggtgatctttggcgcctggctgatgcagaaaagcgacctgcacgagaaacaggtgctgttgctaaccgatgacaacccagctattgaagaggccctggaacaacagctgcgcgaactaacgctgctgccgctgaatatcaaataccagagcgtagagcgctttcagaaggaaggtgcgcccaaaggggtgacgcttatcgtcaccccctatgcgacggcgctgccgctgttttcgccgccgcttatccacgcggagaactacttcactgaacgccagcagcagcatatctgcgccatgctcgaggactag

SEQ ID NO: 139301 - DNA, 1137 bp, Enterobacter cloacae
atggtcttgcactccacgcgctggctggcgctcagttatttcacctacttttttagctacggtatttttctgcccttctggagcgtctggctggccggaaacgggctgactccggaaaccatcggcattttgcttggcgccggtctggtggcccgttttctcggcagtctgctgattgccccgcgggtgagcgatccctcccggctgatcgccgcgctgcgcgtgctggcgctattaaccttgctcttcgcgctggccttctgggccggcagccacgtagcatggctgctggcgatcatcatcggcttcaacctgttcttttcgccgctggtgccgctgacggatgctctggccaacacctggcaaaagcagatcaccatggactatggccgggtgcggctatggggctctattgcctttgtgattggttcggcgctgaccggcaagctggtgagcctgttcgattaccgggcgatcctgctgatgctaagcctgggggtcgcctcgatgctgctcggcatgctgcttaagccgtcggtgatgccccagggggagtcgcgccagcagcagggggccggaatggcggcctggctgacgctggtgcgccaaagctggcgctttctcgcctgcgtttgtctgctgcagggagcgcatgccgcctactatggctttagcgccatctactggcagcaggccggctattccgcctcggcggtcggttatctgtggtcgttaggcgtggtggcggaagtggtgatcttcgcgttgagtaaaaaggtgttccgccgcttcagcgcccgcgacctgctgttgctctccgccgtctgcgggctgattcgctggggactgatgggctggaccacggcgctgccgggactcatccttgcgcagatccttcactgtggcaccttcacggtgtgtcatctggcggcgatgcgctatatcgccgcccgtcagggtagcgaagtgatccgtctgcaggccgtctactccgcggtggcgatgggcggcagtattgccatcatgaccgtcttcgccggtttcctctatcagcacctgcaccagggcgtattctgggtgatggccctgctgacgctcccggcgatggctatacggccaaaagcggtggcggcctag

SEQ ID NO: 139302 - DNA, 597 bp, Enterobacter cloacae
atggctgatgatcgattccatgtccggcgcgcggttgtacagataccaaccggtacggttggcgcggcccggcggcacgtggataaaggtcaggttcggttccgacagatccggcgaaatttgcgggtttaccagcgtcactttccccggcagcgcttcaaaggccgcatacagcttacgggtcagcacgccaatatcctgcgggctggcggagacgctaaggttattgcgccgcgcgaagcggatcagattacgatagctctgcatcatggcgtcgagcagttcgttgtgcgccttgcgcacttcatcgattttccagttggcgcggttgtcgagcatcatcagacgcttttcgtcccagccccaggcattcaccaactggctgacgacttcgcgacgccagccgacgcaggcgcgttcgcggctgagtttttcacaaactttcaggtagaagcagcggcgcaccaggtcgaggcgggtttcatcttcgatggcctgcagataggtggtcacgcgctccagcatcatgcagtacgggtcgaggccaaaggagacaatctccccgtcgtgcagacgctgtttgatatctttcgctaa

SEQ ID NO: 139303 - DNA, 507 bp, Enterobacter cloacae
atgctcttcttcatcgcacggcaccatattccacagaatacgcttgccggcgaggcgcaccgcggtgcggtagaactcatcaagcaacaggatatgctgggtcgaaccgcagtcttcgccgccgaggctaccgctttcgttatgacggaaacggttttcgtcgatcaggaagaagctgacttccacgccgagcgaggcagcccagctctcaagcaggctgcattttcgctgcagcagctgacgctcttcgctatccagccaggcctggtgacatacccagatatcaagatcggaagagcagctctggccgacggaggaagtactgcccatcgagtagacaccggtgatcggcagctcgcctttcggcggctcctgagtctgcataccgcgatgcagttccagttcttcaagatagtggcgttgggtttcatcaggcgtgtagaggcaaatgccacggggaacgttaccgtcaaggtaacccggcatcagcgggtgatgataatgtaa

SEQ ID NO: 139304 - DNA, 957 bp, Enterobacter cloacae
atgacggtaacaagcatgttagacaaagttttgaaaattgccacacggcaaagcccgcttgcgctatggcaggcgcagtatgttaaagcgcgcctggaacaagcgcatcccggactgaaggtcgagctggtgccgatggtcacgcgcggggatatcatccttgatactccgctggcaaaggtggggggcaaaggcttatttgtgaaagagttagagctcgccatgctcgaagggcgcgccgatatcgccgtccattcgatgaaagatgtgccggtggaattcccggagggcctggggctggtgactatctgcgagcgcgacgatccgcgcgacgcgtttgtctccaatcgctatgcctcgattgacgaactgccggccggcagcgtcgttggcacgtcaagtttacgccgtcagtgccagctggccgccacccgtccggacctggcgatccgctctctgcgcggtaacgtcggtacccggctgagtaagctggataacggcgagtacgacgccatcatcctcgccgccgccggcctgaagcgtctgcagctggaagcgcgtattcgccagccgctgtcgcctgagcaatctctgccggcggtcggccagggcgcggtcggcatcgaatgccgtcttgatgatgcatggacccgggggctgttagcgcctctcaaccatacggaaacggcggtgcgcgtgcgcgccgagcgggcgatgaacacccgcctcgaaggcggctgccaggtgccgatcggcagctatgcggaactgaaggacggggaactgtggctgcgggcgctggttggcgctccggatggttcacagctggtgcgcggcgaacgacgcgggccagcggaacaagcggaagccctcggcatctcgctggcggaagagcttctggataatggcgcccgcgagattctcgcggcggtttatgatggagaagccccgcgatga

SEQ ID NO: 139305 - DNA, 741 bp, Enterobacter cloacae
atgagcatcctggtcactcgtccactaccgcaaggagaagcgctggtcagccgtctgcgggccatgggacgcgtggcctggagctttccgctgatagaatttacgcccggcagggagcttcccgcgctgggcgatgcgcttgcccgactgggacccgacgatctgctatttgcgctatcccagcatgcggtggaattcgcccatgcccgtctgcagcagcagggcctgccctggcccacttctccgcgctattttgccattggccgcacgacggcgctggccctccatacggtcagtgggcagcatatccattacccgttagatcgggaaattagcgaagtcttgctacaattacctgaattacaaaacattgccgggaaaaatgcgctgatcctacgcggcaatggcgggcgggaactcttaggcgcgacgctgaccgagcgcggcgccagggtcacattttgtgaatgttatcaacgtagtgcaaaacattacgatggcgcagaagaagcgatgcgctggcaatctcgcggagtcaccacgctggtggtcaccagcggcgagatgctgcagcagctatggtcgttaataccgcaatggtatcgcgaacagtggctcctgcactgccgcgttgtcgttgtcagcgaacgtctggcccttcaggcccgggaactgggatggcaggagattcaggttgccgatagcgccgacaacgatgcgctgctacgcgcattacaataa

SEQ ID NO: 139306 - DNA, 513 bp, Enterobacter cloacae
atggcaacacgtggcgtcaataaagtcattcttgtcggttatctcggacaagatcccgaagttcgttatctgccttccggtggcgcagtggctaatttcaccctggccacgtcagaaacatggcgtgacaaacaggatggacaaatgcgcgaaaacactgaatggcaccgtgttgttgtgtttggaaaactggccgaagtggccggggaatatctgcgtaaaggtgctcaggtctatatcgaaggtcagttacgtagccgcaagtggactgatcaatccggtctggagaagtacgttacagaagttgtggttaacgttgggggcaccatgcagatgctgggcggccgccgtgaaagtcagcctcaatctgatccgcaaacgccacctcctgccacctccgatgcagcgaaaggaaaaggtaaggctgcaggtaaaaaatctaacactgctccgcagcaaccaccttcgcagcctgatccggctcacgattttgacgatgagatccccttttga

SEQ ID NO: 139307 - DNA, 243 bp, Enterobacter cloacae
atgacagacaacacgaacacattacttaagtgcctcgccgatggctcgttcacacgcgaacaagccacagcggtggcagaacagtttcagaatgtcaccattgaagacgatcagggtacgcatttccgactggttgttcgtcgagacggtgaaatgatttggcgggggtggaattttgaaaaaggggccgcctactggctcaaccgctacatcgaattctatggcatccgtaaaacgaagtaa

SEQ ID NO: 139308 - DNA, 2010 bp, Enterobacter cloacae
atgtccgtgaccgagtctaaagcaaaaacatctggcaaaaccagcaaaaaaaacgtcaaacctgccgaagcagcagctctgaaagaggcgcttgaagcagcacagattgaactggtgccgctgtctgcgctgattaaatcgccactgaacgttcgcactatcccgtacccggttgagagtgtccgggaactagctgaatccattgagaccattggtctgattcagaatctggttgtgcatactctcccggaaggtatgtcaggggtggctgcaggtggtcggcgtcttgcagccctgcagttattactcagtgaaaaccgcatcgatgccgggtatcaggtgatcgttaagcgggttagtgacgaactcgcggttgtggcctcaatggtggaaaacaaccagcgtgtggccatgcatccggcagaacaaattgccggattccgcaaactctccgaacaagggaaaagccctgcgcagattggtgaccagttggggtatggaagtcgccacgttcagcgcatgctgaaactggctcatctcgccccggaaatcctcgaactgctggcaaacaatacccttgatgtggagcagtgccaggcactgagtctggaaagtgatcaggcgcgtcaggtgcaggtatatgaacaggtgaaagctgcttacagcacggtttcggcacatctcatcaagcgggtaattacggaaacggaaatttccgttacacatcctcgctttgtcttcattggtcgggaaacctacgaagcagcaggtggtgtggttcgtgaagatttatttagccaggaggagaatgacggtactgcagatcgtgtgctcatagaccgtctggttatggaaaaactggagactgctgcactggcaattgaactgaacgaaggctggtcatggtcaatagggcgggaaaacccactgcagaactatggtgaagatcgtgaaaattaccttctgcttcctgtgccagaaccgcagtacacgccggacgaacagcaacgactcgacgagttgtacgctacacaggcggcaacggaaacctacgaggatgaagccgctattcaggttctgatcgacgaaatagaaagtcaggcggcacaccgtcaatggactgacgaacagaaggcaagctgtggcgtagtagcctgtctccataatggtgagctttgcattgtgcgcgggattcagaaaaaggttaaaacgaccggggaggcggatgccgctgcgcaggcgaccagccgtgacctgcatgtgatcgaccgtaaagagccggatgccgcagaagggatcagtctgcccttactcacaaaaatgtcttccgaacgcacactggctgttcaggctgccctggtacaacagccacagaaagctgtagccctgatggtctggcggctgtgctcctgcgtatttgaatactgccttaccactcgtcacccctttgtaatgcggatggatgttcatcacagcgggttggtcagcgaagccccgaccggaaaagacggtctggcgtggcaaactcttatgcaggagaaaaaccgtctggaaggcctgttaccgcaaggctggaagaaggacttttccacatttttcacactggatggtcagaccttgatggctctgatggctttctgcacggcctgttccgtggatggggttcagacccgtgagcatgggcataccagccgtagcaaccttgatgaggtggagacggcgatcggcttcaatttgcgtgactggtggcagcccactgctgaaaacttcctcggcctgctcagtaaaaaccagatagtggaggcgttacaggaggctgggctggattcagtcgccgtcgaagcggcgaagctgaaaaagggagatgcggcgatccttgcagagcgttctctgtcagatacccgctgggtaccaggctggatgcagccacgggatacggaaaaatcgggttcgacaacgacgcccgagcccgatgctgacaacgaagacaacacggcttgcgccgcctga

SEQ ID NO: 139309 - DNA, 357 bp, Enterobacter cloacae
atgaaaactgtgctgaatcttgatgttctgaaaaccatgtctaccgaagaactggaagactatcgtaacgccggtgaggattttcgtcgtgaactgagccatgcagtcatgcgcgatttaacggtaccggatggctgggtagtaaatgcagaataccgggccgaatttggggggttctttcctgtccagctccggtttagcccgtctcatgaccatttcgatgtagcagtatgcagtccgggtgatctcagtcctgtgtggataatcgtctttattacccgtggaggccagcctttctctgtcgtttgctcgatggccagatataacccggaacggattaaccatgcgctgtcctga

SEQ ID NO: 139310 - DNA, 294 bp, Enterobacter cloacae
atgtttctcctgatcgaggcgcttcaccttctcatagccctgttgggcattcttccacgccgggtcgttttcatctttgaagaagaaggcgccattgccggtatattccgggtagatatccagctcgccggcgacaatcgccccgcgcaccaccggcgtggtgccgagctggattttattaatcgtttttacgccgtggctttccagcacctgctggatcatattgcccagcagcgcgccttcggtatcaattttcgagccgaccttcaccggctccgccgcctgcagcggtaa

SEQ ID NO: 139311 - DNA, 492 bp, Enterobacter cloacae
gtggggcagatcccaacctactacagccacctgaataccggccggccgtataatccggagaagccgaacaagtacacctcgcgttacttcgatgaagccaatggcccgctgtatccgtttggttacggcctgagctacaccacctttagcgtctccgatgtcaacatgtcgtcggccaccatgccgcgcgatggcagcgtgaccgccagcgtgcaggtgaccaacaccggcaatcgcgaaggggcgacggtgatccagctctacctgcaggacgtcaccgcctccatgagccggccggtgaaaatgctgcgcggctttaaaaaggtcaccctcaaaccgggcgaaacgcaaaccgttagcttcccaatcgacgtcgacgcgctgaagttctggaatcagcaaatgaaatacgttgctgagccgggcaaattcaatgtctttatcggcgtggactccgcccgcgtgaagcagagcgagtttgagctgctgtaa

SEQ ID NO: 139312 - DNA, 1911 bp, Enterobacter cloacae
  misc_feature (1689)..(1698): n is a, c, g, or t
atgaaatggctctgcactgtaggcgtcgccgtgagtctggcgctgcaacccgcgctggcggatgaactgtttggtaaccaccccctgaccccgcaggcgcgggatgcctttgtcaccgacctgctgaaaaaaatgacggtggacgagaaaatcggccagctgcgtctgataagcgttggcccggataacccgaaagaggcgatccgtgaaatgatcaagaacggtcaggtgggggcgatttttaacaccgttacccgcccggatatccgtgtgatgcaggatcaggtgatgcagcttagtcgcctgaagatcccgctgttctttgcctacgatgtgctgcacggtcagcgcaccgtgtttccgataagcctcggcctggcctcgtcgtttaaccttgatgcggtgaagaccgtgggccgcgtgtcagcttatgaagccgccgatgacggcttgaacatgacctgggcgccgatggtcgacgtctcccgcgacccgcgctggggacgcgcttccgaagggttcggggaagacacctatctgaccacgatgatgggccaggcgatggtggagtcgatgcagggcaagagcccggcggaccgctattcggtgatgaccagcgtcaagcatttcgccgcctacggcgcggtagagggcgggaaagagtacaacacggtcgacatgagcccgcagcgcctgttcaacgactatatgccgccgtataaagccgggcttgatgccggcagcggcgcggtgatggtagccctgaactcgctgaacggcaccccggcgacctctgattcctggctgctgaaagacgtcctgcgcgaccagtggggctttaaaggcatcaccgtttccgaccacggcgccatcaaagagttgattaagcacggcgtggcctccgacccggaagacgcggtgcgcgtagcgctgaagtccggcatcaacatgagcatgagcgacgagtattacagcaagtacctgccggggctggtgaagtccggcaaggtgaccatggccgagctggatgatgccacccgacacgtgctcaacgtgaaatatgatatgggactgttcaacgatccctacagccacctgggaccgaaagattctgacccgcaggacaccaatgcggaaagtcgtctgcatcgtaaagaggcgcgcgaagtggctcgcgagagcctggtgctgctgaagaaccgtcttgatacgctgccgctgaaaaaatccggcactatcgcggtggtgggcgcgctggcggacagcaagcgcgacatgatgggcagctggtccgcggccggggtggccgaccagtcggtgacagtcctgaccggcatcaaagaagcgctgggcgataacggcaaagtgatttacgccaaaggggcgaacgttaccgatgacaaaggcattgtcgatttcctcaatttgtatgagaacgcggtgcaggttgacccacgctcgccgcaggaaatgatcgacgaagcggtcgcggcggcgaagcaatccgatgtggtggtcgccgtggtgggcgaggcgcagggcatggcgcatgaggcctccagccggaccgatatcaccctgccgcagagccagcgcaatctgattgccgctcttaaagccaccggcaaaccgctggtgctggtgctgatgaacgggcgtccgctggcgctggtgaaagaggatcagcannnnnnnnnngatgaacgggcgtccgctggcgctggtgaaagaggatcagcaagccgatgcgctgctggagacctggtttgctggcaccgaaggcggccacgccatcgccgacgtgctgtttggcgactacaacccgtcgggcaagctgccgatgtctttcccgcgctcggtggggcagatcccaacctactacagccacctgaataccggccggccgtataa

SEQ ID NO: 139313 - DNA, 321 bp, Enterobacter cloacae
atgcagtttgtccaggcgcagggtgctgataatcacgatctcgcgatcgtaatcattgccgttgggggtcgaaccttcggtcaggccggtgttggccgcctgcatcagaattattttatcggcgtctacgcaggcgttgagcacgcgccagagctccagcagggtaccgggaaagacaaccgccagggcctcgccctgaccggagcggaagcccttgcggtagcgctgggtttttgccgggtcggtcagcagatgcgaagggccaaccaggcgcgccaggtcagccagaaacgttttatgggtgtcagtgggtgcagatga

SEQ ID NO: 139314 - DNA, 807 bp, Enterobacter cloacae
atggcgcaggacgcgtcggtacacgacaaaccggcagtgcgcggcagcattatcgccaacctgctccaggaccatgataatcctttcctgctctacccttatgagagcaactatctgctctatacgtggaccagcgacctcaataaagaggcgatccgcagctatgactgggccgaaaatgcccgtaaagatgaagtgaagtttcagctaagcctggcgttcccgctgtggcgcggtatcctgggcgataattcgctgctgggcgcgtcctatacccagaaatcctggtggcagctctctaacagcaaagagtcggcgccgtttcgcgaaaccaattatgaaccccagctgtttttgggctttgcgaccgactaccagtttgccggctggacgctgcgcgatatcgagatggggtataaccacgactcgaatgggcgttccgaccccacctcgcgcagctggaatcggctttatgcccgcctgatagcgcaaaacggtaactggctggtggaagtgaagccctggtatgtggtgggcaacaccgatgataacccggatatcaccaaatatatgggctattaccggctgaaggtgggctaccagctgggagaggcgatcctcagcgcgcaggggcaatacaactggaacaccggctacggcggggcggaacttggcgtgagctatcccattaccaaacatgttcgcgcctatacgcagatctacagcggctatggcgagtcgcttatcgactataactttaaccaaacgcgcgtcggcgtcgggctaatgctcaacgatctgttttaa

SEQ ID NO: 139315 - DNA, 432 bp, Enterobacter cloacae
atgcagttccacgcgggcaaccgccactttattgccggcgcgcagcagggtgctggtggcggtaaaacgttcgccgcggcccggacgcaggtagtccacgcgcaggtcgatggttcccatacgggaaagccgttggcgcaactcttcttcgttgatggtgtcatggcgggtaagggtactgccgacgcagaccaggccagcggcaacgtccagcgcggaggcgatcaccccgccatgcagaatgctttgcgcccagttgcctaccatcatcggctgattattaaagctaagctgggcaaacgctttttcgtagcgttcgagttcgagaccgagggcgcggttaaacggcatgtgatagacgaaaatctcccctaccagtttcagggctgcttcggcagtaagttcagacataacaccggttccattcgttaa

SEQ ID NO: 139316 - DNA, 894 bp, Enterobacter cloacae
atggatgcgaaacagacgcggttggggatcattctggccctcgccgcctactttatctggggtatcgcgccagcgtacttcaaacttatctactatgttcccgccgatgaaattctgacccatcgcgtgatctggtctttcttcttcatggtggcgctcatcagcgtcagccgccagtggccacaggtgaaaaagctgctgaaaacgccgcgcaagatcttcctgctggcgctctcggcagtgctggtcggcggtaactggctgttgttcatctgggcggtgaataaccaccatatgctggaagccagcctcggctactttatcaacccgctggtgaatattttgttggggatgattttcctcggcgaacgcttccgtcgtctgcagtggctggcggtgctcctcgccttttgcggcgtgctggtccagctgtggacctttggttcgctgccgataatcggtcttgggctggctttcagttttgccttttacggcctggtgcgaaagaaaattgctgtcgatgcgcaaaccggcatgctggtggaaacgctgtggctgctgccggtggcggcaatctggttgttcggcatcaccgacagcccgaccagccatatgggcgagaacccctggtcgctcaatctgctgctgatggccgcgggcgtggtgaccaccatccctttgctgtgctttaccggggcggcaacgcgtctgcggctctccacgctgggctttttccagtacatcggtccaacgctgatgttcctgctggcggtgacgttctacggcgaagtgccgggcaaggataaaatggtgacctttggctttatctgggtcgcgctggcggtgtttatcgtcgatgcgctgtatacccagcgccggttgcgcagaggctaa

SEQ ID NO: 139317 - DNA, 951 bp, Enterobacter cloacae
atgctgagcgcatttcaactggaaaacaatcgtttaacgcgcctggaagccgatgagatcaaacacctcgccagctcggtgtgggtcgatctggtcgagcctgacgacgatgagcgaagccgcgtgcagacggaactgggtcaaaacctggcgacgcgcccggaactggaagatatcgaagcctccgcgcgtttctttgaagatgaagacgggttacacatccactcgttcttcttttttgaagatgccgacgatcacgccggcaactctaccgtggcgtttaccatccgcgaaggccgcctgttcacgctgcgcgagcgcgaactacccgctttccgcctctaccgtatgcgcgtgcgtaaccagacgctggtcgacggcaacgcctacgaactgctgctcgacctgttcgagaccaaaatcgagcagctggcggatgaaattgaaaacatctacagcgacctggaaaagctgagccgcgtcattatggaaggccatcagggcgacgagtacgacgaagcgctgtcgacgctggcggaactggaagatatcggctggaaggtgcgactctgtctgatggatacccagcgcgcgctgaacttcctcgtgcgcaaggcgcgcctgccggcgggccagctggagcaggcgcgggagatcctgcgcgatatcgaatctctgctgccgcacaacgaatcgctgttccagaaggtgaacttcctgatgcaggcggcgatgggttttatcaatatcgagcagaaccgcatcatcaagatcttctcggtggtctcggtggtattcctgccgccaactctggtggcctccagttacgggatgaactttgaatttatgccggaactacactggagctttggttatccgggagccatcgtgtttatgatgttggccggcctggcgccgtatctctacttcaagcgcaaaaactggctgtaa

SEQ ID NO: 139318 - DNA, 402 bp, Enterobacter cloacae
atgaacgtcgccgcgcatcatggcgcccagcttaacggtgaagtgctgatcaacagtatccagcaggccggctttaagtttggtgaaatgaatattttccaccgccacctaagtccggacggcagcggtccggtgttgttcagtctggccaacatggtgaaaccgggaaccttcaatccggacagcatggcggatatgatgacccctggggtgactatctttatgcaggtcccttcctacggcgatgaattgcagaacttcaagctgatgctgcagtctgcgcagtatatcgctgacgaagtgggcggcgtggtgcttgacgatcagcgtcgcatgatgacgccgcaaaaactgcgtgaataccaggatcgtattcgcgaagtgaaagacgcgaacgcctga

SEQ ID NO: 139319 - DNA, 2016 bp, Enterobacter cloacae
atggaaccaatcgaacaacaactgactgaactgcgaaccacgcttcgccatcatgaatatctgtaccacgttatggacgcgccggaagtgccggatgcggaatatgaccgcctgatgcgcaagctgcgcgagctggagagccagcacccggagctgattaccccggattcgccaacacagagggtgggggcggcgccactcaccgcctttagccagatccgccatgaagtgccgatgctgtcgctggataacgtgtttgacgaagagagctttctcgccttcaacaagcgggtacaggatcgcctgaaaagcacagatcatcttacctactgctgcgagcttaagctcgacggcctcgcggtgagcattctctatgaaaacggcgtgttggtgcaggcggcaacccgcggcgacggcaccaccggcgaagatattacctctaacgtgcgaactattcgcgccatccccctcaagctgcatggcgagaatattcctgcacgccttgaggtacgtggggaagtgttcctcccgcaggccgggtttgaaaaaatcaatgaggaagctcgccgcaccggcgggaaagtgtttgctaacccgcgtaatgcggctgcgggttcgttgcgccagctcgatccgcgcatcactgcgaagcgaccgcttactttcttctgctacggcgtgggcgtgctggagggcggcgagctgccggccagccactcggctcggttgctgcagttcaaagcatgggggctgccggtgagcgatcgcgtcaccctgtgccacacccccgaggaagtgcttacttactatcgtaaagtcgaggaagagcgtccccacctgggctttgacattgatggcgtggtgatcaaagtcgattcgctggcgctgcaggaacagctgggtttcgtcgcccgcgcgccgcgctgggccgtggcctttaagttcccggcacaggagcagatgaccttcgtccgggacgtggagttccaggtgggccgcaccggggcgattacgccggtggcgcgtctggagccggtccatgttgccggcgtgttggtgagcaatgccaccctgcataatgccgatgaaattgaacgtttaggcttgaaaatcggcgacaaggtggtgattcgccgggcaggcgatgtgatcccgcaggtggttaacgtggtgctttccgagcgtccggcggatgcccgggatgtcgtcttcccgacccactgtcctgtatgtcagtcagacgttgaacgggtggaaggcgaggcggtagcccgctgtacgggcggtctgatctgcggcgcgcagcgcaaagagtcgctcaagcacttcgtctcccgtcgcgcgctcgacgttgacggcatgggcgacaagatcatcgaccagctggtggagaaagagtacgtccataccccggcggatctgttccggctgacggcggggaaactgaccgggctggatcggatggggccgaagtccgcgcaaaacgtagtcaacgccctcgagaaagccaaagagacgaccttcgcacgcttcctctacgccttaggtattcgcgaggtaggagaagcgacggcggcgggcctggcggcgcatttcggcactctcgaagccctggagcaggcttccattgaggagctacagaaagtccctgatgtcggcatcgtcgtcgctacccataccttcaacttctttgccgaagagagcaaccgcgatgtcattgcgcaactgctggcggagggggttcgctggccagcgccggtggtggtgaaggcggaagagattgatagcccgtttgcaggcaaaaccgtggtcctgaccggcagcctcagccagctgtcgcgcgatgacgccaaagcgcgtctggtggcgctgggggcgaaggtggcaggcagcgtgtcgaagaaaaccgacctggtgattgccggcgaagcggcgggttctaagctggcgaaagcgcaggagctgggcatcgaggtgattgacgaagccgaaatgatgcgtctgctgggagaataa

SEQ ID NO: 139320 - DNA, 219 bp, Enterobacter cloacae
gtggataaagcgcagctggtcgagatagccaataccgaaatgccgttcggtaaatacaagggacgtcgcttaatcgatgtcccggaagagtatttattgtggttcgcgcgtaaggatcaattccctgccgggcatcttggcgagctgatggcgttgaccctgctgattaaaactgaggggctgagcgatctggtccagcccctgaagaaagcgcgttag

SEQ ID NO: 139321 - DNA, 999 bp, Enterobacter cloacae
atgaaacttttccgtattctcgatccgtttacggcaacgctaatcaccgttgtcctgctggcctcattcttcccggcccgtggcgctttcgtccctttctttgaacatctgaccaccgccgccatcgcgctgctgttctttatgcatggcgctaaactctcccgggaggcgattatcgccggcggcagccactggcgtttgcatctctgggtgatgtgcagcacctttattctcttcccgctactcggggttctgtttgcctggtgggcgccggtgaatgtcgatccgatgctctacagcggctttatctatctgtgcattctgccggccaccgtgcaatccgctatcgcctttacttcgctggccgggggcaacgtcgcggctgcggtttgctcagcctcggcctccagcctgctggggatctttgtttccccgctactggtgggggtcctgatgaaccttcacggcgcaggcggcagtctggagcaggtcggtaaaattatgctgcagctgctgctgcctttcgtgctcggtcacttatcgcggccgtggattggcgactgggtggcgaagcataagaagtggattggtaagaccgaccagacctcgattctgttggtggtttactccgcctttagcgaggcggtggtgaatggcatctggcataaagtcggtctgggatcgctgctgtttatcgtggtggtcagcctggtgctgctggccatcgtcatcgcggtcaacgtctttgtcgcccgccgctgcggctttaacaaagccgatgagattaccatcgtcttctgcggttcgaaaaagagcctggccaacggcattccgatggccaatattctcttcccgacctccatcctcggcatcatggtgctgccgttgatgatcttccaccaaatccagctgatggtctgcgcggtgctggcgcggcgctacaagcagcaaaccgatgcgcgtctcgctgaggaaaaggccaacgcggccaaagcctaa

SEQ ID NO: 139322 - DNA, 930 bp, Enterobacter cloacae
atgacgcaattcgcatttgtgttcccggggcagggctctcaggccgtaggcatgctggccgaaatggctgccgcctggccggtcattgaagagaccttcggtgaagcttccgcagcgttgggttacgatctgtgggcgctgacgcaacagggcccggcagaagaactgaataagacctggcagactcaaccggcgctgctcgccgcctccgtggcgctataccgcgtctggcaacagcagggcggcaaagcgccaacgctgctggcgggtcacagcctcggcgaatactccgcgctggtatgcgcgggcgttatcggtttcgctgatgccgttcgcctggttgagctgcgtggtaaattcatgcaggaagccgtaccggaaggtaccggcgccatgtccgcgattatcggtctggacgacgccgctatcgccaaagcctgtgaagaatctgccgaagggcaggtggtctctccggtgaactacaattctccgggccaggtggttatcgccgggcacaaagaggccgttgaacgcgctggcgccgcctgtaaagccgccggcgccaaacgcgcgctgccgctgccggtgagcgtgccgtcccactgcgcgctgatgaagccagccgcagaaaaactggcggtagagctgcagaaaatcaccttcaacgcgccgacgattccggtggtgaataacgtcgacgtgaagtgcgaaaccgcgccggacgccattcgcgacgcgctggtgcgccagctgtacagcccggtgcagtggaccaaaaccgttgagtttatggctaccgagggcgtatcgcacctgtatgaggttggcccgggtaaagtcctcaccggcctgaccaaacgtattgttgacaccctgaccgcttccgcgcttaacgagccggcggcgatgtctgcggcgcttgagcaataa

SEQ ID NO: 139323 - DNA, 810 bp, Enterobacter cloacae
  misc_feature (530)..(554): n is a, c, g, or t
atgtatacgaagattattggtaccggcagctatctgcccgagcaagtgcgtacaaacgccgacctggaaaaaatggtagaaacctctgacgagtggattgtcacccgcacaggtatccgtgagcgtcgtattgccgcagcgcatgaaacagttgctacgatgggctttgaagccgcaaagcaggcgctggcgatggcgggcgtgtccgcggagcaaattggtctgattatcgttgcgaccacctccggcacgcacgcgtttccgagttctgcatgccagatccagtcaatgctgggcgttaagggttgcccggcgtttgatgtcgccgccgcctgcgccggtttcacctatgcgctaagcgtcgccgatcagtatgtgaagaacggcgcggtagattatgcgctggttgttggcgccgatgtgctggcgcgcacctgcgatccggcggatcgcggaacgattattattttcggagacggcgccggcgcggttgtactgggcgcctccgaagagccgggcattatctcgannnnnnnnnnnnnnnnnnnnnnnnntgaacgttcagcgctggactggctggtgccgcatcaggctaacctgcgtattatcagcgcgacggcgaagaaactgggtatgtcgatggataacgtcgttgtgaccctcgaccgccatggcaacacctccgcggcgtcagtcccttgcgcgctggatgaggccgtccgcgatggccgtattcagcgcggtcagctgattttgctggaagcctttggtggcggtttcacctggggttccgcgctggttcgtttttag

SEQ ID NO: 139324 - DNA, 1200 bp, Enterobacter cloacae
  misc_feature (265)..(274): n is a, c, g, or t
atgaagcttagtgaggactccccgggcaactggggaatcaccgaaccgggcagcgacgataccttgacacgtctaaccctggcgttagatgtcatggggggcgatttcggcccatccgtgacggtgcctgcagcactgcaggcactgaactctaattcgcaactcacacttcttttagtcggcgatcccgacgccatcacgccattactcgccaaagctgacttcgaacaacgttcgcgtctgcagattattcctgcgcagtcannnnnnnnnncgcgtctgcagattattcctgcgcagtcagttattgccagtgatgcgcgacccgcgcaggctatccgcagcagtcgcggaagctcaatgcgcgtggcgctggagcttgtgaaagaagggcgggcgcaagcctgcgtcagcgctggcaacaccggcgcgctgatggggctggcgaaactgctgctcaaaccgatcgaaggtattgagcggccggcgctggtgacggttttaccgcaccagcagaagggcaaaaccgtggtgctggatctcggcgccaacgtcgattgcgacagcacgatgctggtgcagttcgcggtaatgggcgcggtgctggcggaagaagtggtcggcattgccaacccccgcgtcgctttgttgaacatcggcgaagaagagatgaaaggcctcggcagcatccgcgatgctgccgcagtgctcaaaacgctgccttccctcaactacatcggctatcttgaagccaatgaactgttgaccggaaaaaccgatgtgctggtttgtgatggattcacgggcaacgtcacattaaaaaccatggaaggtgttgtcagaatgttcctttcactgctgaaatctcagggagagggcaaaaaacggtcgtggtggctgctgttactaaaacgttggttacaaaaaagcctggcgaggcgattcagtcacctcaaccccgaccagtataatggcgcctgtctgttaggattgcgcggttccgtgatcaagagtcatggtgctgccaatcaacgcgcctttagcgtcgcgatagagcaggcagtgcaggcggtgcagcggcagatccctcagcggatcgccgcgcgcctggaatctttatacccagctggtttcgagctgccggaaagcgacagtgacgtgaacgcccgacagcaaagcgggacgaatggccacgattga

SEQ ID NO: 139325 - DNA, 633 bp, Enterobacter cloacae
atgaaaggtaccatcttcgccgttgcgctcaatcatcgcagccagctcgacgcctggcgcgaggcgtttcaacaggccccctacaagacgccgccgaaaaccgcggtctggtttatcaagccgcgcaataccgtaattggcgatggcgaagcgatcccgtatccgcagggcgagaccgtacaaagcggcgcaacggtggcgctgattgtcggcaaaaccgcgcgtaaagtggcggcggaagaggcggcgaactatatcgctggctacgcgctggctaacgatgtgagtctgccggaagagagtttttatcgcccggcgatcaaagccaagtgccgcgatggcttctgccccatcggcacgctatcggcggtacgcaacgtcgacgatctgaccatcatcaccgaaatcaacggccgcgaggcggatagctggcataccggcgatctgcagcgtaatgccgcgcagctgctgagcgccttaagcgaattcgccaccctcaatcccggcgacgcgatccttatcggcacgccccactcccgcgtcacgctgcgccccggcgaccgggtacgtattctcgccgacggtttcccggcgctcgaaaacccggttgtcgcagaaggagagctggcatga

SEQ ID NO: 139326 - DNA, 765 bp, Enterobacter cloacae
atgaaacaggcacgcattgaatggcaaggacaggtacgcgacgtgctggtcaatgaacgcgaccaggtgcgcctggacgatggcacggtattaaaagaaggtgaattccgctggctgccgcccgccgacggcacgctgttcgcgctggggctgaattacgccgatcacgccagcgagctggaatttaaaccgccaaccgagccgttggtgtttatcaaagcgccgaacacctttactggccaccagcagcagtcggtacgcccggataacgtcgaatacatgcactacgaagccgaactggtggtggtgattgggaaaaccgcgcgccgcgtcagcgaagccgaggctatggattatgtcgccggctataccgtgtgcaatgactacgcgatccgcgactatctggaaaactactaccgcccgaacctgcgggtgaaaagccgcgacaccctgacgccgatcggcccgtggatcgtcagcaaagaggcgatcccggatccgcataacctggccctgcgcacctgggtcaacggcgagctgcgccagcagggcaccaccgccgatctgatcttcagcatcccgttcctcatcgcttatttaagcgaatttatgaccctgcaaccgggcgacatgatcgccaccggtacgccgaaagggctatccgatgtggtgccgggcgacgaggtgatcgttgaagtcgagggcgtgggccgcctggtcaaccatatcatcagccagcaagcgtatgaggagacactgtcatga

SEQ ID NO: 139327 - DNA, 1467 bp, Enterobacter cloacae
atgaaaaagattaaccattggatcaacggtaaaaacgttgccggcgcagactattttcataccaccaacccggccaccggcgaggtactggcggaagtcgcctccggcggtgaagccgaaataaaccaggcggtggcggcggcgaaagaggccttcccgaagtgggctaacctgccgatgaaagagcgcgcgcgcctgatgcgccgcctgggggatctgatcgatcagaacgtcccggagatcgcggcgatggaaaccgccgataccggcctgccgatccaccagaccaaaaacgtgttgatcccgcgcgcctcacacaatttcgaatttttcgccgaagtatgccagcagatgaacggcaagacctatccggtcgacgacaagatgctgaactacaccctcgtgcagccggttggcgtctgcgcgctggtgtcgccgtggaacgtgccgtttatgaccgccacctggaaggtggcgccgtgcctggcgctggggaataccgcggtgctgaaaatgtccgaactgtcgccgctgaccgccgatcgtctgggcgagctggcgctggaagccgggatcccggctggcgtactcaatgtggtgcagggctacggcgccaccgccggcgacgcgctggtgcgccatcatgatgtgcgcgccgtctccttcaccggcggcaccgccaccggccgcaacatcatgaaaaacgccggtctgaaaaagtactccatggagctgggcggaaaatcgccggtgctgatttttgaagatgccgatatcgagcgcgcgcttgacgccgcgctgttcaccatcttctcgatcaacggcgaacgctgcaccgccggctcgcgcatctttattcagcagagtatctaccccgagttcgttaaacgcttcgccgagcgcgccaatcgcctgcgcgtaggcgatccgaccgatccgaacacccagatcggcgcgctgattagccagcagcactgggagaaagtgtccagctacattcgcctcggcatcgaagagggggccaccctgctggccggcggcgcggataaaccgtccgacctgccggcgcatctgaaagccggcaacttcctgcgcccgacggtgctggcggatgtcgacaaccgtatgcgcgtcgcccaggaagagatttttggcccggtcgcctgcctgctgccgttcaaagacgaagcggaagggctgcgcctggcgaacgatgtggaatacggcctggcgtcgtatatctggacccaggacgtcagcaaagtgctgcgtctggcgcgcggtattgaagccgggatggtgttcgtcaacacccagaacgtgcgcgacctgcgtcagccgttcggcggcgtgaaggcctccggcaccggccgcgaaggcggcgagtacagctttgaagtgttcgccgaaatgaaaaacgtctgcatctcgatgggcgaccatccgatcccgaaatggggagtctga

SEQ ID NO: 139328 - DNA, 603 bp, Enterobacter cloacae
atggtcaaattcgcgggtgtagctgttcatcccctcttcggcgcgctggtcgtcgataaagcggtgcgacagcgaaccgctggccagcaccgccacggtgccgtcgtatttttcaatggctttgaggatcgcttcgcccagcctgcggctgtcggcaaagtcgtgaacggtacagaaagcggagatagataccaccttgaagtgcttatcgctgttcatgtagcgcatcggcaccagggtgccgtactccagcttcaggctgggaatattgtgcgctttggcacgcaccccgagcttcaccgcctcgtcggcgataagctggcccagctccgggttgccgtcgtagtcgtaggtcatgtcgcgaatgaaatgcggcagttcgttactggtgtagacgccctgaaaatggtcggcgcagttgatgtggtaggcgctgttgaccagccagtgggtatcaaacacgataatggtatcgacgcccatttcacggcagcgcttgccaatttctttatgcccgtcgatcgcgccctgacggcagccgtggtttttccccggcagctcagacagatacatcgacggcacgtgagtgatttttgctgctaa

SEQ ID NO: 139329 - DNA, 3108 bp, Enterobacter cloacae
atgcaaattagcgataccggccgcagccacactcctgactttcacgccgtcctcgcccgtgaagactggcagaaccagagcattacccaccttaaccgcctgccagcgcatcccgttttcgccagctggcgcgatgagcttgccgcccgcgataacctaccttcatcccgccgccgtcaactggacggcgagtggcagttctcttacgcccgcagcccgtttgccgtcgatgcacagtggttgacgcaggatcttccggactgccgcggcacgcctgttccttccaactggcagatggagggctatgacgcgccgatctacaccaacgtccgctatcccatcgacaccaccccaccgcgggtgccggaggataacccgaccggctgctactccctgcactttacggttgaggacacatggcgcgagaacgggcaaacgcagattattttcgatggcgtcaactcggcgtttcatctgtggtgcaatggcgtgtgggtcggctattcgcaggacagtcgcctgccggcggcgttcgatctcagccccttcctgcgtccgggcgacaaccgcctgtgcgtgatggtcatgcgctggagcgccggcagctggctggaagaccaggatatgtggcggatgagcggcattttccgctcggtatggctgctgaataagccgcagcaacggctatgcgacgtgcagttgacgccagcccttgacgccctctatcgcgacggcactctgcaggtccaggcgaccgtcgaagcgactgaggcggcgcttgccgggctcagcgtcggggttagcctgtggcgcggcgaggagcagatcgccgccgggcggcagccgttaggtaccccgacggtggatgagcgcggccactacgcggaacgggtcgatttctccctggcggtggcgacgccggcgcactggagcgcggaaaccccgaactgttatcgcgccgtggtcaccctgtggcgcggcgacgaactgctggaggccgaagcgtgggacatcggttttcgccgcatcgagattgccgatggcctgctgcgtctcaacggtaaaccgctgctgatccgcggcgttaaccgccatgagcatcatcatttgcgcgggcaggtggtcaccgaggcggatatggtgcaggacattctgttgatgaagcagaacaactttaacgccgtgcgctgctcgcactatcccaacgcgccgcgctggtatgaactctgcaaccgctacggtctgtacgtggtcgatgaagccaatattgaaacccacgggatggtgccgatgaatcggctgtccgacgatccggcgtggctgccagccttcagcgcccgcgtcacccggatggtacagagcaaccgcaaccatccgtgcattatcatctggtcgctgggcaacgagtccggcggcggcggcaaccacgaagcgctgtaccactggctgaaacgcaacgatccgagccgtccggtgcagtacgagggcggcggcgcggataccaccgccaccgatattatctgtccgatgtacgcccgcgtcgaacgcgaccagccgatcccggcggtacccaaatgggggatcaaaaaatggatcagcctgcccggtgagcagaggccgctgatcctttgcgagtacgcccacgcgatggtcaacagcctcggcaacttcgccgattactggcaggcctttcgcgagtatccgcgtctgcagggcgggtttatctgggactgggccgatcaggcgatccgcaaaacctttgccgacggcagcgtcggctgggcctatggcggcgactttggtgataagcctaacgatcgccagttctgtatgaacggtctggtgtttcccgatcgcacgccgcatccgtcgctggtggaggcgaagcacgcccagcagtattttcagttcacgctgctgtcgacctcgccgctgcgggtgcgcatcatcagcgaatacctgttccgcccaaccgataacgaagtgctgcgctggcaggtgcaggcggccggtgaacccctgtatcacggcgacctgaccctggcgctgccccctgagggcagcgacgagataacgctgctcgatagcctgatcctgcctgaaggcgcccgcgcggtgtggctgacgctggaggtgacccagccccaggcgaccgcctggtcagaagcggagcaccgcgtcgcctggcaacagtttcccctgcccgccccgctggcgctgccggcgcccaccgtttctgccggcgctccggatcttatcgtcagcgacgaggtctggcagatccgcgccggttcgcaatgctggatcatcgatcgccggacgggtctgctgagccgctggtcggttggcggtcaggagcagctgttgacccccctgcgtgaccagtttattcgcgcgccgctcgacaacgacatcggggtcagcgaagtagagcgtatcgaccccaacgcctgggtggagcgctggagaagcgccggcctgtacgatcttgaggcgcactgcgtccagtgcgatgcgcagcgcctggcaaatgaaaccctcgtcgactgccgctggcactacctgcgcggcgaagaggtagtgattgtcagccactggcgcatgcacttcactgctgacggaaccctgcggttggcggtggacggcgaacgggcggaaaccctgccgccgctgccgcgggtcgggctgcacttccaggtggcggatcagcaggcgccggtgagctggctgggtctggggccgcatgagaactaccccgaccggcggagcagcgcctgcttcgcccgctgggagcagccgctggcggcgatgaccaccccctatatcttcccgacggaaaacggcctgcgctgtgatacccaggcgctggactgggggcgctggcacatcagcggtcatttccacttctccgttcagccatggagcacccgtcagctgatggagaccgaccactggcacaagatgcaggccgaagacggcgtgtggatcaccctcgacggcctgcatatgggggtgggaggcgatgactcctggacccccagcgtgctgccgcagtggctcctgagccaaacgcgctggcagtacgaggtctcattgcgttgcctttaa

SEQ ID NO: 139330 - DNA, 366 bp, Enterobacter cloacae
atgcggattgccgccatacaccagcgtcgcatcgctggcttgccccgctttaatcgcgccgctcagatagtccaccagcgctttgcccatcagattttccgggaaataacgccatgcctggccaccgtcattggtgctgatgcccgccagaatgcccagccagggatcgtccccctgcggttgcagatagcggaagccgccgcgggcgcgtacgcctgtcgcctgcacgtctatatcgcggccatcaagcataaaccctttgtcgtttttcacccaactgagcgtggcttcgccagcggctatctccagcggcgcgcggaagacgccggcatacggcatcagcgccttcgccatatgggcgcgtaa

SEQ ID NO: 139331 - DNA, 453 bp, Enterobacter cloacae
atgggagagatgcgccgtcaggttatccaccgacaaatgatggacttcgttatcgccctgccagctggcgcccccttttttcagccatacgtcgccgctggccacatcgcctttttcaatggtcatccagccttcgaggctgaagcgggcgcttttcagggcgatattgtcctgcatccagcgtcccagccacggtttgacgtcgatatcatccgcctgcagccagacccggcctttattcagcaggccatcctcatcgcgaagatccatccgcacctgcatgacgccatgctggccggtgaggctggagaggctgagctgcccctcggcgcgatgacggttcctgccgttaagccatgtcagctgcggaaccgccagctccgcccgctgaccggaaagggtcaggaagctcagatggctgtcgcgcagagtaaagtgatcgaactgacgtaa

SEQ ID NO: 139332 - DNA, 147 bp, Enterobacter cloacae
atggacctgcagctgccagaaggtgaggtcgcggaactgccagcgcatatgcagcaggctctgccagacatccagcgccagggttacgcgcttgaccgccattgtgccgccatctttcagcccgacatggatatcgcgggcgtctaa

SEQ ID NO: 139333 - DNA, 1314 bp, Enterobacter cloacae
atgcaggcggcttttgtagatattggtctggataaggcggcgttccttcacgcctccgatatcatgccgcataccgagtgcgtcgccggtgaggagcaaaagcagtttaccgtgcgcgatatttcggagctggtgcgccagggccaggacctgatggtccaggtggttaaagatccgctgggtaccaaaggcgcgcgtctgaccaccgatattaccctgccttcccgctatctggtctttatgccaggcgcctcccacgtgggggtctctcagcggattgaaagcgaagccgagcgcgagcgcctaaaaaaggtcgtcgcagaatattgcgatgagcagggcgggtttatcattcgcaccgctgcggaaggcgttcacgagcaggagatggccgccgatgccgcttatcttaagcgcgtatggaccaaggtgatggagcgcaaaaagcgcaaccagacccgctatcagctgtatggcgagctggctctggcccagcgcgtgctgcgtgattttgccgatgcgcaactggatcgcattcgcgtcgactcgcgcctgacctatgaggcgttgctcgaattcaccgccgaatatatcccggaaatgaccagcaagctggaacactacagcggtcgtcagccgatattcgatctctttgacgttgagaacgaaattcagcgcgcgctggagcgtaaagtcgagctcaaatcggggggctatctgatcatcgaccagaccgaggcgatgaccaccatcgatatcaacaccggggcctttgtcgggcaccgcaatcttgacgatacgatcttcaataccaacatcgaagccacccaggcgatagcccgccagctacgtttgcgtaatctcggcggcattatcatcattgatttcatagacatgaacaatgaagatcaccgtcgacgggtgttgcactctttagagcaggcgctgagtaaagatcgggtgaagaccagcattaacggcttctcccagctgggcctggtggagatgacccgtaaacgcacccgtgaaagcgtggagcatgtgctgtgcaacgagtgcccaacctgccacggacgtggaacggtaaagtcggtggaaacggtatgctatgagattatgcgtgagatcgtccgcgtacatcatgcttatgattccgatcgcttcctggtctatgcttcccctgcggtggcggaaaccctgaaaggggaagagtcgcatgcgctggcggaagtggaaatctttgtcggcaaacaggtgaaggtacaaattgagccgctctataatcaagagcagttcgatgtggttatgatgtaa

SEQ ID NO: 139334 - DNA, 888 bp, Enterobacter cloacae
atgcttaatcttcagcgcgtgaccatgtttatcgccgtggtagatgccggcagtttcacccaggccgcagcggcgctggggcagaccaaggcggtggtcagctttaacgtacggcagctggaaaatgagctgggggtgacgctgctgctgcgttcgacgcggcgtttgcggctcactgacgccggggtgctgttctatcagcgcggggtggcgctcctgaacgcggcggaaaatctccaggatgaggtgcgggccagccatagcggcttaagcggggagctacggatcaccaccacgccggagtatggcgcgcaggttatcattccagcgctggccgcgttcgcccgtcgtcatccggcgctgcgggtgcgccacgtctcctcctcccatcatgccgacctcatttcagaacgatttgatgtggcgatacgcctcggtacgctggccgattcccgctatcgggcgacgcggatagccagtttcgcgatcctgcccgtcgcctctccggcctggctggcaagccatccggtgcagacgctgtccgatctggcgcaagctgagtggattattcacgagcgcctgccgacgccgctgcgctggcagctgcgcacggatcaccagacagaggtggatttcgcgatagccagcgcgccgcggttttctgctgatagcgctacggcgctgatgagctttgctctggcgggatgcggcgtcgccttgctgcccgcatggctggtagccaaaaaggtggcgcagcgggagctggtgccgctcctgccggaataccatttcccacagcagggcgtgtatgccctttatcccgactcgcagcatttgccgacccgggtgcgggcatttattgacttcctgcgcgagaaggtcggttaa

SEQ ID NO: 139335 - DNA, 408 bp, Enterobacter cloacae
atggagttacgaaacgaagcattccacctgctgcgccagctttttcaacagcataccgcccgctggcagcaggcgttgccggacctgactaaacctcagtatgcggtgatgcgctcggtagcggagcaccccgggatcgaacaggtggcgctgattgaagcggcggtcagcaccaaggctacgctggcggagatgctcagccgaatggaagcgcgcggcctggtgcgccgggagcacgatccggccgataaacgccgccgttttgtctatctgaccgacgaaggcgaggcgttgcttaaccgttccattccgcagggcaatgaggtcgatgacgagtttctcggccgcctgagcgatgacgagcgcgagctgttctcccggctggtgcacaaaatgatggcgccctga

SEQ ID NO: 139336 - DNA, 594 bp, Enterobacter cloacae
atgaaactgattattgggatgacgggggccaccggggcaccgcttggggtggcattgctgcaggcgctgcgcgatatgccggaggtggaaacccatctggtgatgtcgaaatgggccaaaaccaccatcgagctggaaacgccctggacggcgcgcgaagtggccgcgctggcggacttttcccacagcccggcagaccaggccgccaccatctcatccggttcatttcgtaccgacggcatgatcgttattccctgcagtatgaaaacgcttgcaggcattcgcgcgggttatgccgaagggctggtgggccgcgcggcggacgtggtgctcaaagaggggcgcaagctggtgttggtcccgcgggaaatgccgctcagcacgatccatctggagaacatgctggcgctgtcccgcatgggcgtggcgatggtcccgccgatgccagcttactacaaccacccggagacggttgacgatatcaccaatcatatcgtcacccgggtgctggatcagtttggcctcgactatcacaaagcgcgccgctggaacggcttgcgcacggcagaacaatttgcacaggagatcgaataa

SEQ ID NO: 139337 - DNA, 1098 bp, Enterobacter cloacae
atgggtgtacatggcgttgaccgcctgcacctccggaaattcggccttcagctgctgatacagcggtacgcaggtcgccgggcccatcagatagtcaatctcggtccacggcataccgaggtagagcgattcaaaaatcggtttgctgcgataagagactttgtcgatacgcactaccgtcatgttacgaccgccggagtagtgaccggtaaattcaccgaacggcccctcgatctcacgcttacgcccttcaatgaccccttcgaggatcacttccgaaccccagggcacgtcaaagccggtcagcggcgcggtagcgatgggatacgggctctcgcgcagcgcgccagccatctcatattcagactgatcgtatttcagcggcgtggcgcccatcagggtaataatcgggtcgttaccgagggtaatggcgatcggcagatcttccccacgctcttccgctttgtgcagatgcagcgcgatatcgtgcatcggtaccggctgcaggccgagcttgcgcttgcctttcacttccatgcggtagataccgacgttttgcttaccgaagttatctttatccagcggatcgcgcgaaacgacacaggctttatcgaggtagaaaccgccgtcaccatcgttgaggcggaacagcggcagaatatcgaacaggttgatatcatcgccatcaacagtattttctgcccacgccgggttggcgcggcgctctggcgtcaccgggaagttatcccagcggcgaatgaactcatcaatctgctttttcaccggcgtgttaggcggcaggcccagcgagatggcatggttctgccacgagccgatggtgttcatcgtcacgcgagcgtcgttaaagccgcgaatattatcgaaccacagcgccggggcaccgtcgccgatgcgtccggtcgcattggcggccgccgccagatcgggctcagcgttcacctcttcactgattttcagcagttgtccctggtcatccagcgcctgcaaaaagctgcgcaaatcatcaaaagccattattcgatctcctgtgcaaattgttctgccgtgcgcaagccgttccagcggcgcgctttgtga

SEQ ID NO: 139338 - DNA, 936 bp, Enterobacter cloacae; identical to SEQ ID NO: 135296

SEQ ID NO: 139339 - DNA, 561 bp, Enterobacter cloacae
atggcgaactggcacaccattgacgaactgcatgatatttccgcagatttaccgcgcttcacccaggcgttcacagaacttgccacccgtctcgggctggatatcgcgccgcttgaggccgatcacatctctttgcgctgccaccagaacgccaccgccgaacgctggcggcgtggctttgagcagtgcggagaactgctgtcggagaatatcattaacggtcgcccgatctgcctgttcaaacttcacgcgccggttacggtggcgcactggcaattcaccgttgtggaactgccctggccaggagagaagcgttatccgcacgaaggctgggagcatatcgaaattgttctgcctggggagcccgagacgctgaacgcccgtgcgctggcgctgctttccgacgaggggttaagccagccgggtattttcgtcaaaaccagctcgccaaaaggggagcgcgaacgcttaccgaaccctacgcttgccgtaacggacggcaacgtgacggtgaaattccatccctggactatcgagcagatcgtcgccagcgaagcgtaa

SEQ ID NO: 139340 - DNA, 744 bp, Enterobacter cloacae
atggcgctgctggaaatttgttgttacagcgtggagtgtgccgtcactgcgcaacggcacggggccgatcgcatcgagctttgcgcggcaccgaaagaaggaggattaaccccgtcctttggtgtgctgaaatcagcccgtcaggccatcaccattccggtgcacccgattattcgcccgcgcggcggtgatttttgttatacggcgggtgagttcagtgccatgcttgaggatatcgcccttgtccgtgattccggttttccggggctggtgatcggtgtgctggacgaagacggcaacatcgatcttccgcgtatgcgtcaggtcatgcgcgccgcccgggggatggcggtcacttttcatcgtgcgttcgatatgtgtcaggatccgatacaagcctttgatacgctggcagaactgggcgttgcgcgcgttctgacgtcgggccagcagtcctcggctgaaaaaggactgaaattaattacggaactaaaagcacattccggtgttccaataatcatggcgggcgcaggagtacgcgccagcaatctggaactgtttttaaacgcaggggtggaagagctgcacagctcggcgggtaaatggataccttcacccatgcgttatcgcaatacagggttgtcaatgtcgacggatgctgaagcggatgagtactcgcgctacggtgtggatggagagtcggttgcggtaatgaaatcgttgattgaacgtcatcacgtgtag

SEQ ID NO: 139341 - DNA, 564 bp, Enterobacter cloacae
atgtggcgcatgattggcgcaggcgcgcatctggtcgtcggtatcgatccgatgcagctgttcctgtgccagtttgaagcggtgcgtaagctgctgggtaacgaccagcgtgcgcacctgctgccgctgggtatcgagcaactccctgccctgaaagcgtttgataccgttttctcaatgggcgtgctgtaccaccgtcgttccccgctggagcatctctggcagttgaaagatcagctggtcagcggcggcgaactggtgctggaaacgctggtcatcgaaggcgatgaacatgccgttctggtgccgggcgatcgctatgcgcagatgcgcaacgtttacttcatcccttccgcgctggcgctgaaaaactggctggagaaatgtgggtttgtcgatgtacgcatcgccgatgtgtgcgtgacgtcagttgaggaacagcgccgcaccgactggatgatcaccgaatcgctggagcaattcctcgacccggacgatcacagtaaaaccatcgaaggctatccggccccgatgcgtgcggtattgattgcgaccaagccgtag

SEQ ID NO: 139342 - DNA, 531 bp, Enterobacter cloacae
atgactgattcaaccgtaactgcaaaacagagtttgaaacctgaccatatgacgatggaagagtgggtggagtcgcgtatcgcgcgctttgaaggccgtaaatacgactggaatgcgctgaaattccaggccgatttcgatccgaaatatcgccgcgcgcagatgcgctacatcggcaccggcgccaccggcgtcgccagtgataccaacaccgttccggccgagcacttcaccttttccaccatggtgttgccgtccaaatgtgaaggcccgctgcacctgcatgatgacgtagaagaggtgttcttcatgctcaaagggcagatcactctgatgattcaggacggcgacaactataccgaaaccgtgctgcgcgaacgcgatctgatctcggtgccgcctggaatttaccgcggtttgtttaaccacggcgaagaagaggcgctgatgtgcgtgatgctcggcacccataagccgcatattccgacctacccggaagatcatccgctggcaaaagtaaaacgtaactaa

SEQ ID NO: 139343 - DNA, 771 bp, Enterobacter cloacae
atgacggggtttcgtgaacaaggaagcggtattccgctgacgctgctgcacggcatcagttccggcgcggcctcctggcataaacagatggcgctacccggctaccgcgtgctggcctgggatatgcccggttatggcgaaagcccgatgctggcggcggcgccggcgaatgccggcgattacgccgacgcgctggcgcgaatgctggaccgcgctggagtagagcaaaccatactggtcggccattcgctgggcgcgctggtggcggccgccttcgccgcgaaatacccgcagagggtgctttacctggtgctcgccgacgtcgcgcagggctacggccaggcggaagccgcacagcgggaaaaagtctggcaggggcgtcaacagcagatagcgctgggcggcgaggcgatggcccaggggcgagctgcaaaactgctgcgccctggcgcgcgcgaagccgatgtggcgacggtggcggcggggatgcgcaggctacgccgcgacggttatctcgccgcggcctggatgctggcccatgacgacattcaccgttggctcgccgactatcgcggtcgtctctccgtgtggtgtggcgagcaggatgccattacccaaccggagttagtgcagggagtggcgctgcgttacggcgccccttacatcgccatccctcaggctggacatgccagctatctcgataatgaaatcttttttaatcaagagcttttacgcataggggaagaggtgcgcgatgaatgcacaaattga

SEQ ID NO: 139344 - DNA, 732 bp, Enterobacter cloacae
  misc_feature (413)..(422): n is a, c, g, or t
atgaaaaaggtcatgttaattggctatggcgcgatggcccaggcggtgattgaacgcctgccgccgcaggtgagggtggagtggatcgtggcgcgcgaatcgcatcacgcagcgatctgcctgcagtttggtcaagcggtgacgccgcttaccgatccgctgcaatgcggtgggacgccggatctggtgctggaatgcgccagtcagcaggcggtcgcgcaatacggcgaagcggtactggcgcgcggctggcatctggcggtgatctcgaccggtgcgttggcggacagcgaactggaacagcgtttacgtcaggcgggcggcaagttgacgctgctggctggcgcagtagccgggattgacggcctggcggcggccaaagagggggggcttgaacgagtgacctatcagtnnnnnnnnnngcttatcgacctcagcgcggtcaatgaagcgcaaattttcttcgaaggcagcgcccgcgaggcggcgcggctattcccggcaaatgccaacgtggcggcaaccatcgcgctgggcggtatcggccttgacgcgacccgagtacagctgatggtcgatccggcgacgcaacgcaacacccatacgctacacgccgaaggattgttcggcgagtttcacctggagctgagcggcctgccgctcgccagcaatccgaaaacatcgaccctcgcggcactgagcgcggtacgcgcctgccgtgaactggcataa

SEQ ID NO: 139345 - DNA, 282 bp, Enterobacter cloacae
gtggtggtgccgccggtaaaggaaattttgcgcaccttaggatggcgggccagcgcatcgccgataatcgatcctttacccggcaacacgctcagcagtccggcgggtaaaccggcctgctcaaagatcttcgccagctccagcgccatgagcggcgtggcttccgccggtttgaggatcaccgcatttccggcggcgatcgccggggccaccttctgcatttcgctggcgatcggcgagttccatggggtgatcgccgccaccacgcccaacggctcatag

SEQ ID NO: 139346 - DNA, 189 bp, Enterobacter cloacae
atgacctatccgtttaccgagcacgccaccgtgctggagggcgaagtggagctgaccgtcgccggcggcgagccgcagcgctttgcgccgggcgacagctggtttgttaaacagggcaccgaagtggagtggaaaattctgacgccgcgctttgtgaagcactacctggcgaacgtcgagacccgctaa

SEQ ID NO: 139347 - DNA, 219 bp, Enterobacter cloacae
atgaccccgaaaaccggggccatccgtcttgccacgttgcgcctgtttctgccggatggcggctgcgccttatccggcctacggtccgtgcggcctgcctttaatttattcaccatgctgactgaaactgccggtgttggcggcctcaaaccccccggtggcgctgccgcttaccggggctacagcgctgcgcgatttggtagcccggagaaggcgtaa

SEQ ID NO: 139348 - DNA, 1500 bp, Enterobacter cloacae
atgtttagtaacagactcgccagccatcttgagcgcggcgtcgtcggcttcccgaccaccctcgccagctccgtcgggctgatcatggccagcccggtgatcctgacggtcaccagcggcttcggcatgggcggcgataccttcgcgctggcggtgctgctggcctttattatgatgcaggcgcaggtcaccacctttgccgaggcggcgacgctcattcccaccaccggttcggtgtacgactatatctcctgcggcatgggccgcttcttcgctatcaccggcgcgctgtgcgcctatcttatcgtccatatcttcgccggcaccgcggagaccattctcgccggcattatggcgctggtgaacttcgaatcggtcaacgcgcagatggccgcccatcaaaacacctggatggtcggcgtcggtatggtggtcattttcggcctgctcaacgccattggcgtggaaattttcggcaaggttgaagtggtgctcacctttggcatgtggacgacgctgaccattttcggcctgtgcggcatttttatggcgccggtgactcacctttccggctggttcggcacgccgctgaacgttagcgatatctccggcctgttcggctatatcggcatggcgatgtttatgttcgtcggttgcgaactggtgacgccgatggcgccggagatcaaacaggcccaccgcaccataccgcgggcgatggcgctgggcctgctgggggtcgccagctgcatgtttatctacggcgcggcgatcaaccgccaggtggagaataccgtgctcgacgcggccaacaacgtccatctgctggatacaccgatggcgatcccggccttcgccgaacgggtgatgggccacgccggccagtactggctgggggtcgggctactgttggccggctgcgccaccatcaatacgctgatggccgccgtgccgcgtattatctacggcatggcgctggacggcgcgctgccccgtttcctgacctggctgcatccgcgctttaagacgccggtgatcgccattgccatcggggtggcgatcccctgcctgcacgcctggtatctgaacggcgatctggaccgcatcgtgccgctgatcctcgccgcggtctgcgcctggggcgtcgcctatctgctggttactctgtcggtgttgatgctgcgcattcgccgcccggacctgccgcgcgcctaccgctcgccgtggttcccgctgccgcagattatctccagcgtcgggatcatcatcgctatcgtcaatatcacgccgcccgggatggacagccgcgaggtgctggtgccgttcgggattatgctcggcctgaccgccgcctatgccctgttctggacggtgtgcgtgcagcgcgttaatccgttcaagccgctggaggtggaagaggtggtcgagcgcgctatcggcaattacgagaaacagatccgcggggagatgacgcctgatgtcctccgtcccctggtttga

SEQ ID NO: 139349 - DNA, 594 bp, Enterobacter cloacae
atgtcctccgtcccctggtttgaaacgccattaatgaacgcggtgcagcgcgacttagcgggctggccgagcgaaaaactgagcgaaagcagcgcgatgttgcggctaaacgacgtcaccgccgtcaccttcagcgtgcgtcagaagcggctgtttatggccagcattcacagctgcgagtttgtcgtcgaggggccggtgacccggcccgctcgcggcaagatccgcgcccaccaatccggctggctaaaacgcctgccaatccgctttatcggcagtaaagagagcgcggaactcgccggctatctcaacggttttcctaatctccagcagaccttaagcgagctggactaccgccgcttttcgttgacctttgacgatagcggctggcgctgcggcattgaaccctgggccgccagcgaagtggtctgtaaaatgccgccgctgcgccgttatctgaagctcgaagcgcagcaacggatgctgctgctcagcgtgctggcgatgattaatcaggcggtaagtcagtggatgcgcggtgaaatcgcagaagagaaagcattgacttccccgccatcaccgcggggaagctga

SEQ ID NO: 139350 - DNA, 828 bp, Enterobacter cloacae
atgctcggcaaagaggcgccgctggggccgggcagttatgaaatcgcctgtctttccgccgggctggcctgtgcggcggtggaagcggtgctgaagggggagctggataacgcctattcgctgtcgcgcccgcccggacaccactgcctgccggaccagtcgatgggattttgtttcctcgccaatattcccattgccgtcgagcgagcgaaagcgcagctggggctgggcaaggtggcgatcattgactgggatgttcaccacggcaacggcacccagcatatctacctgcagcgcgacgacgtactgactatctccttgcatcaggacggctgcttcccgccgggctacgccggcgaggacgatcgcggcgtgggcgcgggcgaaggttacaacatcaatattccgctgttggccggggcgggggatgacagctggcgctatgcgctggaaactatcgttattccggcgctggcgcgttttgagccggagctgatcatcatcgcctgcggctatgatgccaacgccatggatccattagcgcggatgcagctgcacagcgatagcttccgggcgatgaccgaacaggtcctgcaggcggcggatcgcctgtgcggcgggaaactggtgatggtgcacgagggcggctacgccgaatcctacgtgccgttctgcggcctggcggtgatggaagccctgagcggcatccgcaccgaggtccaggatccgctgctggaatttattcaacagcagcagccgcgcgccacgttcgcgcagttccagcgccaggccatcgatcggctggcgcagcagtttggcctgctataa

SEQ ID NO: 139351 - DNA, 657 bp, Enterobacter cloacae
atgaagggtgatatctcccacggcgtcacgggtcagggttaccgtggccgtcgtaccgaatttcaaggcgttatcgataagattggtcatcacccggcgcagagcctgcggcgggatccacaccaccccggcggtctcttcgggacaaaactggaccggccggccgacatcagcataatcgcagacgatggtgtcgagaaacgcatcgagattcagccgctgtcgcgcctcctccagcggctgcgaggtgcgggcgaaggcgatgccctcccgcaccagacgggtcatattgtcgagatcctgcagcagtttgtcgcgcagttccggctggtcggccatctccacccgcagcttcattcgggttatcggggtttgcagatcgtgggagatggcggcaaggatccgcgctcgctcctgcagatgatcgtggatgcgcgcctgcatcgcgttaaacgcgcgggcggcgcgacgcacctcctccggcccctgctcggccatagttcccgccgtgtcgctggccggctccagggcatttaccgcgtgggtaaagcgggagatgggcagcaatacctggcgaaccgcgtaccaggcgcaggccagcaggaggacaaactgagcgatcagcaccaccggcagccagcgggcgatggccggtag

SEQ ID NO: 139352 - DNA, 741 bp, Enterobacter cloacae
ttggagcgtattgaccacatcctggtcgtcgacgacgaccgcgacatccgggaactgattgtcgactatctggaaaaatcgggatatcgcgccagcggcgcggcgaacggcaaagccatgtggtcggtactcaaaaaccatcaaattgacctgattgtgctggatattatgatgccgggcgaggatggcttaacgctctgtcgccagctgcgcgccaacccgcagcaggatatcccggtgctgatgctcaccgcccgcaccgatgacagcgaccggatcctcggcctggaaatgggggctgacgattatctgattaagccctttgtggcccgcgaactgctggcgcgcatcaaagctattttacgccgcacccgggcgctgccgcccaacctgcagatcaccgaggcgggcaggctgatcgcctttggcgactggctgctcgacactgccgctcgccatttgctggacgacagcggggcgattgtcgccctcagcggggcggagtatcggctgctgcgggtgtttctcgaccatccccagcgggtgctgaaccgcgatcagctgctcaatctgacccagggacgcgacgcggaactgtttgagcggtcgattgacctgctggtgagccgactgcgccagcggctacgggaggatgcccgcgagccggcctacattaaaacggtgcgcagcgaaggctatgtgctgtcggtaccggtctccattcgcgagaggcatgaatga

SEQ ID NO: 139353 - DNA, 993 bp, Enterobacter cloacae
atgaacagattatccctgatccgctataccagcgccgtggcgctggggttatccaccctgtggtccgccgccgtttgcgccgctgaagacgcgggggcgttcgacaagatccagcagatccgcgccggcgacctgaatattggctacgtggatatcggcccacgcgacggccagccggtgatcctgctgcacggctggccctacgacattcagagctatgcccaggtggcgccggctctagtgcagaagggttaccgggtgatcgtgccgtatctgcgtggctacggcacgacccgtttcctctccgccagcacgccgcgtaacggtcagccgtcggcgatggcggccgatattgtccatctgatggacgcccttaacatcaggcaggcggatctggccggttttgactggggcgcgcgcacggcggatatcgtcgccgcgctgtggccgcagcgggtgaaatccctggtctcggtgagcgggtatctgatcagcagtcagcagattggcgaaaaaccgctgccgccgcaggctgagctgtcgtggtggtatcaattctattttgccactccgcgtggggaggccggttaccggcaaaacacccacgactttgcgaaatttatctggcatcaggcgtcgccgcagtggcaattcagcgacgcgacctttgccaaaaccgcccgggctctggataacccggaccatgtggcgatcaccatcagcaactaccgctggcgcctggggctggagaaaggggaagcgaagtatgccggctatgaacaacggctggcggcgctaccgccgataaccgtgcccaccatcaccctggaaggggcgaataacggcgcgccgcatccggctcccgccagctaccgtgccaaatttaccggtaaatatgagcaccgggatctgccgggagcggtgggccataacccgccgcaggaggatccgacggcgtttgtgcaggcggtggtggacgccgatcgtttgtaa

SEQ ID NO: 139354 - DNA, 123 bp, Enterobacter cloacae
atggccgttctctatcccggcaaagaaggcgctcaccggatcctcgcgatggtgaagccagagattcagcagcaggtcattgtgaccatcaaaaatcgccatagcgggttcctgcgttcttaa

SEQ ID NO: 139355 - DNA, 678 bp, Enterobacter cloacae
atggtgctccagcggcacggagtccggcacatagccagctttacgcacgatggtccaagcctgcatcaggtgctggtgctgacgagagtcgatgtagtagagcacgcggtcggcgtgcagcgtttcatagcgatacttcgcacaggcgatatcggtggtggtatagaggtagccgccatcctttttctggatgatgacgcccatcggttcgccttccttgtttttgtactcatcaaggaagaccacggtggcgccttcgctctcaaccgccagccctttggctttcagatcggcgacgatccccggcagcatcgggttgtacaggctctcacccatcacgtcatcgcgggtcagggtgacgttcaggcgatcgtaggtgatctggttctgcgacatggtgatgtcgaccagcttacgccacatctgcaggaagtactcatcaccgccctgcagcttaaccacgtagctgcgcgcgcgctcggcgaaggcttcgtcttcgtcatagtgctttttcgcttcgcgatagaaaccttcgaggtcggccagggccatttcgccggcgttttcctgctgctgtttttccagatacgcgatcagcatcccgaactgggtgccccagtcgccgacgtggttggcgcggatcaccttatgacccaggaactccagggtacggactga

SEQ ID NO: 139356 - DNA, 306 bp, Enterobacter cloacae
atggccgacgtgcatctctttcgctacgttgggtgccgagtagtcgacgacgatagtctgcgcctgcggtttcgtgacgcccaggcgctcagactgcagcgcgcggttgacgttgtccgccagaaacgcggggtcgaggaaaatattgataaagcccggcccggcgatttcaaccttgttggcaatgccgttgaggtcaagatgagacagtacctgctctgcaagttgtcgcggcgccatacccagctttttggcgacagccatcacgccgttggcctgatagtcgccgaactgaacttttgctga

SEQ ID NO: 139357 - DNA, 570 bp, Enterobacter cloacae
atggcaaactggcagcaaaatgaacaactggccgatattacggcggatctctcgcgattttccgatgcgcttgagcgcttcactgcgcgactgggactggagatcgccgggctcgacgccgaccatatctccctgcgctgtcatcagaataccactgcggaacgctggcgccgcggtctggagcagtgcggcaccctgctgtcggagaatatgattaacggccggcccatttgcctgttcaaactggcggagccggtctgcgtggcgcactggcgcttccatatcgttgagctgccgtggccgggtgaaaagcgttatccccatgaaggctgggagcatatcgaaatcgtcctgcccggcgatccggcaaccttaaatgcccgcgcgctggcgctgctggccgatgacggactcagccagccggggatcgtggtcaaaaccagctcgccgaaaggggagcatgagcgcctgccgaaccccaccctggcggtgaccgacggcagcgtgacggtcaaatttcatccgtggtctattgaacaaatcgtcgccagcgagcaagccgatacgtaa

SEQ ID NO: 139358 - DNA, 744 bp, Enterobacter cloacae
atggcggtactggaagtgtgttgctacagcgtggcgtgcgcccgggaggctgagcgctgcggcgccgatcgtattgaactctgcgccgcgccgcaggaagggggattaaccccctcttatggggtgctggtctcggcccgcgaggcgattactctcccggtgcatccgatcgttcgcccgcgcggcggcgatttctgctacaccgaggaagagttcgccgcgatgcttaacgatattcgcatggtacgggatctgggctttcccgggctggtgaccggcgtgctggatgctgatggccaggtcgatatcccgcggatgaaaaaaataatggccgcggcggggccgctggcggtgacctttcatcgcgcgttcgatctgtgcgctgacccgcgtcaggcctggaaaacgctggggacgctgggggttaaacgtatcctgacttccggtcagcaatcctcggcggagaaaggtatttcattaattacggaacttattgccgcaggggatactccaatcattatggccggtgcgggagtccgcgccgcgaacctgccgctgtttctgcaggcgggggtgaaagaggtccatagctcggctggccactggttgccgtcggaaatgcgctttcgtcatccgggcgtttcgatgtcagccgatcccgatgccgatgaatacagacgctacgccgtgaatggcgcagcggtggcggagatgaaaaggattatctccgcctggagaagttaa

SEQ ID NO: 139359 - DNA, 621 bp, Enterobacter cloacae
gtgggctgcggcagcggctatcacatgtggcggatgatcggcgccggcgcacatctggcggtcggtatcgatcccacccagctgttcctgtgccagtttgaagcggtgcgtaagctgctcggtaacgaccagcgggcgcatttgctgccgctgggcatcgagcagctgccggcgctggaggccttcgacaccgtgttctcgatgggcgtgctctaccaccgccgctcgccgctggaccatctgtggcagctgaaagatcagctggcgccagggggcgagctggtgctggagacgctggtggttgaaggagatgaaaatacggtgctggttccgggcgaccgctatgcgcaaatgcgcaacgtctattttatcccctcggcggcggccctgaaaatgtggctggagaagtgcgggtttattgacgtgcgcatcgtcgacgcctgcgtcacctcgacagaggagcagcgacgcaccgaatggatgacgaccgaatcgctggccgatttcctcgacccacaggatcagcgcaaaacggtggaaggctatccggcgccattacgggctgtgatcattgccaccaaaccggaaacccagcagtcgctggcgaaaaaagcgagataa

SEQ ID NO: 139360 - DNA, 1635 bp, Enterobacter cloacae
atgaccatcatcactaaaaagcgtttaatcgccgcgggagtgctatccgcactgatcgccggcaatatggcaatggcagcggatgtcccggctggagtgcagctggcagagaagcaaaccctggtacgtaatagcggcgccgagccgcaatcgctggacccaaataaaatcgaaggggtgccagaggccaatattagccgcgacctgttcgaaggtttgctgaatacttcgccgaaagatggccacccgatccctggcgtggcggagagctgggataataaagattttaaagtctggaccttccatctgcgtaaagatgcaaaatggtctaacggcgagccggttaccgcccaggacttcgtatacagctggcagcgtctggtggatccgaaaacagcttctccttatgccagctatccgcaatatggtcatatcgttaacgtcgacgaaatcattgacggcaagaaagcgccgagcgagctgggcgtaaaagccattgacgaccacacgctggaagtcaccctcagcgaaccggtaccctatttttataaactgctggttaacccggcgatgtctcccgtctacaaaccggccatcgaaaaatttggcgaaaagtggacgcagcctggcaatatcgttaccaacggcgcgtatactctgaaagactgggtggtcaacgagcggatcgtgatggagcgtaacccgcactattgggataatgctaaaaccgtcattaacaccgttacctggctgccgacctcttccgaagtgacctatgttaaccgctaccgcagcggtgaactggacatgacttataaccagctgccgatcgaactcttccagaagctgaaaaaagagatccccaacgagctgcacgttgacccctatctgtgtacctattattacgaaatcaacaaccagaaggccccgttcaccgacgtgcgcgtgcgtaccgcgctgaagctgggtctggatcgcgatattattgctaacaaggtgaaaggacagggcgatctgccggcctacggctacaccccaccgtataccgatggcgcgaagctgagcgagccggaatggtttacctggtcgcaggaaaaacggaatgaagaagcgaagaaactgctggccgaagccggctatagcgccgataaaccgttgaccttcaacctgctgtataacacctctgatttgcacaagaagctggcgattgccgccgcctcgctgtggcgtaaaaacctgggcattgacgtgaagctggtcaaccaggagtggaaaacgttcctcgatacccgtcatcagggcacctatgacgtggcgcgtgcgggctggtgcgccgactataacgagccaacctctttcctgaacaccatgctctctgacagttcaatgaacaccgcgcactataagagcccggcgttcgacaagattatggctgaatccgtaaaagcatccgatgaagcgcagcgcacggcggcctatgcgaaagcagagcagcagctggacaaagacagcgcgatcgtaccggtctattactacgttaacgcccgcctggtgaaaccgtgggtcggtggctataccggtaaagacccgatggataacgtctataccaaagacctctacgttatcaaacattaa

SEQ ID NO: 139361 - DNA, 921 bp, Enterobacter cloacae
atgttaaaatttatcttacgtcgctgtctggaagcgattccgacgctatttattcttatcaccatctcattcttcatgatgcgtctggcgccgggaagtccttttaccggggaacgcacgctaccgccggaagtcatggcgaatattgaagcaaaataccatttaaacgaccctatcatgacgcagtacttcaattatctgaagcagctggcgcatggcgattttggtccctcttttaaatacaaagattattccgtcaacgatctggtggccgccagcttcccggtttcagcgaaactgggcttcgccgcctttttactggcggtggtgatcggcgttgccgccggggtgatagccgccctgaagcaaaatacccgctgggactacgcggtgatgggggtagccatgaccggcgtggttattccgagctttgtggtcgcgccgctgctggtgatgatctttgccattaccctgcactggctgccgggcggcggctggaacggcggggcgctgaaatttatgatcctgccgatggtggcgctttccctggcctatatcgccagcatcgcgcgtattactcgcggctcaatgattgaagtgctgcactctaactttatccgcaccgcgcgggcgaaggggctgccgatgcgtcgcattattctgcgccatgcgctgaagccggcgctgctgccggtgctctcctatatggggccagctttcgtgggcatcatcaccggctcaatggtcattgaaaccatttacggcctgccggggatcggccagctgttcgttaacggggcgcttaaccgcgactactcgctggtgctcagcctgacgatcctcgttggcgccctgactatcctgttcaacgccatcgttgacgtgctgtacgccgttatcgatccgaagattcgctactga

SEQ ID NO: 139362 - DNA, 2487 bp, Enterobacter cloacae
atggatacctcttcaataattaccggcaccacccttaaccgttaccagctggatattccttcatgtaccgcatcgctggatgtggaagaattcagtggggcagaaaaactgagtgaactttattattacactattacgtttaccagcgcagagaaaaatattgatgccgcacagctcctgagcaaacccgccatgctgacgatgggcggcggcgcactgcagcagctggcggactgcaaacgcgtccatggcgtggtgactgccttccggcgtatcagcagttcagaagatcagtcgaaatatcagataaccctcgaacccttcctctccttactggataaacagtttcgcagccaccgttttttcgtgaataaatcggtgccggaggtggtggagcaggtattgcaggaacatcacctgcatgactgggagtatgagtttaatctcaagcaacactatccgcggcgcgagcaaattaatcagtatcaggagagcgacctggcatttatccagcgcctgctggcagaggtggggatattttatttcttcaccctgcaggaagaggcccagagcgaagtggtccatttcgccgacgcgcagcgggcgctgatgttcgataaaacacttcctgtaaacagcccgtccgggatgagcgacagcggtacggaatcgatatggggtctgaacatcacgcacaatgtcgtagaggcgaacgtcactacccgggattataacccccgcgatgcgcagagcgttctccagtcggcaacagcggatatgacccggggaaatggtgaaggcatcacttacggtgaggtataccactataagcttcgccaccgggagcgtggcgataaaatcgacccgcagacggagaccgccaacttctatgcccgcctcgaccatgagcgttttctggctcaccagacgcttattaccgcgagcagtactgcagcctggctggcgccggcccaggtgctgaccgttaccgacagcctgccgtcgaccctgcctgcgcccatacaggatccgctgttaatcaccggcaccggttttaccgccagccgccgggaggcgctgcgggtgtccctgctggcggtgccctacagcgaaacattgtgctggcgtccgccgctgctgccgcgcccgaaggtgactggcaccatgacggcgcgggtgaccagcgcgaaagcgaatgatatctacgcctggcaggatgcgtccggcctgtaccgggtgaaatttgaccctgacagagatgagaaagggcaggggcaggaaagcatgccggtgcgtctcgccaaaccctacggcggcgacgtgtacggctttcacttcccgctgatccagggcacggaggtggcgattgctttccacgaaggcgaccctgaccggccgtatattgcgcatgcgctgcacgactcgcggcatgtcgaccctgtgacggagaaaaacagcacccgcaatgtgattcgtactccgaccaacaataagctgcgaatggaggataagcgcggcgaggagcatatcaagctcagcaccgagtacggcggcaagacgcagctgaacctggggcataacgtgaatgcgcaaagggagttgcggggcgagggtgcggaactgcgtacggataaatgggtgagcatccggggcggtgcgggagtgtttatcagtgcggataaacagccttcggcaggcgacaggatgctggcaatggaggaggcgattgcgcagcttgaaaatgccctgggtattgcgaaaagcctggcgtcggcagcggaatcggctcaggccctgccatcggataccggcaaccagcagacgctgaacgatgcgctgaaagagctggcgcagccggggatagtgctgaatgcgccgcagggcgtgagcatcagcagtccgcaggcggtacggttgtcttcgggtagcgccagcgtggggattgtgtcacagcagaatacggacattagtgcgctgaaacgttttacggtggcggcgggagaagccgtcagcctgctggcgcgaaaggcggggatgaagctgtttgcggcgaagggaaagattgaaatccaggcgcaggatgatgcgctggaggcgacggcgaaaaaggatatcaccgtgaccagcgtggaagggcgagtggaaatcacggcggcggaggaactggtggtgaattgtgcgggagcgtatatcaggctaagtggtggcaatatcgagctgggctgccctgggaatattctgctgaaatcggccaatgtgcagaaaatgggtaaggcggattttcgggtgcctccgctggaattgcctaaagggttcgaagagcgttttactgtcaaagatcagaagaccggtgaaattgtgccatttgcccgttaccgcatcaccactgaaaaaggccaggtattcgaaggccgggcagatgctgatgggaaaacggccagcgtttataccgcattgcctgagtcaataaaaatagagctactgtga

SEQ ID NO: 139363 - DNA, 540 bp, Enterobacter cloacae
atggcaaatctactttacgttgacaattccaatgtttggattgaaggcatgcatgttgcggctttcaaatcaggcaaggttccggacgtttggactgctgtaaaaggcaatatttgcgatcataattggaaaatggactttgggcgactctttgcatttgctgggggtgataaagttggggtgcgtaaagccactctttttggctccagaccgccaaagaatgattcattatgggttgcggccgaaaaacaagggtttgatgtagtcacttatgaccgcaatgttgcaaactctgagaaaaagattgataccgacattgttgcaacaatgattgaggattcttttacgattttgcaagagggcgatgagattacccttgtctctggcgattctgactatgtcccggcaatagaaaaactaacgaagcgtggcataaaagtacatgttgtgttttggcaacatgccgctcgtgagctaaagcaagcagcaacaacattcaccccacttgatgattatctcgatcatttagcaaaaaagtaa

SEQ ID NO: 139364 - DNA, 1053 bp, Enterobacter cloacae
gtgaaggatgtctacatcaagctggaaaaagagaccgatgccgggatcatcgtcagcggcgcgaaagtggtcgccaccaactcggcgctgacccactacaacatgatcggcttcggctccgcacaggtgatgggcgagaacccggacttcgcgctgatgttcgtcgcgccgatggatgccgaaggcgtcaagcttatctcccgcgcctcctatgagatggtcgccggcgcgaccggatcgccgtacgactatccgctttccagccgtttcgacgagaacgacgcgattctggtaatggataaggtgctgatcccatgggagaacgtactgatttatcgcgactttgaccgctgccgccgctggaccatggaaggtggtttcgcccgcatgtacccgctgcaggcctgcgtgcgcctggcggtaaaactcgactttatcaccgccctgctgaagcgttctctggaatgtaccggcaccctcgaattccgcggcgtacaggccgaccttggcgaagtggtggcgtggcgcaacatgttctgggcgctgagcgattccatgtgctcggaagcgacgccgtgggtcaacggcgcatggctgccggatcacgccgcgctgcagacctatcgcgtgatggcgccgatggcctacgccaagatcaagaacatcatcgagcgcaacgtcaccagcggcctgatttatctgccgtccagcgcccgcgatctgaacaacccgcagatcgaccagtatctggcgaagtacgtgcgcggctccaacggcatggatcacgttgaacgtatcaagatcctcaaactgatgtgggacgcgatcggcagcgaattcggcggccgtcatgaactgtatgaaatcaactactccggtagccaggatgaaattcgcctgcagtgtctgcgccaggcgcagagctccggcaatatggacaaaatgatggcgatggtcgaccgctgcctgtccgagtacgaccagaacggctggacggtgccgcatctgcacaataatgctgatatcaacatgttggataagctgctgaagtaa

SEQ ID NO: 139365 - DNA, 513 bp, Enterobacter cloacae
atgcaattagatgaacaacgcctgcgttttcgcgatgccatggccagcctgtcggctgcggttaacgttgtcaccaccgcaggcgaagccggccgctgcggcattaccgccacggcggtatgctcggtgacggatacgccgccatcggtgatggtttgtatcaacgccaacagcgcgatgaacccggtgtttcagggtaacggcaagttgtgcatcaacgtgctgaaccacgaacaggaaatcatggcccgtcatttcgccgggatgaccggggtgacgatggaagagcggtttgccctcagcggctggcagcagggcgcgctcgggcagccggtgctgaaaggttcgctggccagtctcgaaggcgagattagccaggtgcaaaccattggtacccacctggtgtatctggtggagatccgcaatattaccctgagcccgcaagggcacggcctgatttactttaaacgccgtttccacccggtgatgatggaaatggaagtcgcggtgtaa

SEQ ID NO: 139366 - DNA, 1161 bp, Enterobacter cloacae
atgcaggttcggcatgacgatgcccaggcccgccggcggggtgttcatcgcgaagtagagacccggttcgataatcgaggccgcaaccagcgccatgactgcaacaaaggattccatcagcatcgcgccgtagccaataaagcgggcatcggtttcgttggccagcagcttcggcgtggtgccggaagcgatcagcgcatggaaaccggagaccgcgccgcaggcgatggtgataaacaggaacgggaacagcgcgcctttccacagcgggccggtaccatcaatgtactgggtcactgccggcattttcaggtccgggttgaggataacgatccccagcgccaggccgacgattacgccgattttcaggaaggtggccagataatcgcgcggcgccagaatcagccataccggcagcagcgcggaaatgaacgcgtagccaatcagggtaaaggtgatagtggtatctttaaaggtcaacgccgggccccagtacgggtcgtgggcaatcacgccgccgaaccagatagaggccaccagcagcacgataccgataaccgacacttcaccgacgcggcctgggcgcaggaagcgcatgtagatccccataaacagggcgataggcaccgtcgagcagacggtaaacacgccccacgggctttccgccagcgctttcaccacgatgagcgccagcaccgcgaggatgatgatcataatcaggaagcagccgaacagggcgatagagcccggaaccggccccatctcctgtttaatcatctcacccagcgaggcgccgttacgccgcgaggagataaacagcaccatgaagtcctgtaccgcgcccgccagcaccacgccggccagcagccagagggtgcccggcagataacccatttgcgcggccagtaccgggccgaccagcgggccggcgccggcgatcgcggcaaagtggtggccaaacagcacgtagcggttggttggcacatagttcaggccatcgttattaatgaccgccggcgtggagcgcgtcgggtcaagcttcatcaccttctgcgcgatgtacaggctgtaataacggtaggcgacgaggtacacagaaaccgatgcgacgacgatccacagggcactgacgtgctcaccgcggcgcagggcgacgactga

SEQ ID NO: 139367 - DNA, 282 bp, Enterobacter cloacae
atgattgccctggcgctaagcctgattgcgattcctttttctcgttatatctcaccacgtgccatcgttagcgaaaatgatgtttatttagcgtggctgcccttaagcgccatgctcgccatcgtgttgttatttggacgacgggcaatcattcctttgctgtttggttttagcgttactaacatttataaccttgatttaacgccgctacaatcagccgtattattatgttgtcagacttttaatgagatggtcactccctccttcccggtactatgctga

SEQ ID NO: 139368 - DNA, 417 bp, Enterobacter cloacae
atgacactaatcattacaaaaagcattaatcccgacgatcaacaagaattgtttgccggtctgcggcagtataatcagcagtatctcgatgcggcgcaggttggcgatctggggatttactcgcgcgatgcacaaggggtaatgcagggcgggctgattgccaaacgcaagggcaactggctgtgcattgagtatctgtgggttagcgagacgacgcgcgggcgcgggctggggagcgagctgatgcaggaggcggaacagcaggcgcaggcgcaaggctgcagccatctgctggtggatacctttagcttccaggcgctgccgttttatcagaaattaggctatcagctgcagatgtcgctgcccgacttcccgcacgcaggcatgcagcgccactatttgtcgaaggcgctgtaa

SEQ ID NO: 139369 - DNA, 1125 bp, Enterobacter cloacae
atgaaatacatcatagctcccatcgcgacagcattatttctccttagcggatgcgataatgcgcagacatctgctccgcagcaacccacgccggaagtgggcgtggtcaccctgcaaagccagccggtgccggtagtcagccagctcaccggccgcaccaccgcctcgctcagcgccgaagttcgcccgcaggtgggcggcatcatccagaaacgcctgtttaccgaaggcgatatggtgaaggccgggcaggccctttaccagatcgatccctccagctatcgcgcgacctggaacgaagcggcggcggcgctgaaacaggcccaggcgctggtggtctccgattgccagaaggcccagcgctacgcgtcgctggtcagggataacggcgtttcccgccaggatgctgacgacgccgcctccacctgcgcccaggacaaggccagcgtggaatcgaagaaagcggcgctggagagcgcgcgcattaacctgaactggaccaccgtcaccgcgccgattgccgggcgcatcggcatctcgtcggttacgccgggggcgctggtctccgccgatcaggataccgcgctggcgacgatccgcgggctcgacaccatgtatgttgatctgacgcgatccagcgtcgatctcctgcgtttacgcaagcaaagcctggccagcaacagcgacaccctcagcgtgacgttaaccctggaagatggcagtacctatcccgaaaaagggcgtctggcgctcaccgaagtcgccgtcgatgaatctaccggctcggtgaccctgcgcgctatcttccccaacccgcagcacgtcctgctgccggggatgttcgtccgcgcgcgcatcgatgaaggcatcatgaacgacgcgatcctcgccccgcagcaggggatcacccgcgatgccaaaggcgacgccacggcgctggtggtcgatgccgccaacaaagttgagcagcgtaccgtggaaaccggcgacacctacggcgataaatggctggtgctgagcggcctgaaagcgggcgacaaactgattgtcgaaggcaccggtaaagtggcccccggacagacagtgaaggccgtcgccgtcaacaataacggaggcaacgcctga

SEQ ID NO: 139370 - DNA, 348 bp, Enterobacter cloacae
ttggtcgggtccatccagacgcgcatcgcgtattcggcgccgaatacctgcaggctgccgacgccctccacgcgcgccagcgggtcctgcatattgctgaccagccagtcggagatatcggagctggtggcgcggttggttttgtcatacaccgcaaggatcagcagaaagctgctctgcgatttttccaccgttacgccggactgctggacttcgctcggcagccgcgattccgcctgctgcactttgttttgtacctgcacctgggcggtgtccgggtcggtcccctgctcaaaggtgacggtgatgctgaccgagccgtcggagctgctggtggagctgaagtag

SEQ ID NO: 139371 - DNA, 1128 bp, Enterobacter cloacae
atgcattgcgcactctacgacgccggccgttgccgctcctgtcaatggctggagcggccggtcccgcaacagctcgccgataaaatggccgatctgcgcacgctgctggcggcgatcccggtcgcagcctggggcgagccggtcagcgggccggaggcggctttccgtaacaaggctaaaatggtggtcagcggcagcgttgagcgtccgctgctggggatgctgcaccgcgatggcactccggtggacctcaccgactgcccgctctatcccgccgagtttgccccggtttttgctgccctgaagccctttatcgcccgcgccgggttaacaccttacaacgtcgcgcgcaaacgcggggagctgaaatacctgctgctgacctccagccagcagggggagatgatgctgcgcttcgtgctgcgctcagaggccaaggtggctcagctgcgcgccgcgctgccgtggctacaggcacagctgccgcagctcagcgtgatcacggcgaatatccagccggtgcatatggcaatcatggaaggcgagcaggagatcttcttcaccgaacagcaggcgctgggggaggtctttaatggggtgccgctgtggatccgcccgcaaagcttctttcagaccaatccggcggtagccagccggctgtacgccacggcccgcgactgggtgcgcgcgctgccggtccagcatatgtgggatctgttttgcggcgttgggggatttggcctgcattgcgcgacgccgacgatgcgcctgaccggtatcgagatcgccccggaagccatcgcctgcgccagacagtcagccgcgcagctgggactcagcaatctgcattttcaggcgctggactcgacgcagttcgccactcacgaagcggatgccccgcagctggtgctggttaacccgccgcgccgcggtattggcgctgaactatgcgactatttaagccgcatggcgccgccctatattatctattccagctgtaacgcccgcaccatggcgaccgatatcgctcgtcttagcggctatcgcgttgagcgggtccagctgtttgatatgttcccccacactgcccactacgaagtgctgaccctgctggtccgcgaagtttaa

SEQ ID NO: 139372 - DNA, 717 bp, Enterobacter cloacae
atggccaaaaccattctgctggtggaagatgacgaggatatagccacgctgctgcggctcaatcttcaggatgagggctatcagatcgttcatgaagccgacggcggccaggccctcgcccggctggagacgcaggtctgggatgcggtgatcctcgatttgatgctgcccggcgtcgatggtctggagatctgccggcgtatccgccagatgacccgctacctgccggtgattatcatcagcgctcgcaccagcgaaatgcaccgcgtgctgggcctggagatgggcgccgacgactatctggcgaagcccttttcactgctggagcttatcgcccgcgtcaaagcgctgtttcgtcgccaggaggcgatggggcagaatctgctgatggacgccgggcgcctgtcctgccatggcctgagcatcgacccgctgtcgcgcgaagtgaagctgcgcggcgagacggtggacctcacgccgcgtgaattcgacctgctgtattacttcgcccgccacccaggggaagtgttttcccgcctggcgctgctggagcaggtctggggatatcagcacgagggctatgagcataccgtcaatacccatatcaaccgcctgcgcagtaaaatcgaacgtgacccggccgagccggacatcattcttaccgtctggggaaaaggctataagttcgccccggtgacgcaagaggccgccccgtga

SEQ ID NO: 139373 - DNA, 1473 bp, Enterobacter cloacae
gtgatccgccgcctgagcctcagccagcggctggcgctggtggtggtttccctgctgatgctatgcgcggtggcggtatgcgccgtccagttacacagcagcgcgcagtatggcaacgccatggtgcagcgtctgtcgtccgggctggctcaacagattgtcgcccgcgagccgttgctggacgcccacggcgaggtcaaccggctaaccctgaagtcgctgtttgaccgactgatgacctttaatcccagcgtggagctctatctgctgtcgccggatggcgacctgctggccgatgcggcgccgccgggccatatccagcgccagcgtatcgacatggcgccggtgcaggcttttctcaccggcagtgcgtcgccggtgtatggcgacgatccgcgcagtcccgacggacgaaaagtcttcagcgccgccccgctgcgcgtcgacggccaactgcgcggctacctgtatatcattttgcagggggagacgtttaatcagctggcggccgacgcctggcaaaaaacgctgtggagcattgttctgtggacgctgctgctggtggccctgtttggcctgctggcaggggggctggcatggttctgggtcacccggccggtccgcctgctcaccgcccaggtggcggcgagcggccaggacagcatcagcgccatcaaaaccctggcggcccgcagaccggagccccggcctggtaacgaggtggcggtgctcgagaaccgctttattgaccttgcccggcagattgccgatcagtgggatcggctggccgacagcgatcgccagcgccgtgaatttgtggccaatatctctcacgatttgcgcacgccgctgacttcgctgctggggtatctggaaacgctgaccctgaaggatgaatggctgaccgccgaggagcgcaggcagtatctcaccatcgccctgcgccaggggaacaaagtgcgccatctctcgcagcagctgtttgagctggcgcgactggagcatggaggcattaagccgcagcgcgagcgtttcgcgatgggggagctgatttccgacgtggcgcagaagtttgaattaactgcccgcacgcgcgaggtgaacctgcatattgatgtaccgggaccgctgccgctgattaacgccgatgtgtcgatgattgagagggtggtgaccaacctgctcgataacgcgatgcggcatactcccgtcggcggggagatccgtctggcggtctggcaggagaatcaacagcttcaggtcgaagtggcagacaacggagcgggcgtcgatgccgcgctgcgcgacgacctgttccagcggccgtcggcgttgtctacccaggcatcgcgggaggatcgcggcgggttagggttgctgattgtgaaacgaatgctggagctgcacgggggcgatatcagactggtggagtcggtaaccggggcgcggttcaggttcttcgtgccactttga

SEQ ID NO: 139374 - DNA, 603 bp, Enterobacter cloacae
gtgtcccgcgcgggccatccgtcgaaggtgattttccttgccgccgatgcgtttggcgtcctgccgccggtctcccgtctgaccaccgagcagatgcagtaccatttcctgtcgggtttcacctcgaagctggcgggcaccgagcgcggcattacccagccgacgccgaccttctccgcctgctatggcgcggcgttcctgctgcttcacccgacccagtacgccagcgtcctggcggcgaagatggcggaatccggtgccgaagcctggctggtcaacaccggctggaacggcgaaggcaaacgcctgtcgctgcgcgatacccgcagcatcattagcgcgatcctcaacggcactaccggcccgctgcgcgaggagaccatcccggtgttcggtcttgcgatcccgcagagcattccaggggtagacagcgcggtgctggatccgcgtaatggctggagttcagcggataaatggcaggagaaggccgagagcctggctcagctgtttatggataacttcaagcagtacagcgataccgaagcgggcgcgcgtctggcgctggccggtccgcagctgcagaagagcgcggtcgaagcctga

SEQ ID NO: 139375 - DNA, 477 bp, Enterobacter cloacae
atgagcatcacaatccgccaggccaccccggacgacgccaccgctatctacgacatgatttatgaactcgcggtttacgagaaagcccccgaagaggtagtgacgacgccagaggagatcagagagacgctgtttgccagcggcagcaaaaccgaagcgctgatctgcgaggtggcgggcaaagcggtgggctacgcggtgttcttcaccagctactccacctggcttggacgcaatggtatctatatggaggatctgtacgtcacccccgactatcgcgggatcggcgccggcaaagcgctgctgaaaaccatcgcgcaatatgctgtacaacgtcagtgcgggcgtctggagtggagcgtgctcgactggaaccagccggcgattgatttctatctgagcattggcgcgcagccgcaggatgagtgggtgcgttatcgcctcactggcgatgcgctgcgggcctttgcggagtaa

SEQ ID NO: 139376 - DNA, 927 bp, Enterobacter cloacae
atgaatattatgcatcctgtcctgcgccgaattgacctcaacctgttgccggtctttgacgcggtctatcgctcccgctcggtacgcctggcggcggaagagctggcgatgagcacctcggcgctgagccatgcgctttcccggctgcgcagcgccctcaacgatccgctgttctaccgcgaaggccaccggatgtgccccagcgtctatgccagccagctggcgccctctatcgcttcggcgctgaagtttctcaaccaggagctgacgccgccggcggcgtttgtgccggccgccagcaccgactgcatgcagattgcgatcaccgatttcaccgcgttctgcgtctttccgacgctgatgcatcacctgcagcgtgaggcgcccgggctgcggtttgagcttcgttatctgccccacagcccggcgctgaccgagctgctggcgggcgaggtcgacctggccctcgggttcaatacccctgacgagccagcccatcccgatcttgaggagattaactggctgcgggacgaatatgtggtcatcagccaggccaaccggacggcgctgaccctggacgcctaccttgcggcccgtcatctggtggtgaccccgtggaatgagcggcagggggtgctggactgtgagctggagcgacagggctattcgcggcaggtggcgatgaaaaccccctcgatgctgagcgcgccctttattattgagcagagcgacctgttgatggcgctgccccggcgggcggcggagacgatggcccgcgccgcccggctgaccattttcccgctgccgtttccggttccgccgtttgacgtcaagatttacgcccaccaacgcagcgggaaacgcgaggctacccgctggcttatctccctgttgcagacgctggtggcggagtccaccgcttcctga

SEQ ID NO: 139377 - DNA, 852 bp, Enterobacter cloacae
atgcattcaacaacctcacagatgagtacccgtgaccggatcggcgccattctgcgcgtcacgtccggtaactttctcgaacagttcgactttttcctgttcgggttttatgccacctacatcgcccataccttttttccggcgagcagtgaattcgcctcgctgatgatgaccttcgcggtcttcggcgccggctttttgatgcgccccatcggcgctatcgtacttggcgcctatatcgacaaggtggggcggcgcaaggggctgatcgtcaccctgtcgatcatggccaccggcaccttcctgatcgtgctgatcccctcttatcagaccattggcctgtgggcgccgctgctggtgctgatcggccgtctgctgcagggcttttccgccggcgccgagctgggcggggtgtcggtctatctggccgagatcgccaccccgggccgcaaaggcttttacaccagctggcagtcgggcagtcagcaggttgccatcatggtggcagccgcaatgggctttgccctcaacgcggtactggagccgagcgctatcagcgactggggctggcgtattccgttccttttcggctgcctgattgttccgttcatttttatcctgcgccgtaagctggaggagacccaggagtttactgcccgccgccatcatctggcgatgcgccaggtattcgccaccctgctggcgaactggcaggtggttatcgccgggatgatgatggtggcgatgaccaccaccgcgttctacctgatcaccgtctatgccccgacctttggtaaaaaggtgctgatgctcagcgctgagagatcccctcataatttccccaaagcgtaa

SEQ ID NO: 139378 - DNA, 186 bp, Enterobacter cloacae
atggatctcatcgacagcgggatgggtagtcagccacgctcccgcccgggcgtcgccggtgacgatgcggagcgcatccatggcaatcagcggcgccagggcctgggccagcagatcgtgcagataatcattcaccggattgagcttcagcaggcagacctgattctcaataaacagcttgtgtag

SEQ ID NO: 139379 - DNA, 1629 bp, Enterobacter cloacae
atgcagtcaccgatgatttatcaggatctcaccactgccgcgctgctcggccatgcggcgcagtatcacagcgagaccgagattgtctcggtgagtactggcggtgagaaggagcgcagctgctggggggaggtggccagccgtgctcagcggctggcatcggcgctggcgtcgctggggctgccgccgggcgcccgctgcgccacgctggcatggaacaaccgccgccatctggagatctattttgccgtcgcctccggcggctgggtgacgcacaccgtcaatccgcggctgtcggttgaccatctgcggtatatcctcaacgacgctgccgatgaagtgctgttttttgaccagacctttttgccgctggtagcgcagctgctgccgcagctgccgacggtgaaacacgtcgtgctgatggagtcccgcagcgaagcggcgctcagccagctgccctcattgctgttttatgacgagctgttgcagcaggagatggcagactatcgctggccgcagctcaatgaactgactccggcttcgctctgttacacctcgggaaccaccggccggccgaaaggggtattgaacacccatcgttcgctggtcctgcacgccctgagcggcaaccagccggacgccgccggcatatcggcgaaggacagcctgttgccggtggtgccgatgttccatgtcaacgcgtgggggacgccgtttatcgccgccatggtcggcgcgcggctggtgctgccggggccgcacctcgatggcgacagcctgctgcagctgctggccgccgagaaggtgacggtggggtttggcgtaccggtgatctgggccggcttgctggcggcgatgcgccggacagaggtccggctgcctgaatttaaacgtgcgctggtcggcggctccgcgctgccgccgtcgatggccgaggcctttcagcgtgattacggcattgcgctgacccacgcctggggaatgaccgaaacatcgcccatcggcaccatcaacacaccgttgagcaaacatgacgcgctcccggcacaggagcagcaaaagcagcgcgccggtcaggggcggcccattttcggcatcgaactgcaggtggtggacgtggatggcgaaccgttgccccgggatggtcaaagccaggggtatctgcaggtcagagggcactgggtggtagagcaatactatggtcaggacgcgagcgccctgaccgcggcaggctggtttgataccggtgatatcggtacgctcgacgccaatggttatctggtgatcagcgatcgggcaaaggatattatcaagtccggtggcgagtggatctccaccgttgagctggagaatatcgccatcgcgcatccgggggtgcgcagcgcggcggccatcgccgcccgccatccgcgctgggacgagcggccggtgctgctgtgcgtccgtgcggaagggggcgaagtggaggagaccgatctgctgagctggtttgagaagcgggtgcctaaatggcagatcccggaccgggtgatatttgtcgatgcgctgccggtcagcgccacgggtaaggtgctcaaaaatcagctgcgccaggcctacggagagattttaatgagtgagggaaaatga

SEQ ID NO: 139380 - DNA, 336 bp, Enterobacter cloacae
atgccggcgcgccgtccggtagcccttctcgataaaggtccccaccttttcgtttttgaagtccagcagtcgccagccttcatcgataacgttgagttttttcaggctgcggggagactggtacatccggttttcgatatagataatcagcgagaacatcaccgcgaccagcagggactggcgcgactccagcccgcccagctcaaggaccaccatccgggcatcgtcgtgcagggacggctcatcagagttgaagtactccccgtacagcccgttcaccgtgtactggtcgagcaggataatcatgtcatcaagacggctgcgcacccccggtga

SEQ ID NO: 139381 - DNA, 1173 bp, Enterobacter cloacae
gtgcacttcatccaggttgccgttgggactggccatcaccgacatctggtcgcggatacgctcggcggacaggtcaaagttagcgtcgtcgagaatattggcgaacggattaaacttcagcgagtcgccgtcgagatacacgccgcccatgttttcacacagggacttgtagccgtcgcccatgtcgaacacccaggcaaacccgccggagtcgagcacgctacgaatgaggggctgaatcagaccggttttgcccgccccggaggtgccgcagaccgccatgttgaaattggtattgttcattccctcgtagaacaggtcgatgaacgccagctggttacggtaggtgggcgccaggagtcctgccggcgccagcggactgtcagcgacaatcggcagaaggttggccacctggaacgtctccgcccgcttcaccacacctgccgcctgcagctctttgaacaggccttcgccgcatttgaacggcatcatggccagaaaattacgcaggtgatgatagcgggccgggataagctggaagccacccttacggtaactgttgagcacctgctgctcggtagcgagagaggcctctgcgttatcggcggtatacgtggtgatgttaaagaagtaggacaccagagaggtctggttggtcgccagtcgctggcggatatcgccccactcctgcatttcctttatcacgttcggaaagtacttcgcgtaggaggttttgcttttcttctccacgtccatgaatttcaggttggcttcgttctgggtcttcacctggtcctccaccatcagcgtcagtgtgatgacaaaggggcaggagatggagagctccgggttcagcaggttggcgtagttgtccgcagcggtccagagaaaggcgatttccgggtcacactccaggtgatagttcgtcacccgggtcacgcactctttcccgtcccgccccaggcggccaattttcagatgaccggcagtgacctgcatgtcaaagctgtcatccacgcactgatagttcaggtcctgatacgggtccagcttgtacggcacccggtacatctcatgcggatccgggttaatcagctcccgcatcagttcgaccatcccggccgcatcgaggatacgcgtcgggatgtaagccccgccgagcgatgcccgtaa

SEQ ID NO: 139382 - DNA, 393 bp, Enterobacter cloacae
atggtgttattttttagaaaatatggttttttgtttatccctccagtctactggctcatctatctgggagtcaggctgacgtacaatggactggtcggggagttttctcctgatttctttcagagtattcgacatgatggtgtctttatcatctgtagtttgtgcgttttttattttttctgcttagaggtggggggtagtgatgtggagttctcagcgaacattctgttcctgattgttttctttcatgtggttttattatttatcactctgcttatttgtttgtggcaaggggcgatgttgttggatgcgatctttacgggtcagattattgcttccatgtgtttattgtttttcattcctgtattttccattataagaaggagtttctag

SEQ ID NO: 139383 - DNA, 291 bp, Enterobacter cloacae
atgaaagtaaacgtcgcgagcgcggttaaaaacattgttaactgggcctttccactcttttttttgggtggtctgctgtatcttgtttacgatgattacagagataacggtacagcgactgaagaacagttattaatgatttctcatgaaataccctgtgccggtgaggattttcgaacggcactccgtaatagcccgggaccattaacccttcgcgatgcgaagaaaattgccgctaaatgtaacgagaaatataaacaacttaacgcactgaacgctatgagcaaataa

SEQ ID NO: 139384 - DNA, 129 bp, Enterobacter cloacae
atgccgacaggcgcttttaccagccctgttaataaactggactgtgatggcatcatcattaatgtgccaggtgaacggtattatgcgtatatccatcagtgggaattataccaggcgaataaaaaatga

SEQ ID NO: 139385 - DNA, 486 bp, Enterobacter cloacae
gtggaagatactggctgcgaaggtcgcggcgaagccgacggccgccagcggtttccagatgcctttccagaacttgacggtctggctgatctccgggttttccggcaggccgtggtacagattcggcttgtcggcatggtgcagcacgtacatgacgtgggtgccaccgacgccggccggatcgtacaggcccgcattgtcataaccgcgggttttcagctcagccacgcgttcgccggccagcgttttcatatcctctttggagccaaagtggattgcgccggtcggacaggttttcacgcaggcaggctcctggccgacggtcacgcggtctacgcacagggtacatttgtagacgcggttgtcttccgggttcagacgcggtacatcgaacgggcagccggcgatacagtagccgcagccgatgcactgctcggactggaagtcgacaatgccgttggcgtactgaatgatcgcgccttctga

SEQ ID NO: 139386 - DNA, 2415 bp, Enterobacter cloacae
atgaccaaccactgggttgatattaaaaacgccaacctggtcgtagtgatgggcggtaacgccgcagaagcgcatccggtggggttccgctgggcgatggaagccaaaattcataacggcgccaagctcatcgttatcgatccgcgctttacgcgtacggcgtcggtggctgatttctataccccgattcgttccggtaccgacattaccttcctgtcgggcgtgatcctgtatctgctgaataacgaaaaattcaaccgtgaatacaccgaagcctacaccaacgccagcctgatcgtgcgtgaggactatagcttcgacgacgggctgttcagcggctataacgcagaaaaacgtcagtacgacaaaaccagctggaactatgagctggacgaaaacggcttcgccaaacgcgatactacgctgcaacatccgcgctgcgtctggaacctgctgaagcagcatgtttcccgttataccccggatgtggtcgaaaacatctgcggtacgccgaaggccgacttcctcaaagtctgtgaatacattgctgaaaccagcgcgccggataagaccgcatcgttcctgtacgctctcggctggacccagcactccatcggtgcgcagaatatccgcaccatggcgatgatccagctgctgctcggtaacatggggatggcgggcggcggcgtcaacgccctgcgcggccactccaatatccagggcctgaccgacctcggcctgctctccaccagcctgccaggctacatgtcgctgccgaacgaaaaacaggccgacctgcagacctacctgacggctaacacgccgaagccgctgctgaaagaccaggtcaactactggggcaactatccgaagttcttcgtctccatgatgaaagccttcttcggcgacaaagccaccgcggaaaacagctggggctatgactggctgccgaagtgggataagagctacgacgttctgcagtacttcgagatgatgaatcagggcaaagtgaatggctatatttgccagggctttaacccggtcgcctcgttcccgaacaaaaacaaggtcgtcgcttccctgtcgaagctgaagttcctcgtgactatcgacccgctcaataccgaaacgtccaccttctggcaaaaccatggtgagtcgaacgatgtcgatccggcgaaaatccagaccgaagtgttccgtctgccctccacctgcttcgccgaagagaatgggtctatcgtcaactccggccgctggctgcagtggcactggaaaggcgcggacgccccggggatcgccgtcaccgatggtgaaattctcgccggtatcttcactcgcctgcgtaagatgtatgccgaagagggtggcccggcgccggagccggtgctcaacatgacgtggaactactccacgccacacgagccggcatcggaagaagtggcgatggaaagcaacggtaaagcgctggcggatatcaccgacccggcaaccggcgcggtgatcgtcaagaaaggccaacagctgagctcctttgcgcagctgcgagatgatggcaccacctccagcggctgctggatcttcgccgggagctggacgccggaaggtaaccagatggcgcgccgcgataacgccgatccatccggtctcggcaataccctgggctgggcctgggcctggccgctcaaccgccgcatcctgtataaccgcgcctccgcggacccgcagggtaaaccgtgggatccgaagcgtcagttgctgaaatgggacggcgccaaatggggcggcgtggatattccggactacagcgccgccgcgcctggcagcgacgtcggtccgtttatcatgcagccggaagggatgggccgtctgttcgctatcgacaagatggcggaaggaccgttcccggaacactacgagccgtttgaaacgccgctcggaaccaacccgctgcacccgaacgtggtctctaacccggccgctcgcgtcttcaaaggcgatctcgagcagatgggtaaggccgagaagttcccgtacgtcggcaccacttaccgtctgaccgagcacttccactactggaccaagcatgcgctacttaacgccatcgcccagccggaacagttcgtggagatcggggaaaaactggcgaataagctcggcatcggccacggcgataccgtgaaagtttcctccaaccgcggctatatcaaagccaaggcggtggtgaccaaacgtattcgcacgctgaaagttgacggtaaggatatcgataccatcggcattcctattcactggggctatgagggcgtggcgaaaaaaggctttattgccaataccctgacgccgttcgtcggtgatgcgaatacgcagacgccggagttcaaagctttccttgtgaacgtggaaaaggtgtaa

SEQ ID NO: 139387 - DNA, 792 bp, Enterobacter cloacae
atgccggaaggtccggagatccgccgtgcggcggataaactggaggcggcaataaaaggcgaacccttaaccaacgtttggttcgcctttcctcagttgcaaccctatcaaactcagctaattggtcagcgggtgacccatatcgccacccgcggcaaggccctgttaacccacttctccggcggattgaccctgtatagccataaccagctgtacggcgtctggcgggtggtggatgccggcgttgagccgcaatcgaaccgcgtactgcgtgtcaggctgcagaccgccagcaaggcgattttgctctacagcgcgtcggacattgatatcctcacggcggagcaggttgccaaccatccgttcttgctgcgcgtcggaccggacgtgctggacatgacgttaaccgcggagcaggtgaaagcgcggctgctgtcggccaaattccgcaatcgtcagttttccggcctgcttctggatcaggcttttcttgccgggctcggaaactatctgcgggtggaaattctctggcaggtgggattaagcgggaagcgtaaaaccgctgaactgagcgacagtcagctggatgcgctggcgcacgcgctgctcgatatcccgcggctgtcctatcgtactcgcggtctggtggatgacaacaagcatcatggcgcgctgtttcgctttaaggtcttccatcgcgatggggaaaggtgcgaacgctgtgggggaatcattgagaagacgacgctctcctcgcggccattttactggtgtccaggatgccagcattaa

SEQ ID NO: 139388 - DNA, 645 bp, Enterobacter cloacae
atggctggcgtattgattaccggttttgagccgttcggcggcgaaacggttaacccttcatgggaagtggttaagcagctggatggcatgattattcgcggacagcaggtggtggctaaacagttaccctgcgtattcggcgaagcgctgacggtgctgaaggcggcgctggaaacctatcaaccgcggctgacgattgccgtcggacaggccggcggccgtgtcgatattaccgtcgaacgtgtagcgatcaatgtcgatgatgcgcggatccccgacaataaaggccagcaaccgatcgatgagccgatcgtcgctaatggccctgcggcctgcttcagtacgctgccgatcaaagcgatcgttagcgcgttgcgccagcaggggatcccggcctcggtgtcgcaaaccgcgggcaccttcgtctgcaatcacgtgatgtatggtttgctgcatcagctgcagggaaaaagcgggcagaagggcggttttatccatattccttatctgcctgaacaggcggcggcccacccggggcaggcgagtatgtcggtcgcgacggtacgcgcggcgctggaaacggcgattgccgtcgcccttgaacagaatgacgatgtcaaaattggcggcggcgccacccattaa

SEQ ID NO: 139389 - DNA, 996 bp, Enterobacter cloacae
atgaatttccagcaaacctatttatactggctggccggcgcggtactgctggtcgtggctatcatgtcctggcgcgacaaaagcaatccgcggcgtctgacaaccggtctgttctggggcctgtacgggctggtgttcttgctcggcgactggacatatcaactggtgggcgataagcgtacggtgaatatcgctgtcggcggggtggtggtcgttctggcgctgatcgccggttttggcggcgtgcgcctcggcagctaccatcagcgtacccaggaagagaaaaccgccagcgcgaaacgcctcggcaacaaacttttctttccggcgctggcgattccggtcgtcaccgtcattggcgtactgctgtttaacaatctgccctcatggcaggtggcgctcttcgggccgggcaaccacgcgacgctgattactctgttctcgatgactgtcggtacgctgattggcctggcgatggcgattcgtatgacgcatgaaacggtggcgcagccaatgcaggaagcgcgccgtttgcttgattccgtcggctgggcctttatcctgccgcaaatcctcgcggtgctggggctgctatttaccgcagcgggcgtcggaaccagcatttcatggctgaccgagcactatctggcggtcgataaccgctttatcgccgtggctgtgtatgccatcggcatggcggtgctgacaatggtgatgggcaacgcctttgccgctttcccgattgtgaccgccggagttggcattccgattttagtcctgcagcacggcggcaatccggcggtaatggcggcgattggtatgttttccggctactgcggcacgctgatgacgccgatggcggcgaacttcaatattgtcccggcggcgctgctggaactgccggataaaaacgcggtgattaaagctcagataccgaccggtatcctgctgcttatcgtcaatgtattcttactctatttcctgatgttcctgtaa

SEQ ID NO: 139390 - DNA, 726 bp, Enterobacter cloacae
atgcaagaggcgatatccctctggccgctaatcggcattgccgtgattgtggtcggttttgtattacgctttaacccggtgctggtggtgattatctccgggatcgtcaccggcgtggcggcgcatatgccaatagccactattctggagaaactgggcgagggcttcctgaatacccgtaatctgccgtttattctgctgctgccgctggcggtgatcgggctgctggagcgccatggtctgaaagagcgggcgcaggcgtggatcgcgaagatccgtagcgcgaccgccggacgtctgctgatcgtctatctgtttgtgcgcgaagccaccgccgctctggggttgaccagcctcggcggacatccgcaaatggtgcgcccgctgctggcgccgatggcggagggggcggcggaaaagcgctttggcccgctgccgggcaatgtacgctaccgcctgcgcgcgatgtcggcggcgaccgataacgtcgggctgttcttcggcgaagatatttttgtcgccttcggcgcgatcatcttcatgcacaactttatgctggagtcgggtgggatccagacagaaccgttgcatattgccctgtgggggatcccgacggcgatctgcgcctttctgatccacgccgcgcgcctgtggcgactcgatcgccatctccagcgcgagctggaccggataaacgccggacaggcgaaaggcggtgcggcatga

SEQ ID NO: 139391 - DNA, 429 bp, Enterobacter cloacae
gtgtttgttaccttttttcgcaggacgcgcagcttttgcactgcgagtacggccacgaccaccttcaacttcgcggtcgttgtcgtcttctgcctgacgcgcatgctgagacgtggtgacgtgataatcgctggtatcttcagttggttcagcggtattcacaccgttcttctcgttttcttctgccatgcgacgcgcttcttcggcgacgcggcgagcttcttcttcaagcttgcggcgggcttcttcttccgctttacgcttcagctcggcagcttcattttcacggcgggctttttcagcctgggcagttttggtcatttcgtcggtctgttgattgctcactttgtctttttccgcagcgtcacgcttcgctttttcaccggcgtcgcgtttcgctttttctgcggcctcacgttcagcttttaa

SEQ ID NO: 139392 - DNA, 459 bp, Enterobacter cloacae
atgaccttcacggacctggtgatcatcctgtttatccttgcgctactggcctacgcgatatatgaccagtttattatgccgaggcgaaacggcccggtactgctggccatccccctgcttcgccgcagtcgcgttgacggcatgatctttgtcggcctcaccgccattctgatctataacaacatcacccagcacggcacggcgatcaccacctggctattatctgcgctggcgctgatggggctctatttattctggatccgtacgccgaaaatcatttttaaaccgcacggctttttcttcgccaacgtgtggatagaatatcagcggattaaagagatgaatttatccgaggacggtgtgctggtgatgcaattagagcaacggcggctgctgatacgcgtacgaaatatcgacgatctggagaagatatacaaacttctcattacaactcaatga

SEQ ID NO: 139393 - DNA, 852 bp, Enterobacter cloacae
atggttgatatgactaaaaataccaccgagaaaaaactcacacagagtgatattcgtggcgtgttcattcgttctaacctgttccagggttcatggaacttcgaacgtatgcaggcgctggggttctgcttctctatggttccggcgattcgtcgtctgtacccggagaacaacgatgcgcgtaagcaggcgattaagcgtcaccttgagtttttcaacacccacccttacgttgccgctccggtactgggcgtaaccctggcgatggaagagcagcgcgccaatggcgcagagattgacgatggcgctatcaacggcatcaaagtcggtctgatgggaccgctggccggcgttggcgacccgatcttctggggtaccgtgcgtccggtgtttgcagccttaggcgccgggatcgcgatgagcggtagcctgctcggtcctctgctgttctttatcctgttcaacgcggtgcgtctgctgacccgttactacggtgtcgcctatggttatcgcaaaggcgtggatatcgttaaagatatgggcggcggcttcctgcagaaactgactgagggggcgtcaatcctcggcctgtttgtcatgggggcgctggttaacaagtggacgcatgtgaacattccgatggtggtgtcaaaaatcaccggctctgacggacaggttcacgtcaccacggtgcagactatccttgatcagctgatgccgggtctggtgccgctgctgttgaccttcgcctgtatgtggctgctgcgtaagaaagttaacccgctgtggatcatcgttggcttcttcgtcatcggtatcgccggctacgcggtcggcctgctgggtctgtaa

SEQ ID NO: 139394 - DNA, 801 bp, Enterobacter cloacae
atggagattacccttcttcagattgtgctggtgttcatcgtcgcgtgtattgcgggtatggagtcggtacttgatgaatttcagttccaccgtcctctgatcgcctgtacgctgatcggcgccgttctcggcgatatgaaaaccggtattatcatcggcggtacgctggagatgatagccctgggctggatgaacatcggtgcggcggtagcccctgatgccgcgctggcgtccattatttccaccgtcctggttattgccggccatcagagcatcggcgccggtatcgcgctggctatcccgctggcggcggcaggccaggtgctgaccatcatcgtgcgcaccatcaccgtggccttccagcacgcggcggataaagcggcggagaatggcaacctgactgccctgtcgtggctgcacgtctcgtccctgttcctgcaggcgatgcgtatcgctatcccggccgttatcgtggcgatttccgtcggcaccagcgaagttcagggcctgctgaatgctatcccggaagtggtcaccagcggtctgaacatcgccggcggtatgatcgtggttgtcggttatgcaatggtcatcaacatgatgcgcgcaggctatctgatgccgttcttctacctcggcttcgtcaccgccgccttcaccaacttcaacctggtggccctgggtgtgattggtgcggtcatggcaatcctctacatccagctgagcccgaaatataaccgcgtcgccggtgcgccggctcaggcggctggtaacaacgatctcgataacgaactggactaa

SEQ ID NO: 139395 - DNA, 906 bp, Enterobacter cloacae
atgctgttgggcgagcaggaaaacgttggctggatcgatttcgttccgggtgaaaatgccgaaacgttgatcgagaaatacaacgcccagttggcaaaactggataccagtaaaggcgtgctgtttctcgtcgatacatggggaggcagccctttcaacgctgctagccgcattgtcgtcgataaagagcattacgaagttatcgccggcgtcaatatcccgatgctggtagaaaccttcatggcccgcgacgacgatccttcctttgatgaactggtcgccttagcggttgaaaccggcagcgaaggcgtgaaagcgcttaaagccaaaccggtggaaaaagcggcccctgcgcccgcgcctgccgcagcgccaaaagccgccgcaccggccaaacccatgggcccgaacgactacatggtaattggccttgcgcgtatagacgaccgtctgatccatggtcaggtcgccacccgctggaccaaagagaccaacgttacccgcatcatcgttgtcagtgatgaagtggccgcggataccgtgcgtaaaactctgctgacccaggttgcgccgccgggcgtcaccgctcacgtggtggatgtggccaaaatgatccgcgtctacaacaaccccaagtatgccggacagcgcgttatgctgctgtttactaacccgaccgacgttgaacgtatcgtcgagggcggcgtgaaaatcaccagcgtcaacatcggcggtatggcgttccgccagggtaaaacccaggttaacaacgcgatttcagtcgatgccaaagatattgaggcgtttaaaaagctgaacgcccgcggtatcgagctggaggcacgtaaagtgtccaccgacccgaaactgaaaatgatggatctgatcgctaaggttgataaataa

SEQ ID NO: 139396 - DNA, 747 bp, Enterobacter cloacae
gtgactaaaatcaaacttctggcactcggcgtgctgatagcgacgtccgccagcgcggcgcatgccgacgggaagttcactcttggggctggcgtaggggtcgttgagcatccgtataagcaatatgatgcggatgtctatccggtaccggtcattagttatgagagcgaaaacttctggttccacggtctgggcgggggttactacctgtggaatgacaccaacgataaactgtcgattacggcctactggtcgccaatgtacttcaagccgggcgacagcgacagcgagcagatgcgtcgactggataaacgtaaatcgaccgtgatggccggtctttcttatgtccacaacacgccctatggcttcctgcgcacgacgattgccggcgatacgctggataacagcaacggtattaactgggatctcgcctggctgtaccgttacaccaacggtaacctgacgctgacgccgggtattggcgtggagtggaacagcgacaatcagaacgaatactactatggtgtctcccggcacgagtcgcgccgcagcggcatgcgcagctatgacccggacagtagctggaacccgtatctggaactgtcggctaactatcgcttccttggtgactggagcgtttacggcgtggcgcgctacacgcgtctgtcggatgaaattaccgacagtccgatggtggataaatcctggagcggtctgatctccaccgggatcacctacaccttctga

SEQ ID NO: 139397 - DNA, 855 bp, Enterobacter cloacae
atggtgaaaaaaacagtacgcttcggcgagcaggcggcagtgccggccatcgggctgggcacctggtatatgggcgaacatgcggcgcagcgtcagcaggaagtggctgcactgcgggcgggcatcgaccatggactgacggtgatcgatacggcggaaatgtacgccgacggcggggcggaggaagtggtgggccaggcgatccgcggtctgcgcgatcgggtagtgctggcctccaaagtctatccctggcatgccggcaaagcggcgatgcaccgcgcctgtgaaaacagcctgcgccggctgcagaccgactatctggatatatatctcctgcactggcgcggggatatcccgctgcaggagacggttgaggcgatggagaagctggtggctgagggcaagatccgccgctggggcgtctctaatctggacaccgaggatatgcaggcgctgtggcggacggcggatggcgagcactgtgcaaccaaccaggtgctctaccatctcgcatcgcggggcattgaatacgatctcctgccctggtgccagcagcacagtctgccggtgatggcctactgcccgctggcgcaggcggggcgcttacgcgatggactttttcagcatagcgatatcattaatatggctaacgcgcgggggattacggtagcgcaactgctgctcgcctgggtgattcgtcatccgggagtgctggcgatcccgaaagcggccagtattgagcatgtggtgcagaatgccgcagcgctcgacatcgtccttagtggggaagagctcgcgcagctggaccgcctctatccgccgccgcagcgaaaaacccggctggatatggtttaa

SEQ ID NO: 139398 - DNA, 885 bp, Enterobacter cloacae
atgataaataaaatttttgctctcccggtgaatgaaaccatttctcccgtgatctcccgtcgccagctggacgacctggagctgattgtcatcgaccatccgcaggtgaaagcctctgtggcgctgcagggggcgcacctgctctcctggaaacccgccggtgaagaagaagttctgtggctgagcaacaacaccccgtttaaacagggcgtcgccctgcgcggcggcgtgccgatttgctggccctggtttggtccttctgcgcagcaaggtctgccgtcgcacggctttgcccgcaatctgccatggaccctggaaggtcatgacgaagacgacagcggcgtaatgttgacctttgcgctccagcacagcgctgaaaccatgaagctctggccgcacgagttcaccctctatgcccgctttaagctgggcaagacctgtgaaatcgagctggaagcccacggtgaattcgagaccacctctgccctgcacagctatttcaacgtcggcgatatcgcggcggtgaaggtgagcggtcttggcgagcgctatatcgataaagtgaacaatgccgaagaaggcgttctgagcaacggcgtgcagaccttcccggaccgcaccgatcgcgtctatctcaacgccgacagctgcagcgtgatccatgacgacgcgctaaaccgcactatcgacgtggtgcatcatcatcagcacaatgtggtggcctggaacccgggcccggcgctgtccgtcagcatgggcgatatgccggacgatggctacaaaaccttcgtttgcgtcgaaacctgctgcgtaacccagccgcagaaagccagcgaagagacgccctctcgcctggcgcaaaccatcagcgtgaaaaaacgctaa

SEQ ID NO: 139399 - DNA, 504 bp, Enterobacter cloacae
atggctcagtccctgctcctcgtaataccggatcgcgtcctgtgcccaggcatagcgcagggagtggggagagtattcacccgtcagccctgcattacggagattgttgtgccagtagtccatcgcggatttcagatccggtttgtcaatgagatgcccgttacgctccccggcaatctcaagtgccgctttcaccgcctggcgaactgcttcccggtccgtcacctgcgtcatgcgcggtcgtccgcctttggtgccgaagatcaccggcagacgttcagcgcctttttccagctgtttatcccaggttttcagcgactggcagcactgtaccgcttcctgaccacgcagccccatcacccgcgccagttgcaggctggccgcgagacctgcgtcggtttgctgtatccgctccagtacctgatggtaaagtgcatccggaatggcccggtgcatcccgtcacggctggcaccactgataccgagcgactggttgctgattaa

SEQ ID NO: 139400 - DNA, 231 bp, Enterobacter cloacae
atggaaaagacaaccgtattcaaaagcaaccgtagccaggcggtgcggctgccaaaagcggtggctttaccggaggatgtcaaacatgtggatatcgttgcggtagggcgaacgcgcattattactcccgcaggcgaaagctgggacagctggtttgatggtgagagcgtgacgtctgactttatggctacccgtgagcagcccggtgaccaggacagggaagggttctga

SEQ ID NO: 139401 - DNA, 405 bp, Enterobacter cloacae
atgctcaaatacatgctggataccaatatctgtatctatacgatcaaaaataaacctcaggcagtccgggaggcgtttaaccagcattacgggcggatgtgtatcagttcagtcacgctgatggagctgatttatggcgcggaaaagtccgccagcccggagaaaaacctgcgcgtggtcgaaggatttatcgcccggctggaggtgctgaattatggtatcgacgcggcggtacagacggggcaaatccgggctgaactggcaagagcaggtacgcccgttggcccgtatgacagcatgattgcggcccacgcccgtgcattgggtttaattctggtgacgaacaacacccgtgagttcgaacgtattaatggcttacgcctggaagactggagtatcaactaa

SEQ ID NO: 139402 - DNA, 864 bp, Enterobacter cloacae
atgctcggccagcggacgatgcagcaggcgcccttcttcatcctggtaaggttcgcaggcttcgctcggcacccaggtggcgacaaaacgctcctcctgcggcgtgacgatatgcgccttcacgtcgaagaaatctttggcgacgaaattttcaatctcttcatcgcgacggaccaccaggccaagtaccggggtctgcacccgccccaccgagagcaccccctgatagccggcgttgcgccccagcagggtgtaggcgcgggtcatattgatgccgtacagccagtcggcgcgggcccgcgccagcgccgacacgcagagcggcacgaactcgctgttggcgcgcagacggttgatcgcccgctccaccgcctgcgggttgagatcgttaatcagacagcgctgcacctgctgacgcttctccggcgccagctgcaggtagtcgagtacttcgtccaccagcagctgcccttctctgtccgggtcgccggcgtggataacctcctcggcgtcgccgagcaggcgcttgatgacattcagctgtttggtgaccgagggctttggctgcagctgccatttctccggcacaatcggcagatcgttgagattccaccgggcatagcggctgtcgtagatgtccggctgcgcctgctccagcaggtggccgatacaccaggtgaccacctgcccgttgccgcactcaatatagccatcgcctttgcggtgcggtttaggcaacacatcggcgatagcccgaccgagactcggtttttctgcaataaacaaccgcatcgaatcaacggatctcgatcatgggtcgcccgccgcgggcggtcaccagctcgccgatggcggccagcttaa

SEQ ID NO: 139403 - DNA, 1044 bp, Enterobacter cloacae
atgagcgagcaagccattcgtttaacgcaatacagccacggagccggttgtggttgtaaaatttccccgaaagtgctggaaactatcctgcatagcgagcaggcgaagtttgtcgatccaaacctgcttgtcggcaacgaaaccagcgatgatgccgccgtttacgatctcggtaatggcacctcgatcgtcagcaccaccgatttctttatgccgattgtcgataacccgttcgactttggccgcatcgccgccaccaacgccatcagcgatattttcgctatgggcgggaaaccgattatggcgattgccatcctcggctggccgatcaacaccctggcgccggaaatcgctcgcgaagtggtggagggcgggcgctttgcctgccagcaggcggggatcgcgctggcgggcggccactccattgacgccccggagccgatcttcggtctggcggtcaccggcgtggtgcccaccgagcgcatcaagaaaaacagcaccgcccaggcgggttgcaaactgtatcttactaaaccgctggggatcggcgtactgaccaccgcggagaaaaaatcgctgctcaagccagagcatcagggactggcgacggagaccatgtgccagatgaacctcgccggcgccgcgtttgccgccatcgacggggtgaaggcgatgaccgacgtcaccggctttggcctgctcggccacctcagcgaggtgtgccgcggggccggcgtgcaggcgcagctgcgctatgccgatatcccaaaactgccgggggtggaggactatatcgccgccggcgcggtgccgggcggcaccgggcgcaactttgccagctacggccatctcatgggcgagatgccgacggagtggcgggatctgctgtgcgatccgcagacctccggcggtctgctgctggcggtgaccccggaggcggaggtggaagttcaggccgccgcggcggagttcggcattaagctggccgccatcggcgagctggtgaccgcccgcggcgggcgacccatgatcgagatccgttga

SEQ ID NO: 139404 - DNA, 747 bp, Enterobacter cloacae
atgaaaaagcgtgttcttgccctttgcctggccagtttcttctccgttaacgcctttgctctggttccccccgggaacgatgtcaccaccaagcccgatctctactatctgaccaatgcccaggccattgacagcctggcgctgttgccaccaccgccggcggtgggcagtatcgcatttttaaacgatcaggcgatgtatgagcaaggacgtctgctgcgcaataccgagcgcgggaagctggcggcagaggatgccaacctcagcgcgggcggcgtagccaacgccttctccagcgcctttggttcgccgatcaccgagaaagacgcgccgcagcttcacaaactgctgaccaatatgattgaagacgccggtgacctggcgacccgcagcgcgaaagagaaatacatgcgcattcgcccgtttgcgttctatggcgtctccacctgcaacaccaccgaacaggacaagctggcgaaaaacggctcttacccgtccgggcatacttctatcggctgggccaccgccctggtgctggcggagatcaacccgcagcggcaaaacgaaattttgaagcgcggctatgagctcggcgagagccgggtgatctgcggctatcactggcagagcgatgtcgatgcggcgcgcatcgtcggctccgcggtggtcgctacgctgcacaccaacccggccttccagcagcagttgcagaaagccaaagatgaattcgcgaaaaggcagaagtaa

SEQ ID NO: 139405 - DNA, 2829 bp, Enterobacter cloacae
gtgcagaaccgcgtcgcgcaggccgaagcgcgtctgccggaggatgtacgccgtctggggatcaccacccagaagcagtctccgacgctgaccctggtggtgcatctgttctcccccggcgggaagtacgactcgctgtatatgcgcaactacgccacgctgaaagtgaaggatgagctggcgcgcctgcccggcgtcggccagatccagatttttggctccggtgaatatgcgatgcgcgtctggctggatcccaataaggtcgctgcccgcggtttgacggcctcggatgtggtgacggcgatgcaggagcaaaacgtccaggtgtctgccggacagcttggcgccgagccgctgccgcaggagagcgatttcctgatctccattaacgcccagggccgtctgcataccgaagaagagtttggcaatatcattctgaaaacggcgcaggacggctcgctggtccgcctgcgcgacgtggcgcgcatcgagatgggttccggtagctatgcgctgcgctcccagctcaacaataaggatgcggtcgggatcggtatcttccagtcacccggcgctaacgccatcgatctgtcgaacgcggtacgcgccaaaatggccgagctggccacccgcttcccggaagatatgcaatgggcggcgccgtacgacccgacggttttcgtccgcgactccatccgcgcggtggtgcagacgctgctggaggcggtagtgctggtggtgctggtagtgatcctgttcctgcagacctggcgcgcgtcgattatcccgctgatcgcggtgccggtatcggtggtgggtaccttcagcattctctatctgctgggcttctcgctgaataccctgagcctgttcgggctggtactggcgattggcatcgtggtggacgacgccatcgtggtggtggagaacgttgagcgtaatatcgaagaggggcttgcgccgcttgccgcggcgcatcaggcgatgcgtgaggtctccgggccgattatcgccattgcactggtgctgtgtgcggtgttcgtgccgatggcgtttctctccggggtcaccggccagttctacaaacagtttgcggtgaccatcgccatctcgacggtgatctcggccatcaactcgctgacgctctccccggcgctggcggccctgctgttaaagccgcacgacgcgaagaaagacctccctacccggctgatcgatcgtctgtttggctggattttccgtccgtttaaccgctttttcctgcgcagctcgaacggctatcaggggctggtgagcaaaaccctcggacgccgtggcgcagtgtttgcggtgtacctgctgctgctctgcgccgcaggggtgatgtttaaagtcgtccccggcgggtttattcccacccaggataagctgtatctcattggcggcgtgaagatgccggaagggtcgtcgctggcgcgcaccgacgcggtgatccgcaaaatgagcgagatcgggatgaataccgaaggggtcgactatgcggtcgctttcccggggcttaacgcgctgcagttcaccaacacgccgaataccgggacggtcttttttggcctgaaaccgttcgaccagcgcaaacacacggcggcggaaattaacgcggagattaacgccaaaattgcgcaaatccagcagggctttggcttctccatcctgccgccgccgattttaggactgggtcagggttccggctactccctgtacatccaggatcgcggtgggctgggctatggcgcgctgcaaagcgcggtgaatgcgatgtccggggcgattatgcagacgccggggatgcacttcccgatctcgacttaccaggctaacgtgccgcagctggacgtgcaggtcgatcgcgataaggcgaaagcgcagggggtatcgctaaccgatctgttcggcacgctgcagacctatctcggctcgtcttatgtcaatgactttaaccagttcgggcgtacctggcgcgtgatggcccaggctgacggaccataccgcgaaagcgtggaagatatcgccaatctgcgcacccgcaataatcagggcgaaatggtaccgatcggcagtatggtgaatatcagtaccacctacgggccggatccggtgatccgctacaacggttatccggcggcggacctgattggcgatgccgatccgcgggtcctctcttcttcacaggcgatgacgcatctggaggagctgtcgaagcagatcctgccgaatgggatgaatattgagtggacggatctcagcttccagcaggccacccagggcaacacggcgctgatcgtcttcccggtggcggtgctgctggcgttcctcgtgctggccgcgctgtatgaaagctggacattgccgctggcggtgatccttatcgtaccgatgacgatgctctccgcgctgtttggcgtctggctgaccgggggcgataacaacgtcttcgtgcaggtgggtctggtggtcctgatgggcctggcctgtaaaaacgccattctgatcgtcgagtttgcccgcgagctggagatccaggggaaaggcatcatggaagccgcgctggaggcgtgccgcctgcgtctgcgcccgatcgtgatgacctccatcgcctttatcgccgggaccattccgctgatcctcggccacggcgcgggggcggaagtccgcggcgtcaccgggatcacggtgttctccgggatgctgggcgtgacgctcttcggtctgttcctgacgccggtgttttacgtgacgctgcggaaactggtgacccgcaggaagccggtccaggaggatctgcccgcctag

SEQ ID NO: 139406 - DNA, 1086 bp, Enterobacter cloacae
gtgagcatcatccagcacgttggcgaacgggttaaacttgagggtatcgccatcgaggtatacgccccccatgttttcacacagggacttatagccatcgcccatgtcgaacacccaggcaaacccgccggagtcgagcacactgcgaatgaggggctgaatcagaccggttttacccgccccggacgtcccgcagactgccatgttgaaattggtattgttcattccctcgtagaacaggtcgatgaacgccagctgatttcggtaggtgggcgccaggagtcccgccggcgccagcgggctgtcagcgacgatcggcaggaggttagccacctggaacgtctccgcccgcttcaccacgcctgccgcctgcagctctttaaacaggccctcaccacacttgaacggcatcatggccagaaagttacgcaggtgatggtagcgggccgggatcagctggaaaccgcctttacggtagctgttgaggacctgctgttcagcggcgagagaggcctctgtgctgtctgcggtgtacgtggtgatattaaagaagtaggacaccagggaggtctggttggtcgccagtcgctggcggatatcgccccactcctgcatttcctttatcacgttcggaaaaaacttcgcgtaggaggttttgcttttcttctccacgtccatgaatttcatgttggcttcattctgggtcttcacctggtcctccaccatcagcgtcagcgtgatgacaaaggggcaggagatggagagctccgggttaagcaggttggcgtagttatccgcggaggtccagaggaaggccatttccggatcactctccagatggtagctcgtcacccgggttacgcactctttcccgtcgcgccccaggcggccaattttcagatgaccggcggtgacctgcatatcaaagctgtcatcgacacactgatagttcagatcctgataggggtccagcttatacggtacgcggtacatctcgtgcgggtccgggtttatcagctcgcgcatcagttcgaccagcccggcagcatcaaggatacgcgtcggaatataggcaccgcccagtga

SEQ ID NO: 139407 - DNA, 393 bp, Enterobacter cloacae
atgatgctgttttttagaaagtatggttttttgtttatccctccagtctactggctcatctatctgggagccagactgacttacaatggactggcaggagagttttctgctgatttctttcagggtattcgacatgaaggcgtctatattatctgtagtttgtgtgtattttattttttctgcttagaggttgaagttggtgatggggagttctcagcgaacattctgttcctgattgttttctttcatgtggttttattatttatcactctgcttatttgtttgtggcaaggggaggtgttgttggattcgatctttatgggtcagattattgcctccatgtgtttattgttttttattccagtgctttccattataagaaggagtttctag

SEQ ID NO: 139408 - DNA, 2082 bp, Enterobacter cloacae
atgggctgggtgcagcgccagggcggaagcgtgaatgccaccaccctggctcgccatagcgcgttctttttcgaggttgccgccgatgctctggctgacggtgtcgcgcgtctacaggagatgctgcaggccccgctgctgctcagggaagatattcagcgcgaagtggcggtgattgacgccgagtaccgcctgatccagcagcatgagccatcgcgccgggaagccgcggtgcgccacgccgccagcgcgcccgcggcgtttcgccgctttcaggtaggcagcgccgacgcgctggcgggcgatctcgctgcgctgcaggccgccttaggcgattttcaccgcacccattacgtcgcccggcgaatgcagctctggctgcaggggccgcagtcgctggaggcgctcggcgagctggcggcccgtttcgccgccgggcttgccgcaggcgaggcgccgccgccggcgccgccgctgcgcctgggcgagttcactgcactgcagctagcggtctccagccagcccgcgctgtggcgctgcccgctgatcgctttaagtgacaatgtcacgttaatgcgcgagtttttgctggatgaagcccccggcagcctgatggccagcctgcgccagcgccggctggccggggatgtggcgctgaactggctgtatcaggatcggcacctcggctggctggcgctggtcttcgccagcgaccggccggaagaggtcgaccggcagataacccactggctgcaggcgctacagcaaacgacacctgagcagcagctacactactatcagctatcccgccgccgctttcaggcgctgtcgcctctcgatcagctgcgccagcgggcattcggctttgcccccggcgcgccgcccgccgggttcgccgatttttgcgccgccctgcaggccgccccgtcggtcagcctggcctgtcagaccgtttccccaggggagtctgttgccacccagggctttagcctgccgcttagccgctggcgccgccgccctgagtctgatccggcgctggcgttcgctttctatccgcaggccgctggcgatctcgttgccaaatgcccggagaaagccgcgccgctgctccatctcccgtcacagggagatccgccgaggctcctgctgcgaccgcccttctactgctcgcccgatcaggccgaggggctggcgcgtggggaacagctgcgcccactgcttgccgccctgcgccatgccgggggacacggcgagtggcatctgttcgacggcagctggcagttgaccctccagctgccggagcccggccgacggccggaggcgatcctgcaggccatcctgcggcagctcgcgctcccggtcgcctcgctgaccccaccgccggaaagtatcgctatccgttatctcatggctcaactctccgaacggctgggtacatccgggcatcagaaaggttggctggcggccctggccggcggcagcgcagaagatgcgcagtggatagcgcgtcagctgagcctgattaccgccccggttaatccgccgatgcccgctccggcgccctgccgccgcggcgtcgaacgtctggtttatccaggaggcgatacggcgctgctggtctttattccgctgccggatggcgcctcgctggcggccctgcggctgttggcgcagcattgtgagccgctatttttccagcgcctgcgggtggagcagcagattggctatgtggtgagctgccgctatcagcgggtcgccgatcgcgacgggctgctgatggcgctccagtccccggatcgccgcgccggggaattgctgcgctgtggtaaagactttctgcgccagctggcccccatggatgaggcgaccttcagaccgctacagcagcgcctggccgctcagatccgcgccagcaggccgccagaggcgcgggcgctgtccgccctgcgtcaggagtatggtttaccagagctaacgccgcaggcggtcgacgcgctgcgcgttgcagaggtggccgatctggcacgcgaaatgacccgccggcgtcgccgctggcaggtgctgttcacgacaggggattaa

SEQ ID NO: 139409 - DNA, 609 bp, Enterobacter cloacae
  misc_feature (27)..(36): n is a, c, g, or t
atgaaccgctgccgacgccggataacnnnnnnnnnnaaccagaccatagcggtgctaaccggctcgtgggcgatggtgaccgatcgtctggcgtggagcgaacggaccgccgactggatccggcaggcggtggctatcgacatgccgctgttcggcgtttgctatggtcatcagctgatggcccatgccctggggggcgaggtggcgtatcatcctggcgggcgggaaagcggcagccaaaccattacgctgtcgccatggggtgtcgatgatccgctgctgagcggcctgccggccacatttcctgcgcatctgagccatttgcaaaccgtgactcgtctgccggaaggggccacggtgctggccgcgtcctcccacgatccccaccagattgtgcgctatgggccgcacgcggtctctacgcaatttcacccggaatttaccgcgccgatagcccgttcgctgatccgccaccgggaggcggtgctgcaggcggaaggtattgacgcgcagcggttacacgaagaggtgcaggagagcccgcagggcgcggcgatccttacgcgcttcgtcagcgcctttctgaccccggatgcccccggcaattaa

SEQ ID NO: 139410 - DNA, 402 bp, Enterobacter cloacae
gtgccagccaatcccggtgttgatgatggtcgctcccgccgcttcaatcgctttggccagttcagtgacttccgccagcgtgctgccgtcgttgaccagatcgagcatcgacagacggtaaatgataatgaaatcgtggccggcgcgctggcgcaccgccttaaccacctctacggcgaaacgcatgcgcctggcataatcgccgccccattggtcgtcgcgctggttggtgcgcgcggcgagaaattcgttaatcagatagccctcagagcccatcacctcgacgccgtcatagcccgcttcgcgcgccagctgggcgcagtgggcaaaatcatcgatcagcgtcaggatctcatcgtggctcagttcatggggggtaaaacggttgatcggcgcctgtag

SEQ ID NO: 139411 - DNA, 240 bp, Enterobacter cloacae
gtgcaggatctgcagagcgattttgccgccttcctgatgtaccgcgtcggtaatatggcgatggtgcgccagatggctggcgtcgttgagtaccgcgccgccggccatggtgacgccagagggcgccggagcgatgccgccggtgacgatcagcgccacgccgtgacgggcgcgctcggcgtaaaaggccgccagccgctgcgcgccgtccggcagctcttccagcccggtgtgcattga

SEQ ID NO: 139412 - DNA, 1512 bp, Enterobacter cloacae
atgagttacctgttagcgttagatgccgggaccggcagcattcgggcggttattttcgatcttaatggccgccagctggcggtaggccaggccgaatggaaacacctgagcgttgataacgtccccggctcgatggagttcgaccttaccaccaactggcagctggcctgccagtgcattcgccaggcgctcgacgccgcccggctctctgccgccgatattcagtctgtcgcctgctgttcgatgcgcgaaggcatcgttctctatgaccgcaacggcgaggccatctgggcctgcgccaacgtcgatgcccgcgccagccgcgaagtggcggagcttaaggagatccacgactatcgcttcgaatccgaggtatacgaggtctcgggacaaaccctggcgctcagcgccatgccgcgcctgctcgagctggcggtcgacccgtcaaacgccggcaccaccggcatgctcgatctgttcagccgcgactggcgtccggcgctgctggatatggccgggctgcgcgccgatatgctgtcgccggtcaaagagaccggtaccctgctgggcgccgtcaccgaagcggcggcgcagcagagcggcctgcgcgccgggacgccggtggtgatgggcggcggcgacgtccagctcggctgcctgggccttggggtggtgcgcgccgggcaaaccgcggtactcggcggcactttctggcagcaggtggtcaacctgccgcaggtgcgcaccgatccgcagatgaatattcgcgttaatcctcacgtgattcccgacatggcgcaggcggaatcgatcagcttctttaccggcctgaccatgcgctggtttcgcgacgccttctgcgctgaagaaaaactgattgccgagcggctcggcgtcgatgcctattcgctgctggaggagatggccagccgcgtccccgccggttcccacggcgtgatgcctattttttccgacgctatgcactttaagcagtggtaccacgccgcgccgtcgtttattaacctctccatcgatccggaaaagtgcaataaagcgaccctgttccgcgcgctggaagagaacgcggcgattgtctccgcctgcaacctcgcgcagatctcgcagttctccggggtgacattcgacaacctggtgtttgccggcggcggctctaaaggcgcgctgtggagccagatcctcagcgacgtcaccggcctgccggtgcgggtgccggtggtccgcgaagccaccgctctgggctgcgccatcgccgccggaaccggcgccgggctgtatgacgatatggccagcaccggagagcggttagtgagctggcaccgcgagttcaccccaaatccgcagcatcgcgagctgtatcaggagatgatgagcaaatggcagacggtgtacgccgatcagcttggcctcgtcgatagcggactgacaacgtcgatgtggcaggcgccgggcctggagcgccgccagcgcgtagcgtcctccccgtcaccctaa

SEQ ID NO: 139413 - DNA, 522 bp, Enterobacter cloacae
gtgaccctctccggcggcgtcggcccgtatatgaccggtatcggccagctggatgccgcctgcagcgtcagcattatcccggcgccgctgcgggtctcttcggcggaggtcgccgagatcctgcgccgtgagtcgagcgtgcgcgacgtgatcctcgcggcgacggcggcggacgcggcggtggttggcatcggcgccatcgatcagcggcgcgacgcgaccatcctgcgctccggctatatcagcgagggcgaacaactgatgtacgcccgcaaaggcgcggtcggcgacattttaggttatttcctgcaggccgacggcaggccggtagaaggactggagatccatcgggaactgctcggcgtaacccttgatgagctggcgcagctgccgaccatcgttggcgtcgccgggggagaagaaaaagcgcaggcgatttatgccgctctgattggcaagcgcattaatggcctggtaacggaagagacaacagcacgcgcggtgcttaccctggcctcctga

SEQ ID NO: 139414 - DNA, 705 bp, Enterobacter cloacae
atgtctttactcgcacaactggaccagcgtatccgtcatcatggcggattaattgtctcctgccagccggtgccgggcagtccgctggataatcccgctatcgtcgcggcaatggcgctggcggctgagcaggcgggagcggtagcgctgcgcatcgaaggccaggccaacctgcaggccgttcgtccgttagtgacggtgcccgttattgggttgatcaaacgcgatttgcccgatagcccggtgcgtattacgccgtggctggaagatatcgacgcgctggcgcagggcggagcggatattattgctattgacggcacccagcgtcagcgtccggcgtcagtgtcggcgctattagcagaaattcatcggctgggaaaagtggcgatggccgattgctcatctctcgacgatgctctcgagtgctggcagttgggggctgagattgtcggcacgactctctccggctataccgcagaagagacgccggatgagccggatctggcgctggtgcaatgcctgagcgtggcgggctgcagagtgattgccgaagggcgctataacacgcctgcccaggcggcggaggcgatgcgctgcggcgcgtgggcggtgaccgtcggctcggcgattacccgcctggagcatatctgcggctggtataatacggcgctgaaagcggcggtttacccggcgaatgagcaataa

SEQ ID NO: 139415 - DNA, 225 bp, Enterobacter cloacae
gtggcggcgcaggggatccgggtgaacggcgtgcgtccggggctgatttataccgagatgcatgcctccggcggtgaaccgggacgcgtggatcgagtgaaaggttcgctaccgatgcagcgcggcggccagccggaagaggtcgctcaggccattgcctggctgctgagcgacaaagcgtcgtatgtgacgggtagcttccttgaactggcgggcgggaaataa

SEQ ID NO: 139416 - DNA, 480 bp, Enterobacter cloacae
  misc_feature (410)..(419): n is a, c, g, or t
atgggaatagctcttattagcggcgcgagccgcggcataggccgggcgacggcgctgctgctggcgcaggaagggtataccgtcgcggtcaattaccatcacaacattaacgccgccaccgaggtggtgaataccattgtggcgtctggcggcaaagccacggcgctgcgggcggacatcagcgatgaagcgcaggtgatggcgatgtttgaggcgatcgaccgcatgggcgagccgctgacggcgctggtcaacaacgccgggatcctgtttacccagtgtacggtggagagcctgagcgccgagcgtattaaccgcgtgctggccaccaacgtcaccggttacttcctctgctgtcgtgaggcggtaaagcgcatgtcacatcggcatggcggcaagggcggggcgannnnnnnnnngcgtcgcgccttggcgcgccgggggagtacgttgactatgccgcgtcgaaaggggcggtag

SEQ ID NO: 139417 - DNA, 1860 bp, Enterobacter cloacae
gtgctgctggccaacatcgccagcctgtacgcggtattccacggcccggcgggtctgaaacgtatcgctggtcgcattcatcgtctgaccgacattctggccgacggcctgcagaagaaagggctgaagctgcgccatgcccactacttcgacaccctgtgcgtcgaagtggcggataaagccgcggtgctggcgcgtgccgaagccctgcagattaacctgcgcagcgatattcacggcgcggtgggcattacgctcgatgaagcgaccacccgcgaagatgtgctgaacctgttccgcgctatcgtcggcgacgatcacggtctggatatcgataccctggataaagacgtggcgctggatagccgttcgatcccggcggcgatgctgcgcgacgatgcgatcctcacccatccggtgtttaaccgctaccatagcgaaaccgagatgatgcgctacatgcacgccctggagcgtaaagatctggcgctgaaccaggcgatgatcccgctgggctcctgcaccatgaaactgaacgccgcggcggagatgatcccgatcacctggccggaattcgccgagctgcacccgttctgcccggtcgagcaggcggaagggtatcagcagatgatcgcccagctttccgactggctggtgaaactgaccggctatgacgccgtctgcatgcagccgaactccggcgcgcagggtgaatatgctggcctgctggcgattcgccattatcacgagagccgcaacgaaggccatcgcgatatctgcctgatccctagctccgcgcacggcaccaacccggcttccgcgcagatggcgggtatgcaggtagtggtcgttgcctgtgataaaaacggcaacatcgatctcgccgatctgcgtgaaaaagcagagcaggcgggggccaatctctcctgcatcatggtcacctatccgtcgacccacggcgtgtatgaagagaccattcgcgaagtgtgcgagatcgtgcaccagtttggcggccaggtttatctcgacggcgccaacatgaacgcccaggtcgggatcacctctccgggctttatcggcgccgacgtttcgcacctcaacctgcataaaacgttctgcattccgcacggcggcggcggcccgggcatgggcccaatcggcgtaaaagcgcacctggcgccgttcgtgccgggccacagcgtggtacagattgaaggtatgctgacccgccagggcgcggtttccgccgcgccgttcggcagcgcgtccattttgccgatcagctggatgtatatccgcatgatgggcgcggaagggctgaagcaggcgagccagaacgcgatccttaacgccaactacatcgctacccggctgaaagacgcctacccggtgctctacaccggtcgcgatggtcgcgtagcgcacgaatgtattctcgatattcgtccgctgaaagaagagaccggcattagcgagctggatatcgccaagcgcctgatcgactttggcttccatgccccgaccatgtctttcccggtagcggggacgctgatggttgagccgacggaatcggaaagcaaggtcgagctggaccgctttatcgacgcgatgctggcgatccgcgcggaaatcgaccgcgtcaaagccggcgaatggccgctggaggataaccctctggtgaacgcgccgcacacccagggcgagctggtgggcgagtggaaccatccgtacagccgtgagctggcggtattcccggcagggttgcacaacaagtactggccgacggtgaaacgtctggatgatgtctacggcgaccgcaacctgttctgctcctgcgtgccgatgagcgaataccagtaa

SEQ ID NO: 139418 - DNA, 372 bp, Enterobacter cloacae
atgatcacaaaacgcaatattgccagggggatgatggcggcaggatcgctggtttatctgctcggtatctggcggacctgcccgctgttcagcggcaaagggtattttctcggcgtgctggtgatggggatgtttgctgttctcgcccatcagcgcgccagtcagtggcaggaacaggacgacggttttattgccttatgccggctggtgctgctgctatcggtcggcctgctgctggtcggcgcctggtatgtaccggcagactggcatgaaaaagccgtctatatcgcggcatggtttgtctgcttatatggcgcatcggcaacccccgaacggacccgcatcgcccgcgcgatgcaaaaaacggaataa

SEQ ID NO: 139419 - DNA, 444 bp, Enterobacter cloacae
atggaaaacaagcacgcgacgtattctcctgcgtttcatttgatctcctggattgccctgatcggcggcatcgtcacctatctggtggggctgtggaatgccgatatgcagttgaatgagaaaggctattattttgccgtcctggtactggggctgtttgccgcggcatcttatcaaaagacggtgcgcgataagtatgaagccattccgaccaccgcgctgtactacaccacctgtctggtggtcttcgttatcgctgtaggtctgctggttatcggactgtggaatgccactctgctgctcagcgagaaagggttctatgggctggcgtattttttgagcctgtttggcgctgttgcggtacagaaaaacgtgcgtgatgtctgggacccgacgcgcttacgggaacctctcagcgtgacggaagaggggcctgagacgtaa

SEQ ID NO: 139420 - DNA, 996 bp, Enterobacter cloacae
atgcaagaaaagatacactggatcaccaacctgcgcggcatcgcctgcatgatggtggtgatgatccacagcaccagctggtatatcactcacccccatgcgattaccctgctgcaatgggatatcgccaatctgctcaattccgcctcccgcgtcagcgtgccgctgttttttatgatctcgggctacctcttttttggggaacgcagcgcccagccgcgccatttctggcggattggcctgtgcattgcgttctatagcgcgctatctctgctgtatatcacgctgtttacccatatcaacgtcgagctgtcgttaaagaatttgctgcagaagcccgtcttctaccacctgtggtttttctttgctatcaccgtcatctacctgctctcgccgctgcttcaggttaagtccaccagtagcacaatgctgctggcgctgatggcgatcctcggcattctggccaaccccaatatggtcagcgttaaagccgccgggattgagtggctgccagtcaacctctatatcaacggcgacaccttctactacgtgctctacggcgtgctgggcagagccattggcaccctggacaccgataaaaaatggctaacaccgctctgcgccgcgctgttcatcgccgccgtgtgggtcatttcccgcggcacgctgcatgagctgcgctggcgcggagacttcggcgacacctggtatctctactgcggaccggcggtgtttgtttgcgcggtcaccctgctgacgctggccaaaaactggcttaacgcgcgtcccctgcccggtatcgcctgcattgcgcgacattcgctggggatctacggctttcatgccctgatagtgcatgcgctgcgcgccagccatctggagctatcccgctggccgctgctggatattgtgtggatatttagcgccgccctgctcggcagcctgctgctgtcaggcctggtgcagcggattgatagccgccggctggtcagctaa

SEQ ID NO: 139421 - DNA, 303 bp, Enterobacter cloacae
gtggtgaaaggtgttgtttccgtcatgctggtgctgctcctcgcgggctgcagcgagaccgtctccccgccgacgcaaaaagcgcagcgcgctcgtattacgccgcaaaccacgctcaatatggcgcagctttgcaaggatcaggcggctatccgctataacacgcaaacgcagctcgttgacgtgaaccactttgaacaattccaggcgagctatgagctttctggccgtaccggcaagaatgagcgtttcatctgttcctttgacccggacggccagtttatgcatctttcgatgcgctga

SEQ ID NO: 139422 - DNA, 1122 bp, Enterobacter cloacae
atgcataaccaggctccgattcaacgtagaaaatctaaacgtatttacgttggtaatgtgccaattggcgatggggctcccatcgccgttcagtcaatgaccaatacgcgcaccaccgatgtggcggcgaccgtaaatcaaatcaaagcgttagagcgcgtaggcgcggacattgtccgtgtctctgttccgacgatggacgctgctgaggcgttcaaacttatcaaacagcaggttaacgtcccgctggtcgccgatatccactttgactaccgtattgcgctgaaagtggcggaatatggcgtcgactgcctgcgtatcaacccgggcaacatcggcaacgaagagcgcatccgcatggttgtagattgcgctcgcgataaaaacatcccgatccgcatcggcgtcaacgccggctcgctggaaaaagatctgcaggaaaaatatggcgagccgacgccgcaggcgctgctcgaatccgccatgcgtcatgtcgatcatctcgatcgtctgaacttcgatcagtttaaagtcagcgttaaagcctccgatgtcttcctggcggtggaatcctatcgtctgctggcgaaacagatcgatcagccgctgcatctcgggatcaccgaagcgggcggcgcgcgcagcggcgcggtaaaatcggcgatcggtctgggactactgctgtccgaggggatcggcgatacgctgcgcgtctcgctggcggcggatccggtggaagagatcaaggtcggcttcgatatcctcaaatctctgcgtattcgttcccgcggcattaactttatcgcctgcccgacctgttcacgccaggagtttgacgttatcggtacggtgaatgctctggagcagcgtctggaagatatcatcaccccgatggatgtttcgatcatcggttgcgtggtgaacggcccgggcgaagcgctggtctccacccttggcgtcaccggcggcaacaagaaaagcggcctgtatgaagacggcgtgcgtaaagatcgcctggacaacaacgacatgatcgaccagctggaagcgcggatccgcgccaaagcctcgatgctcgatgaagcccgtcggattgacgttcaacaggttgaagcaaaataa

SEQ ID NO: 139423 - DNA, 996 bp, Enterobacter cloacae
atgaatactgaagccactcaagatcatcaagaagcaaacaccacgggcgcgcgtctgcgtcacgcccgcgaacaactcggacttagccagcaagcggtggccgaacgcttatgcctgaaggtgtccacggttcgtgatattgaagacgataaggcccccgccgacctcgcctccaccttcctgcgcgggtacatccgctcctacgctcgcctcgtacatattccagaagacgagctgctgccgatgatggccaagcaggcgcccatccgcgcggcgaaagtcgcgccaatgcagagtttctctttaggcaagcgccgcaaaaagcgcgacggctggctgatgagcttcacctggctggtgctgtttgtggttatcggtctgagcggcgcctggtggtggcaagaccataaggcgcagcaggaagagatttcgaccatggccgatcagtcttccgctgagctgaacggcggcgacgccaacagccagaacgtgccgctggataccagcgcccctgcagccccgaccgccgatagcgccgcgaacagcgcgccaaccgataccgccagcgcaccgaccaccagcgcgccggcccagacgccagcggataataacgctgtcgtggcgccttcccaggccaatgtcgataccgcggggacgacgccggcagctccggctaccactccagcctcgccgttgccgaccgatcaggcgaacgtcacgactccggcggcgtcggcgcaggatctggtgatgaacttttccgccgactgctggctggaagtgagcgatgccaccggtaaaaaactgttcagcggcctgcagcgtaaaggcggtaacctgaacctgagcggtcaggcgccgtataagctgaaaattggcgccccggccgcggtacagatccagtatctgggcaagcctgtcgatttaagtcgttttatcagaactaaccaggttgcgcgtctgaccctcaatgccgaatcatcaccggcgcagtaa

SEQ ID NO: 139424 - DNA, 153 bp, Enterobacter cloacae
atggagtacggctttacgaccatcgtgcgtaaaacgcgcggcgacgatatcgatgccgcctgcggccagctggcgggcgacgtcattgaccgtaccaagcgtacgctgcgtaagcggatgcagggcgaagcgattgacgtaaaagcggtctga

SEQ ID NO: 139425 - DNA, 249 bp, Enterobacter cloacae
atgcaggcaggggcgcgcggcgtcatgcaccagcacccactgcgcctccggcaacgcccgcaggccggcgagtaccgaatcggcgcgctcagcgccgccatccaccacggtaatctgcggatgctgcgccagcggcagctggctgaagcggcgatcgccggggctgacggcaatcaccacccgctggacgcgcgcatccgccagcagcgcggcgaccgcgtgttcgagaatcgttttgttaccgattga

SEQ ID NO: 139426 - DNA, 318 bp, Enterobacter cloacae
atgggtaaactaacgctgctattattagctttgctggtctggctacagtattcgctgtggttcggtaaaaacggcctgcacgactacacgcgggttaacgacgacgtcaccgcccagcaggcgactaacgccaaattaaaagcacgcaacgatcagctgtttgccgaaattgacgacctcaacggcgggcaggaagcgattgaggagcgtgcgcgcaatgaactcagcatgacccgcccgggcgaaaccttctatcgtctggtaccggatgcgtctaaacgcaatcaggcatcggggcaacagcagaacaatcgataa

SEQ ID NO: 139427 - DNA, 327 bp, Enterobacter cloacae
atgcgcaatacccagaacctcagtattattcgttcagaaccgcctccggcgatcggcgacgagaccacctggtctttgtcgggcgctgccgtgggctttatttcgtggctgctggcgctgggtattcccttccttctctatggcagtaatacactcttctttctcctctacacctggccattcttccttgcgttgatgccggtggcggtggtggtcggtattgcgctgcactctctgctcaatggcaaactgctctatagcgtcagcgcgaccatcctgaccgttgggctgatgtttgcgctactcttcctctggctgttgggataa

SEQ ID NO: 139428 - DNA, 606 bp, Enterobacter cloacae
atggcccagcatgacgaaaacgtcgtctggcatgcccaccctgtgacccaacagcagcgggaacagcatcacggccatcgcggcgtggtgctgtggtttaccggcctttcggggtcgggtaaatccaccgtcgctggggcgctggaggaggccctgcatgagcgcggcgtcagcacctatctgctggacggcgataacgtgcgccatggcctgtgcagcgacctgggattcagcgatgaggatcgcaaagagaacattcgccgcgtcggggaagtggccaggctgatggtcgatgccgggctggtggtattgacggcatttatatctccgcaccgtgcggaacggcagatggtgcgcgagcgcctcggggaaggacgctttatcgaagtgttcgtcgataccccgctggccatctgcgaggcgcgggatccgaaaggattgtataagaaagcgcgggcaggggaattacgcaatttcaccggtatagactcggtctatgaggcaccggaaaaggcggaaattcatctggatggtgaacaattggtaacaaatttggtgcaccaactattagacctgctgcaacagagcgatattatcagatcctga

SEQ ID NO: 139429 - DNA, 1059 bp, Enterobacter cloacae
atggccaccggcgcgtccacctgcgacctggcgatcctgctgatcgatgcgcgcaaaggggtgctcgaccagacccgccgtcacagcttcatctcgacgctgctgggcattaaacacctggtagtggcgatcaacaaaatggatctcgtcgagtttagcgaagcgcgcttcaacgagatccgggaagattatctgacctttgccgagcagctgccgggcaaccttgatatccgctttgtgccgttgtcggcgctggaaggcgataatgtcgccagccagagcgcgaatatgccgtggtacagtggcccgacgctgctggaagtcctcgaaaccgtggagatccagcgggtggtcgagagccagccgctgcgcttcccggtgcagtatgttaaccgtccgaaccttgatttccgcggcttctccggcacggtcgcctccggtaccgtgcaggttggccagcgtctgaaggtgctgccgtcgggcgtcgaatcgagcgtggcgcgtatcgtcaccttcgacggcgacctgcaggaagccgccgccggcgaagccattacccttgtgctgaaagatgaaatcgacatcagtcgcggcgacctgctggttgacgcgcaagcctcgctgccggcggtacaaagcgccagcatcgacgtggtgtggatggccgaacagccgctgaccccgggccagagctacgacatcaaaatcgccggcaagaagacccgcgctcgcgtcgacgctatccgctaccaggtcgatattaacaacctgacccagcgtgaagtcgagtctctgccgctgaacggcatcggcctggtggagctgacctttgacgaacctttagtgctggatccgtatcagcaaaacccggtgaccggcgggcttatctttatcgatcgcctgaccaacgtcaccgtcggcgccgggatggtcaacgagccgcacctgcaggcatcgacttcggcatcacagtacagcgccttcgagctggagctgaaccagctgatccgtaaacatttcccgcactgggacgcccgcgacctgctgggaggcaaataa

SEQ ID NO: 139430 - DNA, 735 bp, Enterobacter cloacae
atgctgcaaaatattcgaatcgtactggtagaaacctcccataccggcaacatgggctccgtagcccgcgcgatgaaaaccatgggcttaactaacctgtggctggtcaatccgctggtcaaacccgattcgcaggcgatagccctggccgcgggcgccagcgacgtgatcggcaacgcgcagattgtcgatacccttgatgaagcgctggcaggctgtagcctggtggttggcaccagcgcgcgctcccgcacgctgccgtggccgatgctcgacccgcgcgaatgcggtctgaaaagcgtcgccgaaggtcagcatgcgccggtggcgctggtctttggccgcgagcgcgttggtctgaccaacgatgaactgcagaagtgccactatcacgtggcgatcgccgccaacccggagtacagctcgctgaacctggcgatggcggtgcaggttatcgcctatgaagtgcggatggcctggctggcggcgcaggagcaagcgcagccggcggttgagcatgaagaggcgccgtacccgctggtggacgatctggagcgattctacgaccatcttgagcagacgctgctggcgaccggctttatccgcccgaatcatccggggcaggtgatgaacaagctgcgtcgtctgttcacccgcgcgcgtccggaaagccaggagttgaacatcctgcgcggcatgctggcgtctattgagcagcagaataaaggtaagtaa

SEQ ID NO: 139431 - DNA, 492 bp, Enterobacter cloacae
atgagactgacatctaaagggcgttatgccgtgaccgcgatgcttgacgttgcgctcaactctgaaacgggcccggtgccgttggcagatatttcagagcgtcagggaatttcgctttcctatctggaacagctgttctctcgcctgcgtaaaaatggcctggtttccagcgttcgtggcccaggtggtggttatctgttaggtaaagatgccggcagtatcgccgtcggcgaagtcattagcgccgtggacgaatccgttgacgccacccgttgccagggcaagggcggctgtcagggcggcgataaatgcctgactcacgcgctgtggcgcgacctgagcgagcgcctgaccggcttcctgaacaatatcaccctcggggaactggtgaataaccaggagatcctcgatgtttccggtcgtcagcatcagcacgaaacccagcgcaatgcgcgcacccaggacgcgattgacgttaaactgcgcgcctga

SEQ ID NO: 139432 - DNA, 735 bp, Enterobacter cloacae
gtgaacaggcagagtaccggaacgcataccgcgctcgtggccgccgccgtggatttgcgcttcgatacgaatacgcggcttacgacgtacgtacagcgcgccgatgcctttcggaccgtagattttgtgaccggagaaggacatcaggtcaactttcagctggctcagatcgataggcagcttgcccacgctctgggtggcgtctacgtggtaaatgataccgcgggcgcgacacatctcgccgatggtagcgatatcctgcaccacgccgatttcgttattcacatgcatgatggaaaccaggatggtgtcgtcacgcatcgctgcttccagctctttcagatcaataatcccgttgctctgcggcgccaggtaggtcacttcgaagccttcgcgctccagctgacgacaggtatccagaaccgctttatgctcggttttgctggtgatgatgtgcttgccttttttctgataaaagttggctgcacccttgatcgccaggttgtcggattcagtcgcaccagaggtaaagacgatttcgcgcgggtcggcgccgaccagctcggcaatctgattgcgggcgatatcaaccgcctcttcagcctgccagccaaaacggtgggaacgggaggccgggttaccaaaggtcccgtccatggtcaggaactgcatcattttctcggcaacacgcgggtccaccggcgtggttgcggagtaatcgaggtaaatcggtaa

SEQ ID NO: 139433 - DNA, 1053 bp, Enterobacter cloacae
atggatatgactttctttcgcgccgcgctgctgggcgcctgcgttctgctctctggctgcgattcagctaccactcctgcgacccccaccgcgacggccaccgtgctggatggcaaaacgatgggcaccttctggcgggtcagcgtcattggcgtggatgaggcaaaggcccaggcgttgcgcgccaaggttcaggcccagctggacgccgacgatcgcctgctgtcgacctggaaaaacgactcagcgctgatgcgcttcaatcatgccgccactaccgaaccctggccggtgagcgaagcgatggcggatatcgtcaccctgtcgctgcggattggcgccaaaacgcacggcgcgatggatattaccgtggggccgctggtcaacctgtggggctttggcccggataaacagccggtcaccaccccggatgccgaggcgatagccgcggcgaaggcgcgcaccggcctgcagcatctgcaggttattaatcagagcggcaggcagttcctgcaaaaagatattcccgatctgtttgtcgacctttccaccgtgggggaaggctatgccgccgaccacctcgcgcggttgatggagcaggaggggatctcccgctatctggtgtcggtgggcggagcgctggtcagccgcgggatgaacggcgaaggcaagccctggcgggtagcgatccagaaaccgaccgaccgcgaaaacgccgttcaggcgattgtcgacatcaatggtcacggcatcagcacctccggcagctatcgcaactactatgaactcgatggcaaacgcatctcgcacgttatcgatccgcagaccgggcagccgataacccataagctggtctccgtgaccgtcattgcgccaacggcgctggaggcggacggctgggataccggactgatggtgctggggccggaaaaagcgcagcaggtggtgcgcaaggaggggctggcggtctacatgatcgttaaagaaggagagggttttaaaacctggatgtcgccgcagttccgcactttccttgtcggcgagaaaaattaa

SEQ ID NO: 139434 - DNA, 1095 bp, Enterobacter cloacae
atgaaagttaaagtactgtccctcctggtaccggctctgctggtagcaggcgcagcaaatgcggctgaaatttataacaaagacggcaacaaattagacctgtacggtaaaattgacggtctgcactacttctctgacgacaagagcgtcgacggcgaccagacctacatgcgtgtaggcgtgaaaggcgaaacccagatcaacgaccagctgaccggttacggccagtgggaatacaacgttcaggcgaacaacgttgaaggtactgacaagcagtcctggactcgtctggcattcgcgggtctgaaattcggcgacgcgggctctttcgactacggtcgtaactacggcgttgtttacgacgtgacttcctggaccgacgttctgccggaattcggcggcgacacctacggttccgacaacttcctgcagtcccgtgctaacggcgttgcaacctatcgtaactctgacttcttcggtctggttgacggcctgaactttgccctgcagtaccagggtaaaaacggcagcgtcagcggcgaagacatgaccaacaacggtcgtggcgctcagaaacagaacggcgacggcttcggcacctccgtaacttatgatatctgggacggcatcagcgctggtttcgcttactcccactctaaacgtactgatgaccagaacaacctggtactgggtcgtggtgacgacgctgaaacctataccggtggtctgaaatacgacgccaacaacatctacctggcctctcagtacacccagacctacaacgcaactcgcgccggttccctgggctttgcaaacaaagcgcagaacttcgaagtggttgctcagtaccagttcgacttcggtctgcgtccgtctgtggcttacctgcagtctaaaggtaaggatctggagcgcggctacggcgaccaggacatcctgaaatatgttgacgttggcgcgacctactacttcaacaaaaacatgtccacctatgttgactacaaaatcaacctgctggacgacaacagcttcacccgcaacgccggtatctctaccgacgacgtggttgcactgggcctggtttaccagttctaa

SEQ ID NO: 139435 - DNA, 357 bp, Enterobacter cloacae
atggcgaacgccgaaagcatcgacaccacgattttgccgaccgtaatggcgaacgccatgatgaagctgttgagcatcatcagccagaacggcgcgctgttgacgccgacgccgttcacccagatggtcttcatgttctccagcagatgtccgccgggaagcagcgtcatcggcgtttcaaataccgatttgttatccagcgtcgccgccacgaaggcgacgtacagcgggaataaaatgacggcgatacccaggatcagcatggtgtggctgaaaatcgtcagcccgcgacggttctcaatcattggtaacgcaccttactttcaacgtaacggaactgcaccaccgtcaggataa

SEQ ID NO: 139436 - DNA, 888 bp, Enterobacter cloacae
atgtcatcatcccgtccggtattccgctcgcgctggctgccctatgtgctggtcgcgccgcagctgattatcacgctgattttctttatctggcccgcaggcgaagcgctgtggtactcgctgcagagcgtcgatccctttggcctttccagccagttcgtcggcctggataacttcgttgcgctgttccacgatccgtactacctggactcgttctggaccaccataaaattcagcgccctggtgaccgtcagcggcctgctcatttcactgtttttcgccgcgctggtcgactatgtggtgcgcggcagccgcttttatcaaacgctgatgctgctgccgtacgccgtggcccccgccgtcgcggcggtgctgtggatcttcctctttaaccccgggcgcgggctgatcacccatttcctcggcgagctgggctacgactggaaccatgcgcagaacagcggccaggcgatgtttctggtggtcttcgcctcggtgtggaagcagataagctacaacttcctgttcttcttcgccgcgctgcagtcgattccgcgttcgctggttgaggccgccgccatcgacggcgccgggccgattcgtcgcttctttaagctggcgctgccgctgattgcgccggtgagtttcttcctgctggtggtcaacctggtttatgccttcttcgacaccttcccggtgatcgatgccgccaccgccggcggcccggtgcaggcgaccaccactctgatctacaaaatctatcgcgaaggtttcgccgggctcgatctatccgcttccgccgcgcaatcggtggtgctgatgttcctcgtcattatcctgacggtggtgcagttccgttacgttgaaagtaaggtgcgttaccaatga

SEQ ID NO: 139437 - DNA, 1317 bp, Enterobacter cloacae
atgatatcgttacgacatacagctttaggactggcgctgagcctggcttttgccggtcaggccctggcggttaccaccatcccgttctggcactcaatggaaggcgagctgggtaaagaagtggattctctggcgcaacgctttaacgcagccaatcctgattacaaaatcgttccggtatacaaaggcaactacgagcagagcctgagcgccggtatcgccgccttccgtaccggcaacgcgccggctatcctgcaggtgtatgaagtcggcaccgccaccatgatggcgtcaaaagccattaagccggtctaccaggtgtttagcgaggcgggcatcaagtttgatgaatcgcagttcgtaccgacggtggccgggtattacaccgattcgaaaaccggccatctgctctcccagccgtttaacagctctaccccggtgctctactacaacaaagacgccttcaaaaaagccggcttagatccggagcagccgccgaagacctggcaggatctggcggcctataccgcgaagctgaaagccgccgggatgaagtgcggctacgccagcggctggcagggctggatccagattgaaaacttcagcgcctggcacggtctgccggtggccacgaagaataacggcttcgacggtaccgacgcggttcttgagttcaacaagccggagcaggtgaagcatatcgcgttgctcgaagagatgaacaagaagggcgatttcagctacttcgggcgtaaagacgagtctaccgaaaagttctataacggcgactgcgccattaccactgcctcgtccggctcgctggccgatatccgccagtacgccaaatttaactacggcgtcggcatgatgccttacgatgccgacgtgaaaggcgcgccgcagaacgccatcatcggcggggccagcctgtgggtgatgcagggcaaagacaaagagacctacaccggcgtggcgaagttcctcgacttcctgaccaaaccggaaaacgccgccgagtggcaccagaaaaccggctacctgccgatcactaccgcggcctacgatctgacgcgtcagcagggcttctatgataagaacccgggcgccgatatcgctacccgccagatgctgaacaagccgccgttgccgtttaccaaaggtctgcgcctgggcaacatgccgcaaatccgcaccatcgtcgatgaagagctggagagcgtgtggaccggcaagaaaaccccgcagcaggcgctggattccgccgtgcagcgcgggaaccagctgctgcgtcgcttcgagcaagcgaccaaatcgtaa

SEQ ID NO: 139438 - DNA, 378 bp, Enterobacter cloacae
gtgggcggcgatggccagcaccgggacatggttgcgatgacagtcaaacaaaccgttaatcagatgcaggttgcccggtccgcaggagccggcgcagaccgccagctcgccggtcagctgcgcttccgcgccagcggcgaaagcggcgacctcttcgtgccgggtgggcatccagtcgatggtgcccatgcggttaaggctatcgctcaatccattgagggaatctccggtgacgccccagatacgtttcacgccggcctgttccagcgttttggcaatgtatgccgccacggtctgtttcatgatctccatctcctttttttgataacgccttcaagcttagatgaaactgaccgcaatgtaaccgattacccctga

SEQ ID NO: 139439 - DNA, 435 bp, Enterobacter cloacae
atggttaaaggattgttaaacacagtaaatcgcaggctgtcgcatgatgacgccggtaaactcttgttacgacttgccgtcggcggcttaatgcttttccatggaatccataagctgatagatggtgtggatggcattagcgggatgctggcggcgcagggattgcccgggtttatcgcctacggtgtgctggtgggggaagtggtcgctccctgcttgttaattctcggcgtcctgacccgcccggcggcgttggtgctggcgttcaccatggtggtggcgtggctgatggtcggtctcggcaagacgtttgcgcttgatacggtgggagcgtgggccattgagaatctggtctatttctttgttggcgcactggcgattgcgctactcggcgcggggcgttattcgctggccggtcagtcggcctggcggtaa

SEQ ID NO: 139440 - DNA, 969 bp, Enterobacter cloacae
atgactatgccaacctcccagtgcccgtggcggatgcaggttcaccacattcaccaggaaaccccggacgtgtggaccctttcgctgctgtgccacgattactatccgtaccgcgctggccagtacgctctggttagcgtgcgtaactcggcggaaacgctgcgcgcctataccctctcctcgacgccgggggtcagcgaatacattacgctgaccgttcgccgtattgacgagggtacgggttcgcagtggttgacccgcgaggtcaaacgcggtgattacctttggctgtccgatgcgatgggcgagtttacctgcgacgataaagcggaagataaattcctgctgctggccgccggttgcggcgtgacaccgatcatggcgatgcgccgctggctggctaagcatcgaccgcaggccgacgtacaggtgatttataacgtgcgttcgccggaagatgtaatctttgccgaagagtggcgcaactacccggtcaccctggtagcggagcacaacgcgacgcacggttttgtcgccggccgtctgacccgggagctgctgcagagcgtgccggatttagccagccgcaccgtgatgacctgcggcccggcgccttatatggagaaggtcgagcaggatgttgccgccctgggcgtcacccgcttctttaaggaaaaattcttcaccccggtggctgaggccgccaccagcgggctgaaatttactaaactgcagccggcgcgcgagttttacgcgccggtgggcactacgctgctcgacgcgctggagagcaataaagtgccggtgaccgtcgcctgccgcgccggcgtctgcggctgctgcaaaaccaaagtggtttccgggaagtacagcgtcaccagcaccatgacgctgaccgacgccgaaattgccgacggctatgtgctggcctgctcctgtcatccgcagagcgatctggttctcgcctga

SEQ ID NO: 139441 - DNA, 633 bp, Enterobacter cloacae
gtgaaccatctggaaggtgaagacttctccccggtcattgcccaggcgcagcagatggcgggcttcccgtacagcgaaatcccgcatctgatcaccgtcggctttggccgtcagaccctgcttggcgcggcggatacgctgatcgatctggtcagtcgtgaaaaactgcgccatatcttcctcgtcggcggctgcgacggcgcccgcggggagcgtaactacttcaccgatttcgccaccagcgtgccggatgactgcctgatcctgaccctggcctgtggcaaataccgcttcaacaaactggactttggcgatatcgaagggctgccgcgcctggtcgacgccgggcagtgtaatgacgcttactcggcgattattctggcggtcacgctggcggagaaactgggctgtggcgtcaacgatctgccgctgtcgctggtgctctcctggttcgaacagaaagcgatcgtcatcctgctgacgctgctgtcgctgggtgtgaaaaacatcgtcaccggtccgacggcgcctggtttcttcaccccggatctgctggcggtcctcaatgagaagtttggtctgcgttccgtgaccaccgtggaacaagatatgcagcagctgctgagcgcttaa

SEQ ID NO: 139442 - DNA, 429 bp, Enterobacter cloacae
gtgagcgacgcgctgtcactcacctcgctgtttgccagtagctttttaagcgccacgctgctccccggcaattcggaggttgtgctggtggctatgctacttgcgggggtcagtcatccgtggtggttagtattaatagcaacaatcggcaatagccttggaggggtaactaacgttattctggggcgcttgtttccgctgcgcaaaacctcgcgctggcaggagcgggcggccggctggcttaagcgctacggcgcggtcacgctcttactgagctgggcgccggttgtcggcgatttactgtgtttgctggcgggatggatgcgcatttcctggggaccggtactctttttcttatgccttggtaaggcgctgcgctatatcgctattgcggcagcgacgcttcagggcatgacgtggtggcactaa

SEQ ID NO: 139443 - DNA, 567 bp, Enterobacter cloacae
atgtacgaaggttacgcaggactgatctttgatatggatggcaccattctcgataccgagccgacccatcggcaggcatggaacgaggtattgggccgctacggtatgcgtttcgacgaacaggcgatggtcgcgctcaatggctcaccaacctggcgaatcgcccaggcgattatcgaactcaaccaggccgatctcgatccacatcgcctggcgcaggaaaaaacccaggccgtcaaagcgatgctgctggacagcgtacgcccgttgccgctgattgaggtggttaaggcatggcacggccgtcgcccgatgtcggtgggaaccggcagcgagagcgccgtcgccgaagcgctgctggcgcacctggggctgcgtcattacttctccgcggtggtggcggccgatcatgtggtcaaccataaacccgcgcccgataccttcctgctgtgcgccgagcgcatgggcgtcgcgccggaaaaatgcgtcgtcttcgaagatgccgactttggtctgcaggcggcgaagcgcgcgggaatggacgcagttgacgtgcgtttgctgtga

SEQ ID NO: 139444 - DNA, 315 bp, Enterobacter cloacae
atgaaatggttcaaagcaatacctgctttttgcgcgacgctgctggtaacgacggccctcgctggctgtgcgggatcggctacaaaggagagtacgggcggctatattgacgataccgtggtgaccaccaaggtgaaaacggcgctctttaacgataaagacattaagtcctcagaaattagcgtccagacctttaaaggccgcgtccagctgagcggatttgtctcctccgcggagagcgctaaacgagccgtagaagtcacacgccgagtgcagggcgtgcgaatggtcgagaacgatctgcgtattaaataa

SEQ ID NO: 139445 - DNA, 375 bp, Enterobacter cloacae
atgtgcgtgctggtacagattgagactcgcgaagcgctgaaaaatctgccgcagatcctcgatgtcgacggggtagatggcgtgtttatcggcccggcggatctcagcgctgatatgggccacggcggcaatccgcagcacccggaagtgcaggccgccattgaagatgccatccagcaaatccgtcaggccggcaaggcgccggggatcctgatggccaatgaacagctggcgaaacgctatctcgaactgggcgcgctgttcgtcgccgtcggcgtcgataccaccctgctggcccgcggcgcagaagcgctggcggcccggtttacccacaacgcaaccaccacaaccgataacaataaatccgtctattga

SEQ ID NO: 139446 - DNA, 2121 bp, Enterobacter cloacae
atgaataacaaactctttgaaacgattattgcaaagttaaatttttcgctaattaagaaaacaccggtaattttacaatcagaatcagcggaatgtggtatcgccagcctggcaatgatctgcggacactatggattagatatagacttattcaatttccgccaacgcttcggcagtccatcgcaaggtgcttcactgctgcatttgagcaaaaccgccgagcgtgctggccttaaaaatcgcgcgctttcattagatttagatgaaataaaacagcttaagctcccttgtattatccactggggaatgaatcattatgtcgttctaacgaaagtacgaaaatctagctatgttgtgcatgatcctgctttgggtaaacgtataattggtttgcaggagatgtctaataatttcaccggcgtggctctggaactttggcccgatcagaactttcagcaagaaaaggcaaaagcacgcttacgtttattagacctgatgcgaaacattgtcggattaaagtctgcattaattaaaatcttcgcattctctgtcgtaatcgaagccattggccttttactccccattggtacccaactggtcacagaccatgtcatcatggcccatgaccagagtctgttatccgtcatttgtataggactggtctttttcactctcttccgtacctttgtcagtatgctaagggcatggacctcactgactctcaatactctgactaatattcaatggaaaacgacattgtttgatcacttgacaagcttgccgttatccttttttgaaaaacggcatctaggtgatatccagtcacgttttacttcattggatactatccgctcaacgttcactaacagtattgtcagtggcatcattgactcgatcatgacaattggtctgttaattatgttaaccctttacggcggctggctagtatgggtggtcgtaggatttacgctttgctacgccattatgcgcttggcgacataccgtttttaccgtcgggtagcagaagaacaagtcattaaaggagcccgctcgagctctcatttcatggagtcactttatggaatatcaacgattaaagctcttaatttaaaagagcgccgttcgcagcattggcttaatattaacattgatgcatgtaatgcaggaattaaacaaactcgctttgatatgatgttcagtggcataaacaccttcatatcatctatagatcaagttgctatcctatggttaggcgccattatggtgattgataacaacatgacgttaggtatgtttatggcgtttaactcttatcgtggccagttttctcaaagagcatctaatttgatcgatctctttatgcaactgcggatgttatcattacataacgagagactatctgagattgttttcagcgaacccgagaaagagctcccggcacgtcgagttttcgatgagaatagtggagtgaagctggagattaaaaatctcagttatcaatatgacccgttctcgcaacctattttttctaactttaacctgcaggttgagccaggagaatctattgcgcttgttggaccttcaggggtcggtaaaacgactttactgaaagtgatgtgtggtttgttatctccaacttcaggtgaggtaattgccgataatcttgacatttataaaatagggcttaataactaccgcctggggacagcatgtgtcctgcaagaagatcgtcttttttcggggtcaattagcgataatatcagcgggtttgaagataatgcggatgaagaattaattgttgagtgtgctcgacgcagtaatattcatgatgaaattatgaaaatgccaatgggttatgaaacaatgataggtgagttagggctgggtatttcaggtgggcaaaaacaaagactcttaattgccagagcgctttaccgcaagccgagcattttgtttatggatgaagcaacaagtcatcttgatttgaagaatgagtctgccataaaccaatctattgccagtttaagtataacccgaatcattgtcgcgcatcgtccttcaacgatagcgtctgcagaccggatcattgatctttctcaatatggaaagcaagcatcataa

SEQ ID NO: 139447 - DNA, 186 bp, Enterobacter cloacae
atggttatctcgcacgaccgctggttccttgaccgtattgccacccacattctggattaccaggatgaaggtaaggttgagttcttcgaaggtaactttaccgagtacgaagagtacaagaaacgcactctcggcgccgacgcgctggagccgaagcgaatcaagtacaaacgtatcgcgaaataa

SEQ ID NO: 139448 - DNA, 1233 bp, Enterobacter cloacae
atgtcgtcatttgactatttaaaaagcgccattaagcagaaaggctgtaccctgcagcaggtggcggaagccagcggaatgaccaaggggtatcttagccagctgctgaatgccaaaatcaaaagcccgagcgcgcagaagcttgaagcgctgcatcgtttcctcgggctggagtttccccgccgacagaaaagcgtcggcgtggtgtttggtaagttttacccgctgcataccgggcatatctacctgatacagcgcgcctgtagccaggtcgatgagctgcatatcattatgggctatgacgatacccgcgaccgcgagctgtttgaagagagcgccatgtcgcaacagccgacggtgcctgaccgcctgcgctggctgctacaaacctttaaatatcagaagaatattcgcatccacgacttcaatgaagaggggatggagccctatccgcacggctgggacgtctggagccatgggatccgcgcttttatgagcgaaaaagggatcgagccgaaccggatctatacctcggaagaggccgatgcgccgcagtaccttgagcatctggggatcgagacggtgcttatcgatcctaagcggacctttatgaatattagcggcgggcagatccgcgagaacccgttccgctactgggaatatattccgacggaagtgaaaccgttctttgtgcggacggtggcgatcctcggcggcgagtcgagcggtaaatcgacgctggtcaataaactcgccaatatcttcaataccaccagcgcctgggaatatggccgggattatgttttttcgcatctcggcggcgatgagatggcgctccagtattcggattacgataaaattgcccttgggcatgcgcagtatattgattttgcggtgaaatatgccaacaaggtggcgttcatcgataccgacttcgtcagcactcaggccttctgtctgaagtacgagggacgtgagcacccgtttgtgcaggcgctgattgatgaataccgcttcgacctggtgatcctgctggagaacaataccccgtgggtggccgatggactgcgcagtcttgggagctcggtggatcgtaaagagtttcagtcgttgctggtatcgctgctgaaagagaacgagatcgaattcgtccatgtgaaggagtcggactacgatgcccggttcctgcgctgcgtcgagctggtgaaacagctgatgggcgagcaggggtag

SEQ ID NO: 139449 - DNA, 594 bp, Enterobacter cloacae
gtgaacgagctgggcgtcttcgccatgaccgagcagggcctgcgcgaagtgagcaacccgtccgctatcttcctcagccggggagatgaaatcacctccggtagctcggtgatggtggtctgggaagggacccgcccgctgctggtggagatccaggcgctggtcgatcactcaatgatgtccaacccgcgccgcgtggcggtggggctggaacagaaccgcctggcgatcctgctggcggtgctgcaccgtcacggcggcctacagatggccgatcaggacgtcttcgtcaatgtggtcggcggggtgaaggtcacggaaaccagcgccgacctggcgctgctgctggcgatggtctccagcctgcgcgaccgtcctctgccgcaggatctggtggtctttggcgaagtggggctggccggggaaattcgcccggtaccgagcggtcaggagcgtatctccgaagcggcgaagcacggcttccgccgcgccatcgtcccggcggccaatgtgccgaaaaaagtgccggaaggcatgcaaatctttggcgtgaaaaagctttcagacgcgctaagcgtttttgacgacttataa

SEQ ID NO: 139450 - DNA, 468 bp, Enterobacter cloacae
  misc_feature (440)..(449): n is a, c, g, or t
atgaaaaccctgtacgtcaccggggaggagtccctgcagcaggtggcgatgcgcgcccatcgtctcgggttgccaacggccaacctgaacatgctctcggaaaccagcattgagcagatctgtcagatcgccgatgaagaaaagccgcagctgatggtgatcgactccatccaggtgatgcatatggccgacgtgcagtcgtcgccgggcagcgtcgcccaggtacgggaaaccgcggcctatttgacgcgctttgctaaaactcgcggcgtggcgattgtgatggtcggccacgtcaccaaagacggctcgctggccggtccgaaggtgctggagcactgtatcgactgctcggtgctgctggacggggatgccgactcccgcttccgcacgttgcgcagccataaaaaccgctttggcgcggtgaacgagctgggcgnnnnnnnnnngcacgttgcgcagccataa

SEQ ID NO: 139451 - DNA, 1254 bp, Enterobacter cloacae
atgcttaccgatatccagcttaaaagacttaaaccgcaggagaaaacctacaaaattaccgacagggatgggctctatgtagccgtatcgcccaccggaactcgctcatttcgttacgattatcggattaatgggcgtcgtgaaactctgaccattggacagtatggcgctgacggtatttctctggctgaagcgcgtgaacaactcattgccgccaaaaagctgatcaaatcaggcgtgtcgcctgctgcgaagaaacgtgacggtaaaaatcagatcagaaatgcggaaactttcgcaaattttaccgtcagctatatgaagcgtgcctcccttgcagacagcacgagatcgatgaagcaggccgtcattgaccgggacatcattccttttctgggtaacaagcaaatggcggagattacgccgtcaatggttcgagccttgtgcgatcgcatcgtggatcgtggcggtaatgccacggcggtacaggcgcgtgagattatcagtagcgtttatacatacgcgaaaaaccgggggcatgactttaagaatcccgctcaggatatcaaggccagttcgatagccacatttcttcctcgtgacagaaccctttctctgccggaaatatctaccttctttaatacgctggataccgttgctgggatgcccacgctcaaactggccctgaaactgatttttcttacgctggtgcgtaaaagtgaatttactcaggcgacctggaatgaagtgaatttcaatactaatgaatggaccatacccaaaggccgtatgaaagggggacggcctcatgtcgtctatctttcccgtcaggcttgcgatctgctggtggcgctgcaaatgtgtgctggaggaagtccttacttacttgccgggcgctatagcatcaacaaaccgttgtctaatgcagctctcaacggggttattaccacgacggtaaaagttgcacagtcgcaggggaagtcgctggagcattttaccgtccatgacatgcgacgaaccgccagcactttattgcatgaggcagggtatccatcagactggatagaaaaatgcctcgcgcatgagcaaaaaggggtgagggcaatttacaacaaagcgaaatatgcacagcagcgtgcttacatgttgcagcagtgggcggatatggttgatgggtggatcgccgggacgctggtgaggcttactccgttttcgccgagcaagtatgaagagtggataaaagtggaattataa

SEQ ID NO: 139452 - DNA, 1047 bp, Enterobacter cloacae
gtgcagttccacccggaagtgacccacacccgtcagggaatgcgtatgctggagcgcttcgtgcgcgacatctgccagtgcgaagcgctgtggaccccggcgaaaatcattgacgacgccgttgagcgtatccgtcagcaggttggcgacgacaaagtgatcctcggcctctccggcggtgtggactcttcggtgaccgcgatgctgctgcaccgcgctatcggcaaaaacctgacctgcgtattcgtggacaacggtctgctgcgcctgaacgaagcgcagcaggtgatggagatgttcggcgaccactttggcctgaacattgttcacgttgaaggcgagcagcgtttcctcgacgcgctggcgggtgaaagcgatccggaagcgaagcgtaaaattatcggtcgcgttttcgtggaagtgttcgacgaagaagcgctgaagctggacgacgtcaaatggctggcgcagggtaccatctaccctgacgttatcgaatctgccgcttccgccaccggtaaagcgcacgtcatcaaatctcaccacaacgtgggcggcctgccgaaagagatgaagatgggcctggttgagccgctgcgtgagctgttcaaagacgaagtgcgtaagatcggcctggaactgggcctgccgtacgacatgctctaccgtcacccgttcccgggccccggccttggcgtgcgcgtgctgggcgaagtgaagaaagagtactgcgacctgctgcgtcgtgcggacgctatcttcatcgaagagctgcacaaagctgacctgtataacaaagtcagccaggcgttcactgtgttcctgccggttcgttccgtcggcgtgatgggcgatggccgtaaatacgactgggtcgtttccctgcgtgcggtggaaaccatcgactttatgaccgcgcactgggcgcacctgccgtatgatttcctcggccgcgtctccaaccgtatcatcaatgaagtgaacggtatctcccgcgtggtgtatgacatcagcggcaagccgccagcaacgattgagtgggaataa

SEQ ID NO: 139453 - DNA, 693 bp, Enterobacter cloacae
  misc_feature (672)..(681): n is a, c, g, or t
atggcaaccaggcgtgcgttcattcttgcgggtaccggcagcggttgtggcaaaaccaccgttatgctcggcctgctcagcttgctccaacagcgcggtatgcgggtgcaaccctgtaaagtagggcctgactacctggataccgcctggcacaccgccatcagcggcatcgcttcccgcaatctcgacagctttatgcttcccgccccgatactcaacgcgctgtttaccgaacagctacagcaggccgacatcgcggttatcgaaggggtgatgggcctgtatgacggctacggcaccgaccccaactactgcagcagcgcggcaatggctaagcagcttggctgcccggtgattttgctggtggatggcaaagcggtgtcgacctccatcgccgccacggtgatgggttttcaacattttgatccggctctcgacatcgctggcgttatcgtcaatcgggtcaacagcgacgcgcacttccagctgctgaaaagcgccattgagcgctactgtcaggtgccagtgctcggctatgtgccgcgcgtggaaggcgtggcgctgcccgaacgacatctgggactggtgaccgcccgcgagtcggtggtcaatcagcaggcatggcgggattttgccagcctgctggggcgcaccctcgacatagaccggctnnnnnnnnnnccctcgacctag

SEQ ID NO: 139454 - DNA, 912 bp, Enterobacter cloacae
atgatttctgcgagtaccttgaactcagaactcatcaataaaatcgcacaggattttgcgcaagccaccagtctggcggttgtggtcgtcaatattcacggtgatgagatttctgaattgtttaatttcacgccgttttgccagctgatgcgtcagcacccggagcacagcggacgctgtcgcatgagcgaccgctgcggcgggctggaagcctcgaaaaaagaccagctgtgtatctaccgctgtcatgcggggttaaccgatttttccatcccgctggtgatcgccggccacctggtcggcttcgtgctgtgcgggcaggtgcgtctgagcaatgatgttgaactggttgatatcttgaacgtcgatgaccgctggcaggacgatccggcgctggtccaggcgtttcgcgatgtgccggagatggactattcgcgggttatcgcttcggcggatctgctgaagctgatcgtcgagaattgcctgaaaaaacagctcaactttgtggttatcaaagataacccgtcgcagaacgacccggcgcaggccagccgggcgccctcgccgcacgatggcaaaatgaagaaggcgctgcgctatatcgacgcgcatctctccgatgagctgcgtctggaggatgtggcggcgcatgtctatctcagcccgtactacttcagcaaactgtttaaaaagtatcaggggatcggttttaacgcctgggtcaatcagcagcggatggcgagcgcaaaagagctgctatgccacagcgactggagcatcgccagcatcgcgcggaatttaggtttttcgcaaaccagctatttttgcaaagtgtttcgccagacctatcaggtaacgccgcaggcatttcgtcagcaaattaatgccggatcacaaactgagtctttttaa

SEQ ID NO: 139455 - DNA, 648 bp, Enterobacter cloacae
gtgactcaatcactgttcgatttttctgcatatttcaagtttttcatcggcttatttgccctggttaacccggttggcattattccggtattcatcagtatgaccagctatcagccggctgcggtgcgtaataagaccaacctcaccgccaacctgtcggtggcgatcatcctcctgacgtcgctgttcctcggcgatggcattctgcagattttcggtatctccattgactccttccgtatcgccggcggcatcctggtggtgaccatcgcgatgtcgatgatcagcggtaagctcggcgaagataagcagaacaagcaggaaaagtcggagacggcggtccgggagagcatcggcgtcgttcctctcgcgctaccattaatggccgggccaggggcaatcagttcaactatcgtctgggggacccggtaccactcctgggtgcatctggtcgggttctcactggcgatagcggtatttgccctctgctgctgggggattttccgtattgcgccgtggctggtccgtttgctggggcagacgggaatcaacgtcatcacccgtattatgggcctgttgctgatggccctcggcattgagtttattgtgaccgggattaaagcgcttttcccagggctgctgagttag

SEQ ID NO: 139456 - DNA, 297 bp, Enterobacter cloacae
gtggtttttgatcactttgtcttcaacgatgcccatgccggattcggctacggccattttggcgagagggattcgagcatctgcagcggccagagcggcggcgcggaagattttgtcgacttgttcttgagtgaaactggcatattcacgctgggctttcttgacacgctcaacaagcgcgttcagttcagcgatattagtaacagccataatgctctcctgataatgttaaacttttttagtaaatcagtcgctcgattcgacattatagacaggccgttaacagcttgcatgtaa

SEQ ID NO: 139457 - DNA, 168 bp, Enterobacter cloacae
atgatggcgttacgcgttttcagactgatgagcgatttgaaaatggctgttgaagtcgggttagtggtcggtacgataccgcagatgatgccgataggctcagcgatagtgatggtgccaaaggtgtcgtcttctgacagaacgccacaggttttttcgtctttataa

SEQ ID NO: 139458 - DNA, 333 bp, Enterobacter cloacae
gtgaccgataccgcccatggcgaccagtttttctgctttggctaccgcgtcttcgaaatcttttgcacgatacatagccagcgtcggagacagtttttcgtgagcaaacggctcgctctcgtcaacgttggtcacttcaccaatcagaattttggtggtggccggcacggtgaagcctgccagttcagcgattttggccgctggctgaccaacgatagccgcgttcagcgcgccatttttcaggataatgtcctgaacggctttcagctctttaccctgcagcaggtagccgccgtggctggcgaaacgttcgcgaaccgcgtcatagactga

SEQ ID NO: 139459 - DNA, 165 bp, Enterobacter cloacae; identical to SEQ ID NO: 97282

SEQ ID NO: 139460 - DNA, 681 bp, Enterobacter cloacae
atgaaaatattaatcgttgaagacgaaattaaaacaggtgaatatctcagcaaggggctgacagaggcggggttcgtcgtggatcacgctgataatggtctgaccggatatcatcttgccatgacagccgagtatgatttagtcatcctggatatcatgctgcctgatgtaaacggctgggatatcatccgtatgctgcgcagtgccggaaaggggatgccggtattactgctgacggcccttggcacgattgaacacagggtcaaaggacttgagctgggtgcggacgattatctggtgaagccctttgcgtttgctgaactgctcgcccgggtaagaaccctcctcaggcggggaaacacgatgatcacggaaagccagcttaaagtggctgacctctcggttgatctcgtatccagaaaagtcagccgcgccgggaaccgcattgtgctcaccagtaaagagttcagcttgctggaattcttcattcgccatcagggagaagttcttccccgctccctgattgcctctcaggtctgggacatgaattttgacagcgacactaacgcgattgatgtcgcagtaaagcgactccgcgctaaaatagacaacgattacgggacaaaactgatccagacagtgcggggcgtgggctacatgctggagatcccggatgcatag

SEQ ID NO: 139461 - DNA, 612 bp, Enterobacter cloacae
ttgtggatctccctcaaccaggcagggcatcccgttaaatttgagcgtgatattgcgttcttcggcccaggcttcgaaaaactcgaagactttcatgacttccgctctgaggtcaaacatgaccctgtcaggtatcagctgattattatctgcctgtgccaggaacagcatatcgctgaccattttggtcatccggttatactcttcaagactggaatagaggacatcctcaagttccctctgtgttcgatcctgactcagtgcgatttcagtctgcgtcaccagattggtgatgggcgttctgatctcatgcgcgatatcggcagagaaattggcctggcgggtaaagacatcctcaatctttccaatcatatgattgaacgagataaccagttgctccagctcaatgggaacgcgtgtcggttccagtcgcgcatcaagattctcggaggtgatgtttttaatggcattgctgacattacgaaggggcaggtgcccctgacggacagcgattcgaatgatcagaacaatcaacaggcttatcacgacggcaatcgcaatcaggttctttttcagcgcatcgaggtaatggagatggaaattaatggatag

SEQ ID NO: 139462 - DNA, 231 bp, Enterobacter cloacae
atgaatacgggtttaaggcaggttctgcgatatgcaggcgtcccggttgacgccgctgaaccggtgcgccggcaattcggtagccgcctgattttaatcgtgacggttgctcttcttccgctgttgattgttgacgtccctctgtggctatttgtgctctctcagattatctggggaagcggtatgtacattggtatctccgtggccagtgataaaccagatcgccgataa

SEQ ID NO: 139463 - DNA, 465 bp, Enterobacter cloacae
ttgcgcttcaaggcgggcgataagcagcgcattattcagcgccccggccaccagcgcggcaatcagccgcagctcttcatcgctgaagctatcgaaacgatcggcatccatgccgtccagggtcagcgcgccaatcagcgtctgcccggcaaacagcggcagtcccacgcaggcatggactttgaggctctcatgaccggggatcagcccgtcataggggtcgggcaggtcgctatccgccgggaagcgcaccacatccccggcgcgcgcaatcgcctccagccgcgggtgtccttccagggcaaagcgccgaccgagcacatcctgcgccaggccatcgatcgccagcggcacaaactgatgcgcctcatagcgcagcagcgccgaggcatcgcagccaagaatttgccgcagggtagtaatcaggcgcgaaaagcggtcggtgtgaccaatatcgctttgtaa

SEQ ID NO: 139464 - DNA, 1449 bp, Enterobacter cloacae
atgtctattgtggtgaaaaataacattctttgggttggccaacgtgactgggaagtgcgtgatttccacggcaccgaatataaaacgctgcgcggcagcagctacaacagctatctcatccgcgaagagaaaaacgtgctgatcgataccgtcgatcataaattcagccgcgagttcgtacagaacctgcgccgcgaaatcgacctcgccgacctcgactatatcgtcattaaccacgccgaagaggaccatgccggcgcgctgaccgaactgatgatgcagatccccgatacgccgatctactgcacggccaacgccatcgactcgatcaacggccaccatcatcatccggagtggaacttccacgtagtgaaaaccggcgatactctcgacatcggtaacggtaaacagctgatcttcgtggaaacgccgatgctgcactggccggacagcatgatgacctacctgaccggcgacgcggtgctgttcagcaacgacgccttcggccagcactattgcgacgaacatctgttcaacgatgaagtggaccagactgaactgtacgaacagtgccagcgctactacgccaacatcctgacgcccttcagccgcctggtgacgccgaaaattactgaaatcctcggcttcaacctgccggtggagatgattgccacctcccacggcgtggtctggcgcgataacccgacgcaaatcgtcgagaaatacctcgagtgggcggcggattatcaggaagatcgcatcaccatcttctacgacaccatgtccaataatacccgcatgatggcggacgccattgcccaggggatcaccgaggttgacccacgggtagcggtgaaaatctttaacgtcgcccgcagcgacaaaaacgacatcctcaccaatgttttccgctcgaaaggcgtacttgtcggcacgtccaccatgaacaacgtgatgatgccgaaaatcgccgggctggtggaagagatgaccgggctgcgttttcgcaataaacgcgccagcgcctttggctcgcacggctggagcggcggcgcggtagaccgcctgtccacccgcctgcaggatgccggctttgagatgtcgctgagcctgaaagccaaatggcgcccggatatcgacgcgctggagctgtgccgccaacacggtcgcgacatcgctcgccaatgggccctctcgccgctgccggttgctgaagcagcgacaacgccggaaccacaggactgcgcctgtgccgcggccgcggccgccgatctcggtcccatgatgcagtgcagcgtgtgccagtgggtctatgacccggcgaaaggcgaacctaatcaggatgtacagccgggtacgccgtggagcgaagtgccggacaatttcctctgccctgagtgttctcttggcaaagatgtctttgacgtactggcgacggaggcaaaatga

SEQ ID NO: 139465 - DNA, 369 bp, Enterobacter cloacae
atgaatattgacgtcgaaaaactggtaaaacaattgggtaagtcctatcaggagattcttgagaaagggttgattccttataaaacaaaaagttatggtgccattgatgatgatacagccagattggatatgaaacgagaaggaattcttttggttttcaccaataattccgagaaaaatcttactgaaattacattaaggttagaagataaaggcaaaacagattgggtattccccaatccgatgccatttggtatggaaccggtgatgacccaattgtgggttagagagcgctttgggttgcccatgatttatgctgtatgctctaccagctcctcatcaatatatcgctgccgtatttatctataa

SEQ ID NO: 139466 - DNA, 381 bp, Enterobacter cloacae
atgaagcatgagggtatatatttagcatttgttaatgatcttgaaaaaaaaatgaaagaagtaacattaacgttagaggatgaaagcaagagtgactggttgtttcctaatccgatgccttttggtctggagcctgtgatgacgcagccgtgggtacgggcgcgttttgggttgccgatgatttatgttgatgcgaaagtggttatgacgctctatagaggagtaaaggagttttatccgctattagctcctgatcaaaatatagttgcgtcgtttagctataacaaagatttctttgtagaaagtgtgactttttatccgctggaacgagcaaaggagattcaggttgcgctggagaaaaaacggcttggtggcaaatga

SEQ ID NO: 139467 - DNA, 1356 bp, Enterobacter cloacae
atgacacaaatactgggaaccggagagggaaaaacatcatcagccgcaaaagagccggttgttgaacgtaaacccgcacaggtattttttgaatcaatggcgctggctgcctcaatgagtggttattatgcagggccaacagccacaacgctgggaaattcgctttcattaggggcggggactgcggcaggtgtcggagaaggcgtcgcgggcgcacgggtgctggctgcgcctaatcccctcaccgttgctctgctggctatcttctattctccgtcactgaatgaaggtgagacggaaatgctacaagatatacgtggcgaccagctctatcagaatctgatccatggccagatgatggtgggcgcttttacccgcgtaaactcaacggtcattcagggggattatgccccggaatatgaactccgggaaatagcccgacaaaatggcacagtgcgcacgagggtgcgctttcgtattgaagaagatcctgagtcaggggaactggtttcccgcagctatgaggtgggggaaaaaagcgggctggatcgggtccgggtgcggtttgcaaaacagctggataaagagacatggggctttgaagatccttcaattaaaggaacatttgtctggtcccggtctgccgggcagggaaaatttgagtggggagccagccagacgactgtccatgacgggagcgctggcggctctaccacaccgcctacacccattccggaaccgcggagcgtctggggattgcctaacccggccccggaatcgttaccgcccgtaccgggaacgccgatcccggaggaacagggatcaaatattgaaacattgcccatcgaagaccgggatttcaatgactttattattgttgacccgatgggggttgtcccggcaatctatgtgtattttaagaaagcccctgtggaagagtatgaggttgactattatgaaaattttgaaggccgttcaaggcagggaaaatatcaagtcgatcatattccatctagagatgcggttcgtgtatatttagaggatttatatcctgatgagggaagtaaatatatagataagatggttgataaggttgcttcagttgctattccaatagctgttcatcaaaaatgtagtgaaacctatggcgggcgtaataatcgtaaggtagagacagaaagcggcgagatgataactaaaaaagagctagatgctcgtgacttagaagctgccgtcaatgccaactgggatgcgaatgctgaatgccttaagaatgaatatggtatgagtaacgagaaaatcgaagagatcagagcaaaactacataagttaaaccgaaatgtggggttatattaa

SEQ ID NO: 139468 - DNA, 597 bp, Enterobacter cloacae
atggctaagtctctcattactgctgttctgtcagcactgcgctgggctcactggctggttaagtgtgcggtggtgtatccgctggccatgatgatgttactggttgttctggtgttccggacgggaccgtacacgttcggccagacgctggtgaaaaccgtagagtctgtgcagcaggagggatatgtcattcaggactgcacggggccgaaagaacttaatggtgatgcggtgaacacaccactgcctccggttttacaggaagactgcaccaccgtcagtacggatgcggcagggtatgcagcatatatcgaccagagctatacgcataatattctctggctctggctgctgatggcggtggtgtttaccgggatcgctgtggttttccgtcggactcctgtccgcagggggatcatacggaaaaacggtgttgtcgtcggagagtctggttcgggttcttcaaggctgattccagcccgatctgatgtcagccagattaagcgtgtttacgatgaaatgagtccgggtgaaggggataaatttgttcgggcgattaaggaaaatacccaaatcaggatgaacctgaagaaataa

SEQ ID NO: 139469 - DNA, 570 bp, Enterobacter cloacae
atgaaggaattaatgctgttaattcctctgggcagcgctttgctcttaaccgggtgtgcgggcacagagaccgaatttcaatgtaatgccacgacgtcggatacctgtatgacgatggaacaggcaaatgaaaaagcgaagctgaaagaggaacgcagtgatgcaaagccggctgcggccgggttgccacaactggctgagggtaatttcagaacaacgtcagttaattcgtacccgttgccgccacagccaaatttaatgcagtcaagaacaacgacaacggtaccgactaatacagtaacgtcaggattgctgacgaataacagaatagtcagtgcgccggtatatcggcctgtggctgtaacgccagctgttcggccggtgagtgtatcaacttatacatcaccggtgacggctcctggtaactatccccggccattaagaaaaggggaggagacaacgtcattgtggatagcgccgtatgtggatgcagatgatgtatatcatcagccggcaacggttctttttgtcgtaaaaccatcggcgtggggacaacctcgccttaattga

SEQ ID NO: 139470 - DNA, 411 bp, Enterobacter cloacae
atgactgactcaatgaaatatctatggctgctttttcgcgaggattcgtcatatatttttatgttgatgctgattgttggttctgccgtaatcgtgtctgccttttttcagagagcaatcacatcctggtggggtaaaaccctcagtgtgatactgtgtatggtgagtatgattactacagcaacaggagttcttgatcctgaatcaacatataaacaaattataaacaggaaagaaaatatcatctatacgctgaaaaactgcagaatctccgcatttgaagcgcagcaggcagggtttctggctaaagcgaaagatggctggtcttgtccggatggcgtaacacggtatatggatgtgagatacagggataaggcagaggttaataaacttagcacggagggtaagtaa

SEQ ID NO: 139471 - DNA, 285 bp, Enterobacter cloacae
atggatgaattattcaaatggctgcttgcttttgtattttcagtatatctcttgctgtttgtattcagtaatgaccctgtaccagaagcgctcgcacaccactggactcatgactgccgcttgctggagaagaatattgataaaggtttattgtctcccacgcaaaaccggcttcagtgtggtgatgttattgaaaatgtcagtgcagatgagtatgaaaaggcgataagcgggaataagccggttaccttacaggagttaatcgaagagatattcattcgttag

SEQ ID NO: 139472 - DNA, 219 bp, Enterobacter cloacae
atgcatgcatttatttttctggtgctgatgacgccgagtagtggcggtgggatttggaatgtttctcccatgcctaatacagatgtttgcataaaaatgctacgggcactcgaagcacgtggaggaaggggttacggaggtaatacaggagagtgcattgaaattaaaacccgcgagcctttgagcagcgtgatggaaacattgaatgagggtgggtaa

SEQ ID NO: 139473 - DNA, 798 bp, Enterobacter cloacae
atgtttaaatggccctggaaagcagatgatgagtccggcaacgcagagatgccctgggagcaagcgcttgccattccggttttagcccatctttcgtccactgagcagcacaagctcacgcagatggctgcccgttttttacagcaaaagcggctggtggcattgcaggggctggagctgaccccgctgcatcaggcgcgcattgctatgctcttttgtctgccggtgcttgagctgggcattgagtggctggatggcttccatgaagtgctgatctaccctgcccctttcatcgtcgatgatgaatgggaggatgatattggtctggtccacaaccagcgggtggtacagtcgggacaaagctggcaacagggtcctgtagtgctgaactggctggatattcaagactcttttgatgcgtcaggctttaaccttgtggtgcatgaagtggcgcataagctagatacgcggaacggcgaccgggccagcggcgtgccgcttatcccgttgcgtgaagttgccggctgggagcacgatctccacgccgcgatgaacaacattcaggatgagatagatctggtcggcgaaagcgccgccagtattgacgcctatgccgccaccgatcccgcagaatgctttgctgtcctctcggaatattttttcagtgcgcctgaactgttcgcgcctcgcttcccggccctgtggcagcgtttttgccacttttaccgccaggatccgctggcgcgtagacgtgagaatggcctgcaggacgaaggcgatcggcgcattgttcactaa

SEQ ID NO: 139474 - DNA, 1104 bp, Enterobacter cloacae
atggctagcgccgctaatgccgccgaaatctataacaaaaacggtaataaactggacctctacgggaaagttgacggcctgcattacttctctgacgacgcttcagaggacggcgaccagacctatgttcgctttggtctgaaaggcgaaacgcagattacttccgagttaaccggctacggtcagtgggaatacaacattcaggcgaacaccagcgaaaaagaaggcgcgaactcctggacccgtctcggctttgccggcctgaagtttgccgactgcgggtcgctggactatggccggaactacggcgtggtctacgacattgaatcctggaccgatatgctgccggaattcggcggcgatacctacacccagaccgacgtttacatgaccggccgtactaacggcgtggccacctaccgtaacagcgatttcttcggcctcgtcgacggcctgcatttcgccctgcagtatcagggtaataatgaaaacgccggttctggcgaaggcactaataacggtgggaaacgtaagctggcgcgggaaaatggcgacggttttggtatctccagctactacgatctcgatatgggcatcagcttcggggcagcgtattcgtcttctgaccgtacccataaccagctggcggccgcgcgtagcagccagcgttatgccaacggcgataaagccgatgcctggaccgtcggcgcgaaatatgacgccaataacatctatctggccgccatgtatgctgagacccgcaacatgaccttctatggcaacgatagttttggcggaattgccaacaaaacgcagaacttcgaagtggtcgcgcagtatcagttcgacgactttaatttaccgctgcgtccgtccgtggcctatctgcagtcgaagggtaaagatctctacgcctattctcgctacggcgacaaggatctggtcaagtatgtcgacgtgggcatgacctactacttcaacaaaaatatgtccacctatgtggattataaaatcaacctgctggatgaagacgaccgcttctacaaaaacagcggtatcgcgaccgatgatatcgtcgccctcggcctggtctatcagttctga

SEQ ID NO: 139475 - DNA, 798 bp, Enterobacter cloacae
gtgcaggccatgacggcgcgcgcggccggtaatggacagcgggctgaagaacgcgcattccagcagcacgttttgggtttcgtcgttaacgccggagtgttccccgccgaagatcccccccatcgccagcgctttgttatggtctgcaatgaccagcgtgtcgctgtcgagctttgcttcagagccatcgagcaggaccagggtttccccttctttcgccatgcgcaccacgatcccgccttcaatacgatcgcggtcaaaggcgtgcatcggctggcccagctcaagcagcacatagttggtcacgtcaaccaccgcgtcgatggagcggatcccgcagcggcgcagcttctctttcatccacagcggcgtcggcgctttgacgttgatacctttcaccacgcgccccagatagcgcgggcaagcctgcggcgcgtcaacctgaatcggcagcacgtcgtcaatcgtcgcggcaaccggcgtgatttccggcgcgttcagcggcgctttgttcaggacagcgacatcgcgcgccacgccaatgatgcccaggcagtcggcgcggtttggcgtgacgctgatttcgatggtgttatcgtcaagcttgaggtattcgcgaatatcggtgccgatgggcgcatctgccggcagctcgatgataccgctatggtcgtcggaaatacccagctcggagaaggagcacagcatcccctcagacggctcgccgcgcagcttcgcggccttgattttgaaatcgcccggcagcacggcgccgatggtggctaccgcgacctttag

SEQ ID NO: 139476 - DNA, 615 bp, Enterobacter cloacae
gtgctcttcgtagcggttgccgcagatcgccccggccagcatcacatcctgacgaatgcccagcggcgcattggtgtccggcacaaagcgcaggccgctctcaaagatgcgcacccggctctgctgacggttctggttgtagaccacggtgcccagcaggccggtccacagcgacaggcgcatcgccgacatttcgctggagatcgggcttggcaggatcagcgcctcttccccggcgtggatcagctgctggactttcgggtcgacgaagctgtaggtgatcacttcctgatagcctttgtcgttcagcagcgttttcacgcgcttcagcgacaggtccgcttcgcggtgggttcccatgatcagacccgcctgcaccggctcgtcaggaatgttgttgtagccgtaaacgcgagccacttcttcaaccagatcttcttcgatctccatgtcgaaacgccagctcggcgcaaccgcctgccattcgccctcgccaaccgtcacttcgcagccgaggcgctgcagaatgtcggtgacctgcgcgtcagcgatatggtggccaatcaggcgatccagcttgctgcgacgcagcgtaatggtggcgcgtgttggtag

SEQ ID NO: 139477 - DNA, 972 bp, Enterobacter cloacae
atgagtaagatttatgaagacaactcgctgactatcggtcatacgcccctggttcgactgaaccgtatcggtaatggacgcattctggcgaaggtcgaatctcgtaacccaagcttcagcgttaaatgccgtatcggtgcgaatatgatttgggatgctgaaaagcgtggcgtgctgaaacctggggttgagctggttgaacccaccagcggtaacaccggtattgctctggcctatgttgcggcggcgcgtggctataagctgacgctgactatgcctgagaccatgagcattgagcgtcgtaagctgctgaaagcgctgggtgcgaacctggtcctgaccgaaggcgcaaaaggcatgaagggcgcgattcagaaggccgaagaaattgttgccagcgatccggcaaaatatctgctgctccagcagttcagcaacccggccaacccggaaattcatgagaaaaccaccggcccggaaatctgggaagataccgacggtcaggttgatgtgtttatctccggggtaggcaccggcggtacgctgaccggggtgtctcgctatattaaaggcacgaaaggtaaaaaagatctgattaccgttgccgttgagccaaccgactcaccggttatcgctcaggcgctggcaggcgaagagatcaaacctggccctcacaaaatccagggtatcggcgctggctttattccaggcaacctggatctgaagctgatcgataaagtcgtcgccattaccaatgaagaagccatctccacggcgcgtcgcctgatggatgaggaaggcattctggcgggtatctcttccggtgcggcggttgcggcagcgctcaaactgctcgaagacgaaacctttaccaataagaatattgtggttatcctaccgtcttcgggtgagcgttacttaagcacagcactgtttgccgatctcttcactgagaaagaactgcaacagtga

SEQ ID NO: 139478 - DNA, 1881 bp, Enterobacter cloacae
gtgagattcgatcccgttcgggaactgcttctcggtacgcttgcggattttctccgccagctgcggctgcatcatgttgccggtacgtttttccagcagctcttccagagagataccgtccaccatatccagcgggtcgataacgttacccttggatttggacatcttctggccttcgtcgtcgcggatcaggccggtcatgtagacggtatggaacggaacctgcggcttgccgtcttcgtctttgatgaagtgcatggtcatcatgatcatgcgggcaatccagaagaagataatgtcgaagccggagaccatcacgctggttgggtggaactgacgcagcgcgtcggtgttttccggccagccgagggtggagaaggtccacagcgcggaggagaaccaggtgtccagcacgtcttcgtcctggcgcagggcaacgtcagcgcccaggttgttttcctgacgcacttcctcttcggtgcggccaacgtagacattgccttcgttgtcgtaccacgccgggatacggtgaccccaccacagctgacgggaaatacaccagtcctgaatatcgcgcatccaggagaagtacatgttttcgtactgcttcggcacgaactgaatgctgccgttttcaaccgcttccacagccggtttcgccagcacgtcggcacgcacgtaccactggtcggtcagcattggctcgataaccacgccgccacggtcgccgtacggcacggtcagatcgtgaggtttaatctcttccagcaggccgagcgcgtcaacggcggctacgatggctttacgcgcggcaaagcgctccagcttctggaactcagccgggatgtcgctggaataaacgtcggattcgttgcctttggtgtcatacacttctgcgctttcgcggatatcgccgtcgaaggtcagaatgttgatcatcggaagttgatggcgacgaccgacttcatagtcgttgaagtcatgcgccggggtgattttcacgcagccggtgcctttttccatgtcggcgtgttcgtcgcccacaatcgggatacggcggttcaccagcggcagcaccacgaatttgccgatcaaatctttataacgcggatcttccgggttaacggccacgccggtatcgcccagcagggtttccggacgggtggtcgccaccaccaggtaatctttaccgtcggcggtttttgcaccgtcggccagcggatagcggatgtgccacatggagcctttagactcgcggttttccacttccaggtcagagatggcggtacgcagtttcgggtcccagttgaccaggcgtttgccacggtaaatcaggtcttctttgtacaggcgcacaaagacttctttcacggcgttggacaggccttcatccatggtgaagcgctcgcgctcccagtctacggagttgccgagacggcgcatctgacgggtaatggtgccgccggattctgccttccactgccagattttgtcgatgaacgcgtcgcgaccgtagtcgtggcgggttttaccctcttcagcggcaattttacgctcaaccaccatctgggtcgcgatacccgcgtggtcagtccccgcctgccacagggtgtttttgccctgcatgcgctggtagcggatcatggtatccatgatggtctgctggaaagcatgccccatatgcaaactgccggtgacgttcggcggcgggatcatgatgcagaaggactctttgctttcgtcgccgttaggcttgaaatagccctgctgttcccagtgctcgtaaagcggctgttcgatatcgcgtgggttatatgtcttttccattatttccaggttgccgtattcaggttaaaaccggccaggcggtacgctttgtag

SEQ ID NO: 139479 - DNA, 2019 bp, Enterobacter cloacae
gtgcgggcgatagctgacggtaccgtcatttcactccgcaaaagctcagacaagcgcgacctagcaccattcaacatcaacgccgataaacccaatacaaaggggagtaatgatggttatgtgctcataaagcatgaaaccgagatcggtagcggtgatgaaggaaaagtggctttctattccttatacatgcatctgaagtcgctggctgaaactgttaaagccggtgataaagtttaccgtaaggatcctataggccttccaggcatggttgatggagtgaatgctttccatttccagattttctgcgatgatgacaacatcagcaagctaacgggcaggaaaacaggagagctggatatttcgaagaatggccgcaccgatgcggtttatggtgatattcacttttatctgccaccgcagacaaagttttatgacaaggctccagcagataacagcatttctaccaccggactttctgaactatataccagcaatgtgcctctgtatgccagcatgactctggcccaaggcaagtgcacgatggttactcgtcagaaaaatacgcagactgacggaaaatatgatctgctgggtgaaccactggttaatgcagatggtgatgactacgaatacaatctctataaaaccgcgatgcggaattataaggagagcccaagtgccgggtttgaattacttcgctttgggcgagtgatcaacacggaccatgaaacactggtaccggcagacgcaccattatggatgacagtcaattacccgggtggtaaaggggtgatcaaccttgctgattccagtattaaaaagtttagtgacgctgatttccctcactggacgggctggcagatggtagacgacgatagtgatagcaacagccagtgtaattcagctattatcaagaaacttcacgaagttggtgacttcgataaccagtgcgggaagctaatctgtcatttcccatttgaatgggaaaaaagtacgatcgacatccgtttttcgtggctgaaaacgggaaatgaagagcatgaaccgatgacggaagccgattatgcaaagtttaaatcccatgcggaaacactatgctttgattctggagcgttgagttctgaccggttgtggcattttgagccaaaatcatttattcgacatttcaggaaatgtagttggctcgactctgaagtaattgaaaaagtaatgacggcgaatgctagtaaaaaaaataaaaatgcacttgaaggtattaaaaatattacattagagtactatgcggacataaatacaatcatgcgaaagtataacttatctgatgcaaatagaatttgtcattttttagggcagggtgcagttgaatcaggttatttattgtccatgcaagaaactagccagcaacaaattattgttgatggtgttcagcaaggtggtgtgattgttgaagcatcaacatttaatgaaactactaagctaggtcattggtacggagctcttaaagccgagaaggataactatttctccgggaaaaaatacaattcccgtggagggtatatcacaggatcctatagctggattaacggtaactgtggagatgtagatgcacaaaaattcagaggtagagggtttaaaatgctaactggacttaacacatattcaagctactgggtatatcgaggttggttgtcaaaaaatgactttgataaatattggtgggatgacccggagtacaagaaaaaaaattcagccggtatgaagaaaaaaccaccaaaaacaggaaaccctcagaaagtgacagaaaatgcatataactgtattgatacaggtggtttttttatagtttgttttaagtctaaagttctcaaaattatggatgaggacaaaattgggaaatctgatgatgacagcattattttgaaagtaactaaaaatataaatggtgcagataaaggaattgcagaaaggaaaatagctactaaaaaagcaaaagagatgattgatgatgaagtttaa

SEQ ID NO: 139480 - DNA, 1203 bp, Enterobacter cloacae
atgtcgagtaagttagtactggttctgaactgcggtagctcctctctgaaatttgctatccttgacgccgtgaacggcgacgaatatctgtccggtttagcggaatgcttccacctgccggaagcccgtatcaaatggaaaatggacggcagcaaacaagaagccgagttaggcgcgggcgccgcgcacagtgaagcgctgaactttatcgttaacactattctggcacaaaaaccagaactgtctgctcagctgaccgcaatcggccaccgtatcgtacacggcggtgaaaaatacaccagctccgtggtgatcgacgagtccgtaattcagggtattaaagacgccgcgtctttcgcaccgctgcacaacccggcacacctgatcggcatcgctgaagcgctgaaatccttcccgcacctgaaagacaaaaacgtggctgtattcgatacggcgttccatcagaccatgccggaagaatcctatctctacgccctgccgtacagcctgtacaaagagcacggcgttcgtcgttacggcgcgcacggcaccagccacttctacgtgactcaggaagccgctaagatcctcaacaagccggtggaagagctgaacatcatcacctgccacctcggcaacggtggttctgtttccgctatccgtaacggtaaatgcgttgacacctccatgggtctgaccccgctggaaggcctggtgatgggtacccgctccggtgacatcgatccggccatcatcttccatctgcacgacaccctgggcatgagcgttgacgcgatcaacaaaatgctgaccaaagagtccggcctgctgggtctgaccgaagtcaccagcgactgccgctacgtggaagacaactatcaggaaaaagccgacgctaaacgcgcaatggacgtttactgccaccgcctggcgaaatacatcggttcctacaccgcgctgatggacggccgtcttgacgccgttattttcaccggtggtatcggtgaaaacgccgcgatggtgcgtgagctgtcgctgggcaaactgggcgtactgggctttgaagttgaccatgagcgtaaccttgctgcccgcttcggcaagtctggcttcatcaacaaagaaggcacccgtcctgccgtggttatcccgaccaacgaagagctggtcatcgcgcaagacgccagccgtctgaccgcataa

SEQ ID NO: 139481 - DNA, 456 bp, Enterobacter cloacae
atgtcgacccctgagaaacgccccgttagcttctttagcttgttcaaccgcgggcagcattacgcaaagacctggcctctcgacaagcgcctcgcgccggtgtttattgaaaaccgcattattcgtgccacccgctatgccatccgcatcatgccgccaatcgccatttttaccctctgctggcagatagctcttggcggccagctgggccccgccgtcgctaccgcgctgtttgcgctgagcctgccgatgcagggactctggtggttgggtaagcgttcggtgacgccgctgccgccctccattcttaactggttctatgaagtgcgcggtaaactgcaggaggcggggcaggcgctggcaccggtcgaaggcaagcccgattatcaggcgctggctgacacgcttaagcgcgccttcaaacaactggataaaactttccttgatgatttgtaa

SEQ ID NO: 139482 - DNA, 723 bp, Enterobacter cloacae
gtggaacaggaagctgtcagtgcgctcgcccatcagttcgtcgatgatctgtgcgtcacgtgcagtacccagggtcgcggttaccagcgcctgcgtttcaccacgggtgaacagcgcagaaccgtgagtacgtggcagtacgccagtacgcacgtccaggccacggatcatgtctttttcacggccatcgatacgcggctcgcctgccagtacgcggctacgaacaacgtttttctcgatggcgtgcaggatttcgccaatttcgttagcgtccagcgtttcgtcttcggcaaccagggtcgcggtcacttcagatttgatcacatcaacctgagcatagcgctcctgtttgtcggtgatgcggtatgcgtcgctcagacgagattctgccagtgcagcaacgcgtgcgttcagcgcgtcgttggccgcttctggctgccagtcccaacgtggtttaccggcttctttcaccagatcgttgatgttctggataacaacctgctgctggtcgtggccaaataccacagcgcccagcatctggtcttcgctcagcagttcagcttcggattcaaccatcagcaccgcggcttcagtaccagcgacaaccaggtccagcttactttctttcagctcttcctgagttgggttcagcacgtactgatcgttgatataaccgacgcgcgcagcaccgattgggccattgaatggaataccagacagtga

SEQ ID NO: 139483 - DNA, 486 bp, Enterobacter cloacae
gtgaatacgcggagcgaattcagagatatcaccgcgtggcgcgttgatagcctgttccatcacacccaggatgtgcagacgcgcacctttagcctggttcagagcaacctgcatgatctctttggtgatgccttcaattttgatatccatctgcaaggcagagataccgtcgcgggaacccgctactttgaagtccatatcgcccaggtggtcttcgtcacccagaatgtcagacagaacaacgtagttgtcgccttctttcaccagacccattgcgatacccgcaacggcggctttaattggcacgcctgcatccatcagcgccagagaagcaccacacacggaagccatggaagaagaaccgttggattcggtgatttcagacaccacacgtacggtgtacgggaatttgtctgcttctggcatcactgccagcacgccgcgcttcgccagacgaccgtgaccaatttcacgacgcttcggtga

SEQ ID NO: 139484 - DNA, 630 bp, Enterobacter cloacae
gtgagacattggggttttcagcagatcttcatagttgaaggtccacacgccggtggcgttgaagtggacgaaggccagcgccagaatggcaatcagcatcaccaggccgctcgcctgggtatagatgaagaacttggtggccgctgtgatgcgcgttttaccgtccgaggctttgtggccccacagcgcgatcaggaagtacatcggcaccaacatcatttcccagaagaagaagaacaggaacatgtcgatggcgaggaacacgccgataacgccgcccaggatccacatcaggttgaggtggaagaagccctggtatttttcgatttcacgccacgaacagagcaccgccagcacgccgaggagaccggtcagcaccaccatcagcagcgacaggccgtcgatcgccagatggatgctaatgccgaagcgtgggatccacggcagcacgaattccgactgccattgcggaatacccgcggattgcgtcagagaatagccgccctgcatccacagctgcaggccaagcaccagcgtcagtcccatggtaatcagcgcgatccagcgcggcactttcacgccaaagcgttcggtctgccagcacaggaagccgccgataaagggaattaa

SEQ ID NO: 139485 - DNA, 1641 bp, Enterobacter cloacae
  misc_feature (1531)..(1540): n is a, c, g, or t
atgttcgcctcctggtacatgcgcggtgaagagggatattcccgcttcttcgcctataccaacctgtttatcgccagcatggtggttctggtactggccgataacctgctgctgatgtacctcggttgggaaggcgtgggcctctgttcttacctgctgatcggtttctactacaccgatccgaagaacggcgccgcagcgatgaaagcgtttgtggtgacccgcgtcggcgacgtgttcctcgccttcgcgctgttcattctttataacgaactgggcaccctgaacttccgcgaaatggtggagctggcgccgcagcacttcgctaacggcagcaccacgctgcagtgggcgacgctgatgctgcttggcggcgcggtcggtaaatccgcccagctgccgctgcaaacgtggcttgccgatgcgatggcgggtccgacgccggtctctgcgctgatccacgccgcgaccatggtcaccgcgggcgtctatctgatcgcccgtacccacggcctgttcctgatgacgccggaagtgctgcatctggtcggtatcgtcggggcggtcaccctggtgttggcgggcttcgccgcgctggtgcagaccgatatcaaacgcgttctcgcctactctaccatgagccagattggctacatgttcctcgcgctgggcgtgcaggcatgggacgcggcgattttccacctgatgactcacgcgttctttaaagcgctgctgttcctgtcgtctggttcggtcattctggcctgccatcacgaacagaacatcttcaagatgggcggcctgcgcaaatcgattccgctggtatacgtctgcttcctggtggggggcgcggcgctgtccgcactgccgcttatcaccgcaggcttcttcagtaaggatgagattctggcaggcgcgatggccaatggccatatcaatctgatggtggcaggcctggtcggcgcctttatgacctcgctgtacaccttccggatgattttcatcgtattccacggtaaagagcaaattcacgcgcacgcagggaaggggattacccatcatctgccgctgattgtgctgctggtactatccaccttcgttggcgcgctgattgtgccgccgctggaaggcgtactgccgcagaccactgagctcgcccacggtagcgtgatgacgctggagattgcctccgggatcatcgccattgccgggattctgatcgctgcatggctgtggctgggcaaacgcacgctggtgacctccatcgccaacagtgcgcctggccgcttcttcggtacctggtggttccatgcctggggcttcgactggttatacgacaaggtgttcgtaaaaccattcctcggtattgcctggctgctgaaacgcgatccgctgaactcgttgatgaatatcccggcgatcctttcccgcttcgcaggcaaaggcctgctggtgagcgagaacggttatctgcgctggtatgtggcttcaatgagcatcggcgcggtggtggtgctggcgctgctgatgnnnnnnnnnncgcgcggttttgcccggtggcgcttcgcttaccgggcctacgagaccgtaggtcgggtaagcgaagcgccacccgacacaacaaaccgcactcaaacgtga

SEQ ID NO: 139486 - DNA, 435 bp, Enterobacter cloacae
gtggagaagagctggggtctgggccgtatcgtgaccgagatcttcgaagaagtggcggaagcgcacctgatccagccgaccttcatcaccgaatacccggcggaagtttctccgctggcgcgccgtaacgacgtcaacccggaaatcaccgaccgctttgaattcttcattggcggccgtgagatcggtaacggctttagcgagctgaacgacgccgaagaccaggcgcagcgcttccaggatcaggttgatgcgaaagccgcaggcgacgacgaagcaatgttctatgacgaagactatgtcaccgcgctggaacacggcctgccgccgaccgctggtctgggtatcggtatcgaccgtatggtcatgctgttcaccaacagccacaccatccgcgacgttattctgttcccggcgatgcgtccgcagaaataa

SEQ ID NO: 139487 - DNA, 555 bp, Enterobacter cloacae
atggccggggaacacgtcattttgctggatgagcaggatcagcctgccggtatgctggagaagtatgccgcccatacgtttgatacccctttacatctcgcgttttcctgctggctgtttaaccagcagggtcagttgctggtcactcgccgttcgttgggcaaaaaagcctggcccggggtatggaccaactcggtctgcggacacccccagcagggcgagaccttcgagcaggccgtcacgcgccgctgtcgcttcgaactcggtgtggagatctctgatatcgcgccggttcacccggccttccgctaccgggcggtcgccccaaacggtatcgttgagaacgaagtgtgcccggtatatgccgcgcgcgtggtaagcgaagtgcagcctaacgacgatgaagtgatggactatcagtgggttgacctggcaatcatgttaagcgcgctggccgccacgccgtgggcgttcagcccgtggatggtgctggaagcggaaaatcgggacgcccgccaggcgctgaccgactttgttgcgcgtctgcgcgggtaa

SEQ ID NO: 139488 - DNA, 714 bp, Enterobacter cloacae
atgatgaaacgcttttatatgacactgatgctggcggcaagcctggtgctggccggctgctccagcacctccgattccggtggcacctacaccgttaaacgcggcgataccctgtacggcatctcccgcaccaccggcaccagcgttcgcgatctggcccgcctgaataacatctccccgccttacaccattgaggtggggcagaagctgaagcttaacggcagcagttcaacgaagacaacgaagaaaaaatcttcctctacgcgcaccgcggctgtcacgccttcgtccgcggtacctcagtcctcctggccgccggtgggacagcgctgctggcgctggccgaccagcggcaaagtggtcctgccttattccaccgccgatggcggcaataaaggcattgatatcgccggaacccgcggccagccggtgtatgccgccggggcgggcaaggtggtctacgtcggcaatcagctgcgcggctatggcaatctgatcatgattaagcacagcgaggattacatcaccgcctatgcccacaacgataagctaatggtgaataatggccagagcgtgaaggccggccagcaaattgccaccatgggcagtacggatgccgactcagtgcggctgcatttccagatccgctaccgggcgacagccatcgatccgctgcgttacctgccgccgcagggaagtaaacctaagtgctaa

SEQ ID NO: 139489 - DNA, 270 bp, Enterobacter cloacae
atgtctctaagcgttgaagctaaagcaaaaatcgtttctgagtttggtcgtggcgaaaacgacagcggttctaccgaagttcaggttgcactgctgaccgcacagatcaaccacctgcagggccactttgcagagcacaaaaaagatcaccacagccgtcgtggtctgctgcgcatggtttctcagcgtcgtaaactgctcgactacctgaaacgtaaagatgttgcccgttactctgcgctgattgagcgtctgggtctgcgtcgctaa

SEQ ID NO: 139490 - DNA, 1992 bp, Enterobacter cloacae
atgctgcgctttgtcgccgtcggtcgctgcgatcttcacggtaccgtcatcttcgatctcgatggtagtaccggtctcttcggtcagggcacggataacagaaccgcctttaccgataacgtctttgatcttgtccgggttgatcttgatggtgtggatacgcggtgcgaattcagagatatcgccgcgcggcgcgttaatcgcctgctccatcacgcccaggatgtgcagacgcgcacctttagcctggttcaatgcaacctgcatgatttctttggtgataccttcaattttgatatccatctgcagcgcagagataccgtcgcgggaacccgcaactttgaagtccatatcgccgaggtggtcttcgtcaccgaggatgtcagacagcacgacgaagttgtcgccttctttcaccagacccattgcgatacccgccacagcggcttttaccggcacgccggcgtccatcagcgccagagaggcgccgcagacggaagccatggaagaggaaccgttagattcggtgatttccgataccacgcgcacggtgtacgggaattcttcaatagtcggcatcacggccagtacgccgcgcttcgccagacgaccgtgaccgatttcacgacgcttcggagaccccaccatgccagtttcgcctacggagtacggagggaagttgtagtggaacaggaaggagtcggtgcgctcgcccatcagttcgtcgatgttctgcgcatcgcgtgcggtacccagagtcgcggtaaccagcgcctgcgtttcgccacgggtgaacagcgcggaaccgtgagtacgcggcagaacgccggtacgaacgtccagaccacggatcatatctttttcacggccatcgatacgcggctcgccggccagtacgcggctacgaaccacgtttttctcgatggcgtgcaggatttcacccagctcgttagcgtccagggtttcatcttcagcaaccagcgtggcgatggtttcagatttgatcacgtcaacctgagcgtaacgctcttgtttgtcggtgatacggtaagcatcgctcagacgggattcagccagcgcagccacgcgcgcgttcagcgcttcgttgaccgcttccggctgccagtcccaacgcggtttaccggcttctttcaccaggtcgttgatgttctgaataacaatctgctgctgctcgtggccgaagaccaccgcgcccagcatctggtcttcgctcagcagttccgcttcggattccaccatcagcacggccgcttcggtaccggcaaccaccaggtccagtttgctggacttcagttcttcctgggttgggttcagtacgtactggtcgttgatgtaacccacgcgcgcagcgccgattgggccattgaacggaataccagacagcgacagcgcagcggaagcaccgatcatcgcgacgatgtctgggttaacctgcgggttaacggaaacgacggtggcgataacctgaacttcgttaacgaagccttccgggaacagcgggcgaaccgggcggtcaatcagacgcgcgatcagggtttcgccttcgcttggacggccttcacgacggaagaaaccacccgggattttaccggcagcgtaggtacgctcctggtagttaacggtcagcgggaaaaagtcctggcctggcttcgcttttttctgacccacaacggtaacgaataccgcagtgtcatccatgctaaccatcacagcggccgttgcctggcgcgccatcatgccggtttccagggtcacggtatgctggccgtactggaatttacgaacgatcggattaagcaaaattctatcctttttatctataaatcacgccatatccacgacatagcgtctattgacccgatcttctgcatcctcgcgactaatgacaacctttacccgcccctgcggatgaagcctctcattagccgcgcgaacctctgcatgaagatcattactagcaacaatacatga

SEQ ID NO: 139491 - DNA, 1005 bp, Enterobacter cloacae
gtgaaacacacgtttgataacttcgtcgaaggtaaatctaaccagctggcccgcgcggcggcgcgtcaggtggcggataacccgggcggcgcctacaaccccctgttcctctatggcgggacgggtctgggtaaaactcacctgctgcacgcggtggggaacggcattgtggcgcgtaagccgaacgcgaaagtggtctatatgcactccgagcgtttcgttcaggacatggttaaagcgctgcagaacaacgccatcgaagagtttaagcgttactaccgctccgttgacgccctgctgatcgatgacattcagttctttgccaataaagaacgatcccaggaagagtttttccacaccttcaatgcgcttctggaaggtaatcagcagatcatcctgacgtcggatcgttatccaaaagagatcaacggcgttgaggatcgtctaaaatcccgcttcggctgggggctgacggtggcgatcgagccgccggagctggaaacccgcgtcgcgatcctgatgaaaaaagccgacgagaacgacatccgcctgccgggcgaagtggcgttctttattgccaagcgtctgcgctcgaacgtgcgtgagctggagggggcgctgaaccgcgttatcgccaacgccaacttcaccggccgggcgatcaccatcgatttcgtgcgcgaagcgctgcgcgatctgctggcgctgcaggaaaaactggtcaccatcgacaatattcaaaagacggtggcggagtactacaagattaaggtagcggatctgctgtccaaacgccgctcccgttcggtggcgcgtcctcgccagatggcgatggcgctggccaaagagctgaccaaccacagcctgccggaaatcggcgatgcgtttggcggccgagaccataccaccgtgctgcacgcctgccgcaagattgagcagctgcgtgaagaaagccacgacattaaagaagatttttccaatttaatcagaacattatcctcgtga

SEQ ID NO: 139492 - DNA, 1071 bp, Enterobacter cloacae
atgaaatttaccgtagaacgtgaacatttattaaaaccgctgcaacaggtgagcggtccgttaggtggtcgtccgacgctgcccattctcggtaacctgctgcttcaggtcgcggacggcgcgctgtcgctgaccggtaccgatcttgaaatggagatggtggcgcgcgtggcgctggttcagccgcacgaagcgggcgcaacgaccgttccggcacggaaattctttgatatctgccgcggcctgccggaaggcgcggagatcgcggttcagttggaaggcgatcgcatgctggtgcgttccggccgcagccgcttctcgctgtcgaccctgcccgccgccgatttcccgaatctggatgactggcagagtgaagtggagtttaccctgccgcaggcgaccatgaagcgtctgatcgaagccacccagttctcgatggcgcaccaggatgttcgttactacttaaacggcatgctgtttgaaaccgaaggcagcgaactgcgcacggtggccaccgatggtcaccgcctggcggtctgttcgatgccgctggaagcgtcgctgccgaaccattcggtgatcgtgccgcgtaaaggggtgattgagctgatgcggatgctcgacggcggcgataccccgctgcgcgtgcagattggcagcaacaatatccgcgcccacgttggcgattttatcttcacctctaagctggttgatggccgtttcccggattatcgccgcgtattgccgaaaaatccggataagcaggcttttgcgcgcgcggcgattctctccaacgagaaattccgcggcgtgcgactgtacgttagcgaaaaccagctgaaaatcaccgccaataacccggaacaggaagaagcggaagagattctggatgtgacctacgccggaacggagatggagattggcttcaacgttagctatgtgctggatgtgctgaatgcgctgaagtgcgagaatgtacgcattctgctgacggattcggtgtcgagcgtgcagattgaggatgcggcctctcaatccgcagcctacgttgtcatgcctatgcgattgtag

SEQ ID NO: 139493 - DNA, 1317 bp, Enterobacter cloacae
atggcagattatcagggtaaaaaagtcgtcattattgggctgggtatgaccggcctgtcatgcgtggactttttcatggcgcgcggcgtaaccccgcgcgtgatggacacccgcgtcgcgcctccggggctggataaattacccgaagcggtcgaatgccatgtgggcggactcaatgatacctggctgctggcggcggacctgattgtcgccagtccgggaattgcgctggcccatccttcgctcagcgcagcggccgacgctggcgtagagatcgttggcgatatcgaactgttctgccgcgaagcgcaggcgccgattatcgccattaccggttctaacggcaaaagcactgttactaccctggtgggcgagatggcgaaagccgctggagttaacgtcggcgtgggcggcaatatcggcctgccggcgctgatgctgctggacaccgatcgagagctgtatgtgctggagctctccagcttccagctggaaaccacctccagcctgcaggcggtggcggcaaccatcctcaacgtgactgaggatcatatggaccgctacccgctggggctgcagcagtatcgcgcggcgaagctgcggatttacgagaatgcgaagacctgcgtggtgaatgcggacgatgcgctcaccatgccggtacgcggggcggacgaacgctgcattagctttggcgtcgatgtcggtgactaccaccttaaccgccagcagggcgaaacctggctgcgcgttaaaggtgagaaagtcctcaatgtgaaagagatgcctctcaccggtcagcataactacagcaacgccctggcggcgctggcgctggccgatgccgcgggtctgccgcgggccagcagcctgaaggcgctgaccacctttaccggtctggcgcaccgtttccagctggtgctggatcacaacggcgtacgctggattaacgactcgaaggcgaccaacgtcggcagcaccgaggcggcgctgaacggcctgcagctggacggtacgctctatctgctgctgggcggcgacggcaagtccgctgatttcaccccgctgaagcgctacctcggcggcgatcgtattcgcctgtactgctttggtcgcgatggcgccgagctcgctgagctgcgtcctgaggtggcggtacaaactgagactatggaacaggcgatgcgtcagattgctcccctggtgaaagcgggggacatggtgctcctgtcgccggcctgcgccagcctggatcagtttaagaactttgaacaacggggcgagatgtttgcccgtctggcgaaggagttaggttga

SEQ ID NO: 139494 - DNA, 624 bp, Enterobacter cloacae
atgtcatacagtggcgaacgagacaactttgcaccccatatggccctggtgccgatggtcattgaacagacctcacgcggtgaacgttcttttgatatctactcccgtctgcttaaggaacgcgtcatttttctgaccggccaggtcgaagaccacatggcaaacctgatcgtggcgcagatgctgtttctggaagcggaaaacccggaaaaagacatttacctgtacattaactctccgggcggggtaatcaccgccgggatgtcgatttatgacaccatgcagttcatcaagccggatgtcagcaccatctgtatggggcaggccgcttctatgggcgcgttcctgctgaccgccggggcgaaaggcaagcgcttctgcctgccgaactcccgcgtgatgatccaccagccgctgggcggctatcagggacaggcgacggatattgagatccacgcccgtgaaatcctgaaggtgaaaggacgcatgaatgagctgatggcgcatcataccggccagtctcttgagcagattgagcgtgacaccgagcgtgaccgcttcctgtctgctgcggaagccgtggagtacgggctggtcgactctattttgacccatcgtaattga

SEQ ID NO: 139495 - DNA, 1089 bp, Enterobacter cloacae
atgagccgtcatttcgttgacgcgatcatcaaagaaaaaatcaatccggccggcgcgccgaactacgttccgggcgaatacaaactgggcgaagacttcacctacgcggtagagttcgaagtgtatccggaagttgaactgcagggtctggacgcgatcgaagttgaaaaaccggttgttgaagtcaccgacgctgacgttgataccatgctggaaactctgcgcaagcagcaggcgacctggaaagaaaaagaaggcgcggttgacgctgaagatcgcgtaaccatcgacttcaccggttctgttgacggcgaagagttcgaaggcggcaaagcctctgacttcgtactggcgatgggccagggtcgcatgatcccgggcttcgaagacggtatcaaaggccacaaagcgggtgaagagttcaccatcgacgtgaccttcccggaagagtaccacgcagaaaacctgaaaggtaaagcggctaagttcgttatcaacctgaagaaagtcgaagagcgtgaactgcctgagctgaccgaagagttcatcaaacgtttcggcgtggaagatggttccgtcgctggcctgcgcgctgaagtgcgtaaaaatatggaacgcgagctgaaaggcgctgtgcgtaaccgcgtgaagtctcaggctatcgaaggtctggttaaagccaacgagatcgacgttccggctgccctgatcgacagcgaaatcgacgtgctgcgtcgtcaggctgctcagcgtttcggcggcaacgagaaacaggctctggaactgccgcgcgagctgttcgaagagcaggctaaacgtcgcgtcgttgttggtctgctgctgggcgaagtgatccgcaccaacgagctgaaagctgacgaagagcgcgtaaaagccctgatcgaagagatggcttctgcgtacgaagatccgtctgaagtcgttgagttctacagcaagaacaaagagctgatggacaacatgcgcaacgtggcgctggaagagcaggctgttgaagccgtgctggcgaaagccaaagtgtctgaaaaagccacttccttcaacgaactgatgaaccagcaggcgtaa

SEQ ID NO: 139496 - DNA, 1197 bp, Enterobacter cloacae
atgctgaaaattcttttactcttcgcactgttgatcgccgggatcgtgcttggcccgatgatcgccgggcatcagggctacgtcctgatccagaccgataattacaatatcgagaccagcgtgaccgggctggtgatcatcctgatcctcgccatggtggtgctgttcgccattgaatggctgctgcgccgcattttccgcaccggggcgcatacgcgcggctggtttgtcggccgtaaacgccgtcgcgcgcgtaagcaaaccgagcaggcgctgcttaagctggcggaaggtgattaccagcaggttgagaagctgatggcgaaaaatgccgatcacgccgaacagccggtggtgaactatctgctggcggcggaagcggcccagcagcgcggcgatgaagcgcgggccaaccagcatctggagcgcgccaccgagctggcgggcgatgacctgatcccggtggaaatcactcgcgttcgcctgcagctggcgcgtaatgaaaatcacgccgcgcgccatggcatcgataagctgctggaaattaccccgcgtcatccggaagtgctgcgcctcgccgaacaggcatacacccgcaccggcgcctggcagtcgctgctggacatcattccgtcgatggcgaaagctaacgtcggcgatgaagcgcaccgcgcggcgctggaacagctggcctgggttggcctgatggataaagcgctggccgatggcggcagcgaaggactacgcgaatggtggcgcaaccagagccgtaaaacgcgggcgctggtgccgctgcaggtagcgatggccgagcgcctcatcgagagcgacgatcacgataccgcgcagcaaattatcattgatggtctgaagaaacagtatgatgaccgtctggtgatgccgatcccgcgtctgaagaccaataacccggaacagcttgagaaagtgctgcgccagcagatcaaagccgttggcgaccgtccgctgctgtggagcaccctgggccagtcgctgatgcggcacggcgaatggcaggaggccagcatcgccttccgcgccgcgcttaagcagcgtccggatgcctttgattacgcctggctggcggatgtcctggaccgcctgcatcagccggaagaagccgccgctatgcgccgagatggactgctgctgacgctgcagaataatcctcagccataa

SEQ ID NO: 139497 - DNA, 666 bp, Enterobacter cloacae
atgaacgacccaagcctcatcggcgcccgccgggcgatcaccgacgacatcgccaccctctccgcggtaagccaggtggactatgacggcatgatcctcaaggttaatcagctggcgaatcaaatcgataacctgcggctggccgataataacgatgacgattcgccgatggacgctgatagcgatgagctttccagctctatcagcgaatggcgcgtcaacctgcagaaaagctggcagaactttatggacagctttatcaccgtgcgccgccgcgatgaaacggcggtcccgctgctggcgccgaatcaggatatctatctgcgggaaaatattcgctctcgcctgctggtcgccgcgcaggcagttccgcgccatcaggaagagacctggaaacagtcgctggataacgtctcgacctgggtacgcgcctattatgataccgatgacgccaccaccaaagccttcctcgacgaggtggacaagctcagtcagcaaagcattaccatgacggtgccggaaacgctgcagagtcaggcgttgctggaaaaactgatgcagacccgagtgcgcaacctgatggcgcagcctgccgttaccgcgggcggcgcgccttcgcccgcacctgctgcgccggccgcccccgctgcgccgcaaggagagtaa

SEQ ID NO: 139498 - DNA, 1488 bp, Enterobacter cloacae
atgaagccactgcttgaagctcgccagatccgcaaacagttctccggcgttgccgtgctgaagggcatcgactttacgctatgcgcgggccaggtgcatgccctgatgggaggcaatggcgcgggtaaatcgacgctgatgaagatcatcgccggcgtcgaaaccccggatagcggtgagctgacgatcggcgaccgcgcgtttgcgcgcctcagcccggcgctggcccaccagctgggcatctatctggtgccgcaggagccgatgctgtttcccaacctcagcgtgcgcgagaacattctctttcgtttgccgaagcgggcggataccaccgcgcgactgcaggaaaaactgcagcagctgaactgccagatcaacctcgatgccagcgccagcacgctcgaggtagccgatcaacagatggtcgagatcctgcgcggcctgatgcgcgaagcgcggatcctgatccttgatgaacccaccgcctctttaaccccgggcgaaacggagaggttgtttagccagatccgcgcgttacaggcgctggacgtggggatcgtgtttatctcgcacaaactgcccgaaatccgccagcttgccagccatatttcggtgatgcgcgacggggcggtagtgctgagcggcgagaccgcaacttaccgcgatgagcaactgattagcgctatgacgccggccagccgcgaccatacgctgagcgacacgcaaaagctgtggctggcgctgccgggcaaccgccgcacccaggcgcaggattttcccgtgctgcgggtggaggatcttaccggagaaggctttatcgatctcaatctggagatccgcgccggggagatcgtcggcctcgccgggctggtgggatccgggcgcaccgaatttgccgaaaccttatacggcctgcgtccaccgcgcgccgggcggatctggctggagaatcgcgagattagcaatgacagcacccgcgcccggctggccagcgggctggtctatctgccggaagaccgccaggtctcggggctgtttcttgatgcgccggtgcgctggaacacggtgatgttcaatcagccgtcgtggtggcagcaggggaaacgggaggcggcggtggttgagcgctatcaccgggcgctggggatcaagctggccgatggcgatcagccggtgcgcactctctctggcggtaaccagcagaaggtgctgctggcgcgctgtctggaggccaacccgctgctgctaattgtcgatgagccgacgcgcggcgtggatgtctccgcccgcgccgatatctatcagctgctgaaaagcgtcgccgcgcaaaatgtggcagtgctgatgatctcctccgatctggatgagttcatcggcctggccgaccgggtgctggtgatgcatcagggccgctacagcggcgagctggcgcggcaggcggtcaccgtcgatcgcatgatgaccctggcctttggagggcaggcatga

SEQ ID NO: 139499 - DNA, 162 bp, Enterobacter cloacae
atgaaactaccgcgaaacgccctggtctggtgcgtattaatcgtctgtttaacgctcttgatattcacatgcctgacccggaaccgcttatgcgaagtccggctaaaggacgggaacagggaggtcgcggcaagcctggcttacgaatccaacggtaagtag

SEQ ID NO: 139500 - DNA, 135 bp, Enterobacter cloacae
atggggagtacgctgtgctgtgacgcttctgaggacgatctggccagtgttgcccgtaaatggtaccgacagttcgtgagggagcggcgcaaattcttaatgatgtcgggccagtattctgaggataacccatga

SEQ ID NO: 139501 - DNA, 351 bp, Enterobacter cloacae
atgaaaaaagagatctcccgcaacccctctttcacgccttcgcctaagctgcgagcacatctgaactcccacagggaaggggtgactgaacggctgaataatatctttgaccgctatgcgcatctggttcgcgcctgtgcccttcctctcgataaagacgaaacacaggttctgcttaatgtgctgaatggctccgttgtcgaacccgccttcattgaatatctggctcaggaaattcgggactcggatgattatctggaagggatacccgcagctaaatcactgtacgaaaagtgtcagtcagcgacctatccgcaattgctggccaccgtcgaacgcctggaacgataa

SEQ ID NO: 139502 - DNA, 963 bp, Enterobacter cloacae
gtgtggaacgaacccgaacgcgcccaggcgctgggtaaagagcgttcttccctggaagccatcgtagataccctggatcagatgtcccaggggctggaagacgttgccggcctgctggatctggccgtggaagcggacgacgaagagacctttaacgaagccgtcgccgagctggataccctggaagagaagctggcgcagcttgagttccgccgcatgttctccggcgaatacgacagcgccgattgctaccttgacattcaggccggttccggcggcaccgaagcccaggactgggccagcatgctgatgcgcatgtacctgcgctgggcggaagcgcgcggctttaagaccgaaatcatcgaagaatccgaaggtgaagtcgcggggattaaatccgtgaccattaagatcattggcgattacgcctacggctggctgcgtacggaaaccggcgttcatcgtctggtgcgtaagagcccgttcgattccggcggccgccgtcatacctccttcagctccgcgttcgtttacccggaagtggaagacgatatcgatatcgaaattaacccggccgacctgcgcattgacgtataccgcgcctccggcgccggtggtcagcacgttaaccgtacggaatccgcggtgcgtattacccatatcccgaccggattggtgacgcagtgccagaacgaccgttcgcagcacaaaaataaagaccaggccatgaagcagatgaaagcaaagctttatgaactggagatgcagaagaaaaatgccgagaagcaggcgatggaagacaacaagtccgatatcggctggggcagccagatccgctcttacgtgttggatgactcgcgtattaaagatctgcgtaccggggtggaaacccgcaacactcaggcggtgctcgatggcagcctggaccaatttatcgaagcaagtttgaaagcagggttatga

SEQ ID NO: 139503 - DNA, 1164 bp, Enterobacter cloacae
gtgcgcttcggccacttcttcgaagatctcggtcacgatacggcccagaccccagctcttctccactttgatgccgatagactcagcgatcgctttcgcggaatcaaagttatccagatccgccatctcggtttccggacggtatttcttgatcgcttcgcgcatggtcagtttttcaaacggcttgccgaagtcgaacacctggtcgccgtaaggcacttcggtgttgccgaggatgtcctgcgccagggtgcggaacagagattcggtcagctcgatcagatctttataatccgcataagccatgtagagttccatcatggtgaactctgggttatgacgaacggagatcccttcgttacggaagttacggttgatctcgaagacgcgttcgaagccgccaaccaccagacgcttgaggtacagttccggcgcgatacgcaggtacatgtccagatccagcgcgttatgatgggtgatgaacggacgcgcggaagcgccgcccgggatcacctgcatcatcggggtttctacttccataaagccgcggccaaccatgaactgacggatgcccgccaggatctgcgaacgcactttgaaggtcttacgagattcatcgttggagatcaggtccaggtaacgctgacggtaacgcgcttcctgatcctgcaggccgtggaatttgtccggcagcgggcgcagagctttagtcaacagacgcagctcggtgcagtggatagagagctcaccggttttggtcttgaacaacttaccgcgggcggcgatgatgtcgccgaggtcccactttttgaactggtcgttataaacgccttccgccaggtcatcacgcgccacgtacagctggatgcggccgcctacgtcctgcagggtcacgaaggacgctttacccatgatacgacgggtcatcatgcggccagcaacggccacttcaacgttcagcgcttccagctcttcgttttctttgccatcgaagtcagcgtgcagttggtcagaggtatggtcacgacggaaatcgttcgggaatgcgacgccctgctcacgcagcgcagccagcttctcgcgacgggttttcagttcattattaaggtcaattgccgcgtcagcgccctgtgcttgttgttcagacatgttggttcctcataa

SEQ ID NO: 139504 - DNA, 1233 bp, Enterobacter cloacae
gtggccgctctgcacggcttcccggagtggttcttcggccacgccgcgctgccgttccaggattttatgatcagtagcctctcgctgttcagctatgccaccgccctctggctgcacagcgagatttttgatctgaagaagaatatgccgcgacttcatcagctgctgatcgccgccgtgatactcaacctggtgctgcaggtcagtattccgctcgggttttacggcttcgcgatgcagattgaaggggtagtattcatcattatcaccccggtgctgctgttcacctcctggtggctgtggcgcaaaaaagctatcgaccgtaccaccctgctgctgggtctgctgccgccgttctatgtcgtcgccgcggtgctggtgcagttgtcgatccatgggattatcccgttccatgtggcgatctattccctctggcagtacgcgctgatcgtccacatcattacggtgctgatcattgccatcctgcgggtgcgtgctgaaaaccgccagctggagcagaagcagcgcctggcgcgcgaactgcagattgagcgtgaagccagcttccaccagcggcagtttatgggcatggtggcgcacgaattccgcaccccgctggcggtgatccaggcggcgctggagaatcttcgcctctcggcggcctcgaccagccaggaggcgcgcttcgatcgcatcggccgcgccgccacccgcctggtgcagctcaccgataactgccttgccgacgcccggctcgcctcccacgatctgcacgtcgagcgccagcagaccgccctgctgacggtaatcaacatggccgcctcggtggtggctatctcccatgatcactacctgaacatccgccagcacggcgcggtggaaagcccgcagctgcaggccgatgccggcctgctgtgcatcgccatcgctaatctgctggataacgccgtcaagtattcgccccccggtgaaatcaccatcgatattcattccgatgccgggcaaacggagctacgcattcgcgaccacggcccgggactccccgccggacaggcggaactgatctttgagcgctaccgccgcggcgagcacacatcgccggtgccaggcggcaccggtctcggactgtatgttgcgcgtcagatagtgcaggctcatgatggcaaactgtggctggccgagcatggcccggacggctgcacctttattctcaccctccccacggttgcttaa

SEQ ID NO: 139505 - DNA, 702 bp, Enterobacter cloacae
atggctttacggctggcgataattgaagataacgccgatctgctggatgaactgctggcctggctgggctatcgcggcttcgaggtgtgggggacgcgcagcgccgaagccttctggcggcaactgcacagccatccggtggatatcgtgctggttgatatcggcctgcccggcgaggatggcttcagcgtactgaactatctgcatgagctggggcactacggtctggtggtggtcagcgcccgcggccagcagcaggataaactacaggcgctgagccttggagccgatgcctatctgatcaaaccggtaaacttcgcccatcttgccgagaccctcaccgccctcggcgcgcgcctgcgccaggaccgtccggcggctccgactgcggaggcgatcggcacgccgccggccgtctcccccggcagctggcgtctgcacgaggataaactgatttcacccgacgcccggacgctggagttaacccagcaggaatatcgcctggtggagctcctgatgcgcaatcgcaacgaagtgtgcagcaaactggatctccatgcctgcctgttttcccatgaaagcgagcctgacctgcaccggatcgacgtggtggttagccgcctgcgtcacaaggcacgccagcaggggatccacctgcccgttcgcgcaatctttggtaagggactggcctttatttcctga

SEQ ID NO: 139506 - DNA, 1962 bp, Enterobacter cloacae
  misc_feature (606)..(615): n is a, c, g, or t
atggctatcgaaatcaaagtaccggacatcggggctgatgaagttgaaatcaccgagatcctggtcaaagttggcgacaaagtagaagctgaacagtcgctgatcaccgtagaaggcgacaaagcctctatggaagtcccgtctccgcaggctggcgtcgtgaaagagattaaagtctccgtcggcgacaaaaccgagactggcaaactgattatgattttcgattccgccgaaggtgcagccgccgctgcacctgcgcaggaagagaagaaagaagccgctccggccgccgctgctccagcggctgccgcggcagcgaaagaagttcacgtcccggatatcggcggcgatgaagtcgaagtcaccgagatcatggttaaagtgggcgacaccatcgccgctgagcaatccctgatcaccgtagaaggcgataaagcctctatggaagttccggcgccgttcgccggtaccgtcaaagagatcaaaatcaataccggcgataaagtttccaccggctccctgattatgatcttcgaagtggcgaataaaagtgatcgggaaaccgcagcatcgtcgtcagcctgctcagccactgccatgatcttnnnnnnnnnncctgcagccgctccggcacaggctgccgcgccggctgctgcggctccggctgccgcagcaggcgtgaaagatgttaacgtcccggacatcggcggcgacgaagttgaagtcaccgaagtgatggttaaagtcggcgataaagtcgcggcggaacagtccctgatcaccgtagagggcgacaaagcctctatggaagttccggcgccgttcgcgggtaccgttaaagagatcaaaatcagcaccggcgataaagtcaaaaccggttccctgatcatggtcttcgaagtggaaggcgctgcgcctgccgccgctccggctcaagctgctgccccggctcaggccgctgccccggctcaggccgctaagcctgccgctgcgccggctgcgaaagcagaaggtaaaagcgaattcgctgaaaacgatgcctacgttcacgcgaccccgctgattcgccgcctggcgcgcgagttcggtgttaacctggcgaaagtgaaaggcaccggccgtaaaggtcgtatcctgcgcgaagacgttcaggcctacgtgaaagacgcggttaaacgcgctgaatccgcaccggcggctgccgctggtggcggtatcccgggcatgctgccgtggccgaaggttgacttcagcaagtttggcgaagtcgaagaagtggagctgggtcgtatccagaaaatctctggcgccaacctgagccgtaactgggtgatgatcccgcacgttacccacttcgacaaaaccgatatcaccgatctggaagcgttccgcaagcagcagaatgccgaagctgagaagcgtaaactggacgtgaaattcactccagtggtcttcatcatgaaagcggttgccgctgcgcttgagcagatgccgcgcttcaacagctcgctctccgaagatggtcagcgcctgacgctgaagaaatacatcaacatcggtgtggcggtggataccccgaacggtctggtggttccggtcttcaaagacgtgaacaagaagagcatcaccgagctgtctcgtgaattgaccaccatctcgaagaaagcgcgcgatggcaaactgacggctggcgaaatgcagggcggttgcttcaccatctccagcatcggcggcctgggtaccacccacttcgcgccgattgttaacgcgccggaagtggccatcctcggcgtgtctaagtccgcgatggagccggtatggaatggtaaagagtttgtgccgcgcctgatgctgccaatctctctgtccttcgaccaccgcgtcatcgacggtgctgatggtgcccgcttcattaccatcattaacaacaccctgagcgacattcgccgcctggtgatgtaa

SEQ ID NO: 139507 - DNA, 243 bp, Enterobacter cloacae
ttgctcttctacgccgtcacggttaatcacggtttcggtttgcaggttatccatcatcgctttggatacacgatcgttcgccgcagcccagatatcgataactttgttgtaacgttcgcctgcggttaccagaccagactggaactgctcctggatctcagcaacttcagcttccgcttcagagatgatctcgtgtttcttctctgggatgaccatgtcatcgataccaacagatgcacctga

SEQ ID NO: 139508 - DNA, 1605 bp, Enterobacter cloacae
gtgcgcaacgaattcgccgttttcatctttttcgtattcggtgatacgcactttaacgcgcgcatgcagagaggccaggccagcgcgataaatacgctcagcttctttcgggccagtcagcaccatgccttcgcctttggcgttaacacagtcacgggtcatgtagtacagacccagtacaacgtcctgagaaggaacgatgataggttcaccgttcgctggagacaggatgttgttggtagacatcatcagcgcacgcgcttcgagctgggcttccagcgtcagcggtacgtgaacagccatctggtcaccatcgaagtcggcgttataggccgcacaaaccagcgggtgcagctggatcgctttaccttcgatcagtaccggctcaaatgcctggatacccagacggtgcagggttggtgcacggttcagcagtaccgggtgttcgcggatcacttcgtccaggatatcccaaacgacagcttcttcacgctcaaccattttcttcgcggctttgatggtggtggccaggccacgcagctccagcttgccgtagatgaacggtttgaacagctccagtgccattttcttcggcagaccgcactgatgcagacgcaggtatggacctacggtgattacagaacgaccggagtagtcaacacgcttaccgagcaggttctgacggaaacgaccctgcttacctttgatcatgtcggccaaagatttcagaggacgtttgttagaaccggtgatcgcacgaccacgacgaccgttatccaacagggcatcgactgcttcctgaagcatacgtttttcgttgcgtacgatgatgtccggcgcagccagatccagcagacgtttcagacggttgttacggttgatcacgcgacggtacagatcgttcagatccgacgttgcgaaacgaccaccatccagcggaaccagcggacgcagatctggcggcagaaccggcagaacggtcaggatcatccactctggtttgttaccagactgaacgaacgcttccagcagtttgatacgcttggtcagctttttacgcttggtttcggagttggtttcgttcagctcttcacgcagagtttcacactcttgctccagatccatgctcttcagcagggcctggatagcttccgcacccatcttcgcgtcgaattcgtcaccgaactcttccagcgcgtccagatactgttcttcggtcaggatctggttacgttccagattggtcatcccgccttcgataaccacataagattcgaagtacagaacacgttcgatatcgcgcagcggcatatccagcagcagaccgatacgggacggcagagatttcaggaaccagatgtgagcggtcggagacgccagctcgatgtggcccatacgctcacggcgtactttggtctgggtcacttcaacgccgcacttctcacagatcacaccacggtgtttcaggcgcttgtacttaccgcacaagcactcgtaatcttttactggcccgaaaatacgcgcacagaaaaggccgtcacgctcaggtttgaacgtacggtagttaatggtttccggctttttaacttcaccgaaagaccatga

SEQ ID NO: 139509 - DNA, 1146 bp, Enterobacter cloacae
gtgcagaaagtccgcgaagccgagcgcgcgatggtggtcgatcagttccgcgagcacgaaggtgagatcatcaccggcgtggtgaaaaaagtgaaccgcgacaatatcacactggatctgggtaacaacgctgaagccgtgatcctgcgtgaagatatgctgccgcgtgaaaacttccgtccgggcgaccgcattcgcggcgtactgtacgctgtccgtccggaagcgcgtggcgcccagctattcgtcacccgttccaaacctgagatgctgatcgaactgttccgcatcgaagtgccggaaatcggtgaagaagtgctggagatcaaagcggcggctcgcgatccgggctctcgtgccaaaatcgcggtgaaaaccaacgacaagcgcatcgacccggttggcgcttgcgtcggtatgcgcggtgcgcgtgtgcaggccgtgtcgactgagctgggtggtgaacgcatcgatatcgtcctgtgggatgataacccggcgcagttcgtgattaacgctatggcgccggcagacgtcgcgtccatcgtggtggatgaagataaacacaccatggatatcgcggtagaagcgggcaacctggcgcaggcgatcggccgtaacggtcagaacgtccgcctggcttcacagctcagcggctgggaactcaacgtcatgaccgttgacgatctgcaggctaagcaccaggcggaagcgcatgccgctatcgataccttcaccaaatatcttgatattgatgaagatttcgcgacagtgctggttgaagaaggcttctcctcgctggaagagctggcctatgtgccgatgaaagaactgctggaaatcgacggtctggatgaagccaccgttgaagcacttcgtgagcgtgcgaaaaacgcactgactacgctggcgctggctcaggaagaaagcctgggagataacaaacctgccgatgatctgttgaatctcgaaggtctggatcgtgccctggcattcaaactggctgcccgtggtgtttgtacgctggaagatctcgccgagcagggcgttgatgacctggctgatatcgaagggatgaccgacgagaaagctggcgagctcatcatggccgctcgcaacatttgttggttcggcgacgaagcgtaa

SEQ ID NO: 139510 - DNA, 150 bp, Enterobacter cloacae
atgcgctcctgcgatttacgcattttggaagcggcgaccatctccatcgctttagtgatcttttgcgtgttctggacgcttgcgatcttactacgtatctcttttgcgccggccatgagcttctcctcaatgccagacggcttgtcctga

SEQ ID NO: 139511 - DNA, 612 bp, Enterobacter cloacae
atgaaaatcccagttctgccagtgaatggtatcgccggtgatcgtgtagtttttgccttccggttcggttatctccagcggtttcaccgccggggcgttgcggtcgcgaccatcatacggacggggctccattgggaccgggatcaccggaccttcttcgattttgatgattttcttcgcttcaaggtcgaccaccgccaccaggttttcaatcgggtgcgcccagtagttgccgtcgccggtatccagataactgaccaccttcagcagacgcgcatcctgctgcaggccatctttgccatcaaaaaagccaacggtgagcggggtggtgaccactttgccaggatcggtaataccgtgctttttcagcacctcagcgaattcgctgctggtattgatgatgttctgcacgctgacaaaatcatcgagcagcaccatcccgtgggcgcctttgatcggcgtccaggagaggatttttttgttttgcagatcgaccacggcttcaatgacgtgtttgccatcgagcatcaccacatcggcagtgcggggagcatcgaccggcgttccctgcagggcaaaggcccataccgtcgccttatccggctcgtgtaa

SEQ ID NO: 139512 - DNA, 1257 bp, Enterobacter cloacae
atggctctgacagatatcaaagtgcgttctgcaaaaccgcaggaaaaggaatacacccttgtcgatggggatggcatgtttttgcttattcatcctaacggttcaaaatactggcggttccgctttcgttttggtggtaagcagcacctaatggcgtttggagtttatcctgaaacgtcattagctgatgctcgtcaaaagagggaagaggccagaaggcttgttgctgctggaatcgatcctcgcgaacacaaacgtgcggtgaaagaagaacaggcgaaagaaaatattacctttgagtccgttgccagagagtggcatgccgcaaataaaaaatggtcagaagaacatagccgacgggggctgaagagtctggaagacaatctgttctctgcaattggcaagcgcagtatcgaagagctaaagactcgcgacctgcttgcccccattaaagtcgttgaggctacaggtcgctttgaagtcgcttctcgtcttcagcaacgaacaactgccatcatgcgttatgccgtccaaagtggcttgattgattacaacccggcccaggaaatggctggtgcagttgcttccagtaatcgtgtccatcgcccagcgcttgaattgaaacgcctacctgaattactccaccgaattgacggttacacaggacgacctatgactcgtctggccgttgagctaacgttgctaattttcatccggtccagtgagctgcgctttgctagatggtctgagatcgattttgaaacatcaatgtggacgataccggctgaacgagaagttatcgaaggggtaaagcattcacagcgtggttcgaaaatgcgtacacctcacttagtgccgttgtctagtcaggcattagcaattcttaaacaggtccacaagatcagtggtgaccttgattttattttcgttggagatcacaaccctcgtaaaccgatgagtgaaaatacgataaacaaggcgctgcgtgtgatgggatatgacactaaagttgaggtttgcgggcatggcttcagaactatggcatgtagctcgctgattgagtcagggctgtggtcgagagatgctgtagagcggcaaatgagccatatggaacgtaactcagtacgtgcggcttacattcataaggctgagcatttggaggagcgtaagttgatgttgcagtggtgggcggattatctcgatgtgaaccggggaaaagctatgagtccttttgattttggaaagataaatgattga

SEQ ID NO: 139513 - DNA, 192 bp, Enterobacter cloacae
atggctacaaccaaaactgcgacgcttaccatccggttagatcctggattgaaggacgcgttgcgtgcagctgctcaagttgaacatcgttctatcgctaacatgatagaaatgctgatccgtgagcattgcgtgaaaaatgatatagccatcgcgcagtccgagaaatcgcaccaacgtggggaacgttaa

SEQ ID NO: 139514 - DNA, 219 bp, Enterobacter cloacae
atgatcaaaacagtgaagcaggcgtgtcgttttaatcctgttattaaggattacagaatgagccagggaatagagaatctggctgatctaattaacgacgcaggcgatggcaaagaattcttttcgagaaactatgttactcacggaatggagcaacttttccgcgaaggcatgcttcgccctgatgaatcccctaatgattttggtaaaaatcattaa

SEQ ID NO: 139515 - DNA, 1011 bp, Enterobacter cloacae
atgtgggtggcgaacgcggcgacggtgtgtccctccgccgattcgctggatggcctggtgcatctgacggtggcgaatctgcaggataaattccaccgcgccagcgaagcaccgactacagaggcgctgctgcaggcgattttccccgaccgcacgcgatttgctatccacccggcgctgcccgcctcggcctggtttggcgacgaaggggcggcgaaccataatcgtctcggcggcgagtatggcgctcccggcgtccagctctttgtctatggccgccgccgggggagcgaggaggcgccgcgtcgctatccggcgcggcaaacccttgaggccagccaggcggtagcgcgcctcaatcaggtcaatccccgccagctgatcttcgcccgccagcatccggcggcgatcgacacgggggtttttcataacgacgtcatcgcggtgagcaaccgtcaggtcctgttctgccatgagcaggcctttgccgaccagaccgcgcttctccagcagctggcgcagcgggtgccgggttttacgccgctggtggttcccgccagccgggtctcggtggcagaggcggttgccacctatctgttcaacagccagctggtgagccgggcggatggcagcatggcgcttatcctgcctcaggaagcgcaggagcatgccggcgtctgggaatacctcaatgagctgctggccggggataatcctatcgccgacctgcgggtgttcgatctgcgcgagagcatggccaacggcggcggtccggcgtgcctgcgcctgcgggtggtgttgacggccgaggagtatcaggcggtcaatccgcacgtcctgatgaacgatacgctgtttgccaccctcaatgactgggtggatcgctactatcgcgatcgtctcacccaggccgacctcgccgacccgcagctgcttcgggaagggcgcgacgcgctggatcggttgactcagatcctgcagctcggttcggtttatccatttcagcaataa

SEQ ID NO: 139516 - DNA, 918 bp, Enterobacter cloacae
gtggaacattttctggcattaaccctggcggggcgattgccccatcactttcacggcgagacggcccatttccgctggcattggctcggggaagggatctgcgccattcatggcaacgaaacggcgccggtggagatagtcgaccagctggtgcagcgactggtccgggaggcgctcccgctgcgctggcggctgctggtgatcgtcggcaacccaccagcgctgcgggcgaataagcgctatctgcacagcgatatgaaccgcatgtttggcgagcgctggcggcagtttccgctcagtgaggagacgcagcgggcgcagcggctggagcaggcggtggcccgcttttatcgcgaccacgatggcccgcgctggcacctcgatctgcataccgcgatccgcgggtcgctacatccgcgcttcggcgtgctcccggcccgcgatacgccgtgggaggaggattttcttcactggctgggcggcgccgggctggaggcgctggtgtttcatcgccagcccggcaggaccttcacccacttcagctgcgaacggttcgcggcgctggcctgcacccttgagctgggcaaagcgctgccgttgggggaaaacgatctgacgcagtttgccgccgtccagcgggcgctctcccggctgctggtgggggatctggccattgccgacgccccggcgccgctgcgctaccgggtggtacagcagctaacccgccatagtgatgatttccgcttgcatatggcggatcagacgctgaacttcacccccttcgaacccggcacgctgctggcggaggagggcgagacgcggtatgtggtggggcctgagacggagtatgttctgtttcctaacccgacggtggcgaaaggactgcgcgccggcctgatgctggagaaattatcctga

SEQ ID NO: 139517 - DNA, 468 bp, Enterobacter cloacae
atgtcagaacaaaacagcaccgaaatgaccttccagatccagcgtatctataccaaagatatctcttttgaagcgccgaacgcgccgcaagttttccagaaagactggcagccggaagttaaacttgatctggataccgcctccacccagctggctgaaggcgtttatgaagtggtgctgcgtgtgaccgtgaccgctgcgctgggcgaagaaaccgcgttcctctgtgaagtacagcagggcggtattttctccatcgacggcatcgaaggcacccagatggcgcactgcctcggcgcatactgcccgaacattctgttcccgtacgcgcgcgagtgcatcaccagcctggtttcccgcggtaccttcccgcaacttaaccttgcgccagtgaacttcgacgcgctgttcatgaactatctgcagcagcaggctggcgaaggtgctgaacaacatcaggatgcctga

SEQ ID NO: 139518 - DNA, 252 bp, Enterobacter cloacae
atggccaatattgagatctacaccaaagcgacctgcccgttctgcatccgcgcgaaagcgctgctgaacagcaaaggcgtaacgttccatgagttgccgatcgatggcgatgccgcgaagcgtgaggagatgatccagcgcagcggacggacgacggttccgcagatttttattgatgcgcagcacattggcggctgtgacgacttgtatgcgcttgattcacgtggtggacttgatcccctcttgcgctaa

SEQ ID NO: 139519 - DNA, 432 bp, Enterobacter cloacae
atgcaagaaattatgcaattcatcggccgtcacccggtcctgagcatcgcgtggatcgcgctgctgggtgcggtagtgttcaccaccttcaaggggctgatgtcgaaagttaaagtcatcacccgtggtgaagcgacgcgtcttatcaataaagaagatgcggtggtggtcgacctgcgtcagcgtgacgatttccgtaaaggccatattgccggcgctattaacctgctgcccagcgatatcaaagccaataacgtcggcgagttggaaaaacacaaatcgcaacccattattgtggtagacggttccggcatgcaggcgcaagagcccgccagcgcgctgaacaaagccgggtttgaaaaagtctttgtactgaaagagggcattgctggctggagcggcgaaaacctccctctggtacgcggcaaataa

SEQ ID NO: 139520 - DNA, 588 bp, Enterobacter cloacae
atgcccaaactggggatgcagccgatccggcgcaggcagctgatcgacgccacgctggacgcaataaatgaagtcggaatgcacgacgcgaccatcgcgcagattgcccggcgggcgggcgtatcgacggggatcatcagtcactatttcaaagacaaaaatggtctgctggaggcgaccatgcgcgacatcaccagccagctgcgcgacgcggtgctcaaccgtctgcacgctctgccggacggcagcgccagccagcgcctgcaggcgattgtcggcggcaactttgatgagacgcagatcagcagcgcggcgatgaaggcctggctggccttttgggccagcagcatgcaccagccgatgctttatcggttacagcaggtcagcagccgtcgcctgctgtcgaatctggtgtacgaattccgccgcgagctgccgcgcgagcaggcgcaggaggccggctacgggctggcggcgctgatagacggcctgtggctgcgggcggcgctcagcggcaaaccgctggataaaacgctggcgcagtcgctgaccagccactttattcgtcagcatttaccgaacccataa

SEQ ID NO: 139521 - DNA, 552 bp, Enterobacter cloacae
gtgagcgcggttgaggttgggcgtcaccacgccggcggcgaggccgtattcggtggcgttggcgcggcgaatgacctccgcttcgtcggcatagctgaggatcgacatcaccgggccgaagatctcttcgcgcacgatggtcatctcgtcgctgcaatcggtaaacaccgtcggggcgacccacgcgccgttatcgaaaccgtcgcctttcagcgcctcgccgccgcacagcaggcgcgcgccttcgcgtttgccgctctcgatatagcgcagaacgttgtcgcgatgggggaagctgaccagcgggccgaagttggtgtcatcggcaaacagatcgccggcgcggatgcgggccacccgctcgaggatcttgtgctcgaattccgccttccgtttcgccgggacaaacacccgggtgccgttggtgcacacctggccggagctgtaaaagttggccatcatggcaatatcggcggcgaggtcgaggtcggcatcgtcggcgataatcagcggcgatttgccgcccagctccatggtgacctctttcagtga

SEQ ID NO: 139522 - DNA, 759 bp, Enterobacter cloacae
gtggtgcggatcgcgggcgctggcggtttcaacgatgatgttggcatcgcagcgcaggcttttatcgaccagacgggtctggatcgcgccaacggccatcggcgccggtaccggcagacggtctttggcgatgttgcggtcagagagcaccagcagcacggtgccgtcgcgcaccatttgctccgctttatcgcacagcgctttcaccgtctcgctgagggaggcctctgccgggttgaacgtgatatcgaggacgtcggcgcgatagtgctcttcttccatcgtcgtcagctgtttaaaatcggagtacagcaggatcggcgatttgaagctcagacgatgcgcctggccttccgcttcgcagaagacgttcatttcgcgaccgatgctggtagccagcgacatgacgtgcgcttcgcgcagcgggtcgatcggcgggttagtcacctgggcgaactgctgacggaagtaatcgtagataatgcgcggctggctggagagcacggcgaaaggcgtgtcatcgcccatcgaaccgactgcttcctggccattttcgccgagcacgcgcaggacggagtccagctcttccgcgctgtagttaaactgtttctggtagctggcgagcgtgtcgtcatccagctggcggctgccaacctcttcgtccggcagatcttcgaacggcaccaggcgacgaacgtttttctccatccactctttatacggatggcggctcttcagatcgtcatcggtttccgctga

SEQ ID NO: 139523 - DNA, 1920 bp, Enterobacter cloacae
atggaacgtgctgttgccgttgactccggtgttaccgcagttgctaagcgtggcggtaccgtacagtacgttgacgcatcccgtatcgttatcaaagttaacgaagacgagatgtatccgggcgaagcgggtatcgacatctataacctgaccaaatacacccgttctaaccagaacacctgtatcaaccagatgccatgtgtgtctctgggtgagccagttgagcgcggcgacgtgctggcagacggtccgtccaccgacctcggtgaactggcgctcggtcagaacatgcgcgtagcgttcatgccgtggaacggttacaacttcgaagactccatcctcgtctccgagcgtgtggttcaggaagatcgtttcaccaccatccacattcaggaactggcctgtgtgtcccgtgacaccaagctggggccagaagagatcactgccgacatccctaacgtgggtgaagctgcgctctctaaactggatgaatccggtattgtttacatcggtgcggaagtgaccggcggcgacattctggttggtaaggtcacgccgaaaggcgaaacccagctgacgccagaagagaaactgctgcgtgcaatcttcggtgagaaagcctctgacgttaaagactcttctctgcgcgtaccaaacggtgtttccggtacggttatcgacgttcaggtcttcactcgtgatggcgttgagaaagataagcgtgcgctggaaatcgaagagatgcagctcaaacaggctaagaaagacctgtctgaagaactgcaaatcctcgaagcaggtctgttcagccgtatctatgcggtgctggttgccggtggcgttgaagctgagaagctcgacaaactgccacgcgatcgctggctggaactgggcctgaccgacgaagagaaacagaatcagctggaacagctggctgagcagtatgacgaactgaaacacgagttcgagaaaaaactcgaagcgaaacgccgcaaaatcactcagggcgacgatctggcaccaggcgtgctgaagattgttaaggtgtatctggctgttaaacgtcagatccagcctggtgataagatggcaggtcgtcacggtaacaagggtgttatctctaagatcaacccgatcgaagatatgccgcacgatgctaacggtacgccggtagatatcgtactgaacccactgggcgtaccgtctcgtatgaacatcggtcagattctggaaactcacctgggtatggctgcgaaaggtatcggcgataagatcaacgccatgctgaaacagcagcaggaagtcgcgaaactgcgcgagttcatccagcgtgcctacgatctgggtaccgacgttcgtcagaaagtcgacctgaacacctttagcgatgaagaagtgctgcgtctggcagagaacctgcgcaaaggtatgccgattgcaacgccggtattcgacggtgcaaaagaagctgaaattaaagagctgctgcaactgggtggtctgccaacgtctggtcagattacgctgtttgacggccgtaccggtgaacagttcgagcgtccggtaaccgtaggttacatgtacatgctgaaactgaaccacttggtcgacgacaagatgcacgctcgttctaccggttcttacagcctggttactcagcagccgctgggtggtaaggctcagttcggtggtcagcgcttcggggagatggaagtgtgggcgctggaagcatacggcgcagcatacaccttgcaggaaatgctcaccgttaagtctgatgacgtgaacggtcgtactaagatgtataagaacatcgtagacggcaaccatcagatggaaccgggcatgccagaatccttcaacgtactgttgaaagagattcgttcgctgggtatcaacatcgaactggaagacgagtaa

SEQ ID NO: 139524 - DNA, 1920 bp, Enterobacter cloacae
atggaacgtgctgttgccgttgactccggtgttactgccgtggctaaacgtggcggtaccgttcagtacgtggatgcttcccgtatcgttatcaaagttaacgaagacgagatgtacccgggcgaagcaggtatcgacatctataacctgaccaagtacacccgttctaaccagaacacctgcatcaaccagatgccttgcgtgtccctgggcgaacctattgagcgcggcgacgtgctggcagacggcccgtccaccgacctcggtgagctggcgctgggtcagaacatgcgtgtagcgttcatgccgtggaacggttacaacttcgaagactccatcctcgtttccgagcgtgttgtccaggaagaccgtttcaccactatccacattcaggaactggcgtgcgtgtcccgtgacaccaagctggggccggaagagatcaccgctgacatcccgaacgtgggtgaagctgcgctctccaaactggatgaatccggtatcgtttatatcggtgcggaagtgaccggcggcgacattctggttggtaaggtaacgccgaaaggtgaaacccagctgacgccggaagagaaactgctgcgcgcgatcttcggtgagaaagcgtctgacgttaaagactcttctctgcgcgtaccgaacggtgtctctggtaccgttatcgacgttcaggtctttacccgtgacggcgtagaaaaagacaaacgtgctctggaaatcgaagagatgcagctgaagcaggccaaaaaagacctgtctgaagaactgcagatcctcgaagccggtctgttcagtcgtatctacgcggtgctggtctccggtggcgttgaagctgagaagctcgacaagctgcctcgcgatcgctggctggaactgggcctgaccgacgaagagaaacaaaatcagctggaacagctggctgagcagtatgacgaactgaaacacgagttcgagaaaaaactcgaagcgaaacgccgtaaaatcacccaaggcgacgatctggcaccgggcgtgctgaagattgttaaggtatatctggccgttaaacgccgtatccagcctggtgataagatggcaggtcgtcacggtaacaagggtgttatctctaagatcaacccgatcgaagatatgccgcacgatgctaacggtactccggtagatatcgtactgaacccgctgggcgtaccgtctcgtatgaacatcggtcagatccttgaaactcacctgggtatggctgcaaaaggcatcggcgataagatcaacgccatgctgaagcagcagcaggaagtcgcgaaactgcgcgaattcatccagcgtgcttacgatctgggcgctgacgttcgccagaaagttgacctgaataccttcagcgatgaagaagttctgcgtctggctgaaaacctgcgtaaaggcatgccgatcgcaacgccggtattcgacggtgcgaaagaagctgaaatcaaagagctgctgcagctgggcgacctgccgacttccggtcagatcaccctgtttgatggccgcaccggtgaacagttcgaacgtccggtaaccgtgggttacatgtacatgctgaaactgaaccacctggtcgacgacaaaatgcacgctcgttccaccggttcttacagcctggttactcagcagccgctgggtggtaaggcacagttcggtggtcagcgcttcggtgagatggaagtgtgggcgctggaagcatacggcgcggcctacaccctgcaggaaatgctcaccgttaagtctgatgacgtgaacggtcgtaccaagatgtataaaaacatcgtggacggcaatcaccagatggaaccgggcatgccggaatccttcaacgtactgttgaaagaaattcgctcgctgggcatcaacatcgaactggaagacgagtaa

SEQ ID NO: 139525 - DNA, 432 bp, Enterobacter cloacae
atgaaaaatatcgtattagcatctttgctgggctttggtttaatttcatcggcctgggccactgaaaccgtgaatatccatgatcgcgtcaacaatgcacaggctcctgctcaccagatgcagtctgctgaggctcctgtcgggatccaggggactgctcctcgtatgaccggtatggaccagcatgaacaggccattattgctcatgaaaccatgacgaacggctcggcggatgctcaccagaaaatggtggaaagtcatcagaagatgatgggaaataacacggtatccacgaccgtcccgtcaacgtcttacgcggcgatgaatgagcatgaaagagcagcggttgctcatgaattcatgaataacgggcaatccggcccacatcaggccatggccgaagcgcaccgccgcatgatcaatgcaggctga

SEQ ID NO: 139526 - DNA, 972 bp, Enterobacter cloacae
gtggcacaggaatatactgttgaacaattgaaccacggccgtaaagtctgggactttatgcgctgggactactgggccttcggcatttcaggttttctgctgattgtgtcgatcgccatcatcggcgttcgcgggtttaactgggggctcgatttcaccggcggtacggtgattgaaattacccttgagaaaccggtcgatctggaccagatgcgcgattccctgcagaaagcgggctttgaagagccgcaggtgcagaactttggcagcagccgcgacatcatggtacgtatgccgccggtgcatgacgccaacggcagccaggagctgggcagcaaggtcgtgacggtgattaacgaatcgaccagccagaatgcggcagtgaagcgtattgagtttgtcggcccgagcgtcggcgcggacctcgcgcaaaccggcgccctggcgctgattgcggcgctggtttgtatcctgatctacgtcggcttccgcttcgaatggcgtctggccgccggggtggttatcgccctggcgcacgacgtggtgatcaccatgggcgtgctgtcgctgttccatatcgagatcgacctgaccatcgtggcctcgttgatgtcggttatcggctactcgctgaacgacagtatcgtggtatcggaccgtatccgtgaaaacttccgtaagatccgccgcggtacgccgtatgagatctttaacgtgtcgttgacccagacgctgcaccgtaccttgatcacctctggtaccactttgatggtgatcctgatgctgttcctgttcggcggcccgattctggaaggcttctcgctgaccatgctgatcggtgtttccatcggtacggcttcctctatctacgtcgcctccgcgctggcgttgaagctgggcatgaagcgcgagcatctgatccagcagaaggttgagaaagaaggggcggatcagccgtccattctgccgtaa

SEQ ID NO: 139527 - DNA, 510 bp, Enterobacter cloacae
atgcagaacatcaagcagggtctggaagcctgtctggccggtctggtggtctctatcctgttcatgatcctcttctataagaagttcggcctgattgcgacctcggcgctgattgccaacctgatactgattgtcggcattatgtccctgatcccgggggcgacgctgaccatgccgggcatcgcgggtatcgtgttaacccttgcggtggcggtcgatgctaacgttctgatcaacgagcgtatcaaagaagagctgagcaacgggcgtaccgttcagcaggcgattgacgaaggttatcgcggcgcgttcagctcgatcttcgacgccaacgtgacgacgcttatcaaagtgatcatcctgtacgcggtcggtaccggtgccattaaagggtttgcgattaccaccggtatcggtatcgcgacctcaatgtttaccgctatcgtcggcacccgtgccatcgtgaacctgctgtacggcggcaagcgcgttaaaaagctgtctatctga

SEQ ID NO: 139528 - DNA, 1170 bp, Enterobacter cloacae
atgacacatccgttgctagaagcattgcaggttaacgaggcgcaatttattgctctgcgtcgtcggttccaccagcagccggagatcggctttgaagagcaccagaccagcagcgaggtcgcccgactgcttggcgagtggggatacgaggttcaccgcggcctggcgggcaccggagtggtgggcacgctgcgcgtcggcgaggggaaaaaacgccttggcctgcgagcggatatggatgccctgccgatgcaggagcggagcggtaagccgtgggcaagccaggttgaagggcgctttcacggctgcggccatgacgggcacaccaccacgctgctctacgccgctgaatatctggcgcgcacccgccagtttaccggcacgctgcagctgattttccagcccgcggaagagttgctgtacggcgggcgggtaatggtcgaggacggtctgtttgaccagttcccctgcgacgccatcttcggcctgcacaatatgccgggtcagccgttgggcaagatcggcctgcgcgacggggcgatgatggcctcctccgatacgctgcatattgaagtgaagggcgttggcggccacggcgcggtgccggagcatacggtggatgccacgctggtggcctgccatattaccctcgcgctacagtccattgtctcgcgcaatatcaccccgtttgaaccggcggtggtgaccgtcggcagcatccaggccggtcatgcgcccaatatcattaacgatcacgtgctgatgaagctcacggtgcgcaccctcaatgagcaggtgcgcgagactgtgctgcagcggatccatgatatcgccgtggcccaggcggagagcttcaatgccaccgccacgctgacccacgtcaacggcagcccggtgttgcgtaacgatccggcgacgaacgccatggtgcgggaggtggcgacagcgctgtttggcgcagagcaggtgggcgaggtgaagccgtttatgggcagtgaagattttgccttcatgctggagcagcacccccacggcagctatttcaccatcggcgccggcgacgagcctgaccgctgcatggtgcataacccggggtatgacttcaacgacgcgctgttgctgaccggcgcggcgctgtggtgcggcctgacggaacgctatctgcgctaa

SEQ ID NO: 139529 - DNA, 423 bp, Enterobacter cloacae
atggccaggatgattgaccaggccgctcaccagcagctggcgcatcaggcggcgcaggccgtcatcggcatcccgggtgcgcggcgttatctggtaatcgacggcaaaaaaggcattatcgaggcgggccagccagctggcggagagggtgaggatcatcacggcgttggccccggcgctgcgcagactccagcgacggttgcggttaacgatcgccagcccgtcggcggcgagcggctgcgacgcaccttccgccaccgccagatttacgcttccctccagcacccacagcagcgtcagcagatcgctttccggctgggtcagctgacgcacatcgcgtacggtgacgctaaagtcgcctgcatgctgctccacatgactctcctctgtagacaaaaaacaaccggttgttttttgtcataa

SEQ ID NO: 139530 - DNA, 993 bp, Enterobacter cloacae
gtgactcggattctgacagcgactccgattccgattccgacagcgattcggactcggacagcgactccgactctgacagcgactctgattccgacagcgactccgattccgacagcgattctgactctgacagtgactctgactctgacagcgattcggattccgacagcgactctgactcggacagcgattcggatgctgacagtgactctgactccgacagcgattcggattccgacagcgattcggactccgacagcgactcggattccgacagcgactctgactctgactccgattccgacagcgactcggattctgacagcgattcggattccgacagcgactctgactctgactccgactccgattccgacagcgactcggattctgacagcgattctgactctgacagtgactccgattcggatagcgactcggacagcgattccgattcggacagtgactcggactctgacagtgactccgattcggacagcgactctgactccgacagcgactcggattctgacagcgactcggattctgacagcgactcggattctgacagcgactcggactctgacagcgactcggactctgacagcgactccgactccgacagcgactccgactcggacagcgactcggactctgacagcgattcggactctgacagtgactcggattctgacagcgactcggattcggacagcgattcggattctgacagtgactccgattcggacagcgactctgactctgacagcgactcggattccgacagcgactcggactccgacagcgattcggattctgacagcgactcggattctgacagcgactctgactccgacagcgactcggactccgacagcgattcggattccgacagcgactcggattctgactccgactctgattccgattccgattcggataccgaaccgcaggcaaataatgatacccatacggcggctatcgataccgtag

SEQ ID NO: 139531 - DNA, 327 bp, Enterobacter cloacae
atggtggcgcagggtgccggcgctggcaaatccgcagcgctcagcgatctgatcgatgcccatcgtgctctccgtcaggtgctggcgggcgcgcagcagtcgttcctccagcagccagcgggcgggcgttttaccggtggcctcctcaaagcggcgcaaaaaggtgcgcgtccccatgccggcgcgctgggcgagggaagcgacggtatggctggcggcaagatgctggtgcagatagtcaaacagctgaccgaggcgcaggctctcccggctgcgggctaccgggcgcaggacctgctgcgcctgaccgccgtcgcgatggggtga

SEQ ID NO: 139532 - DNA, 219 bp, Enterobacter cloacae
atgatgaagaaagagtgtcgggtagtgatctataaagaggggctgctgggcagtctgttttttggcgaagccaaggccgaccctgacaaaatgagccagtttctcagcagctatacccgtgaggggtgggaagtgaaaaccatgtcggtggagcgccgccgtaccgccctgttctggtcgcgggaagcgtatcttttcgtgctcgaacgccccctctga

SEQ ID NO: 139533 - DNA, 441 bp, Enterobacter cloacae
atgatggtgattgagggtaaagaggcgatcgcgcgggtggactggcagcgagtgcgaacgatcatcgccgaggccgggctgaatgagcgtgatgttcagcaactggagcaggcgttccgccagagcaccttctgctggtttggctatgagaacggtcagctgattgccgtggcgcgagccatcagcgactgcacctggagcagctatctggcggatgtggcgatcgtccccgctcgtcagggacagggctacgggcaacagctgatgctggccatccgggagcaactcctgccctttggcaaaatatttatctatgcggtggccgataaaattacgttttatcagcgctttggctttgccatgttgactaccggcatggtctgcgccagcgaggaaggcatgcagaaaatgcaggagcagggctatatccgtcagccctga

SEQ ID NO: 139534 - DNA, 447 bp, Enterobacter cloacae
ttgcacagtctgaatattgcccgctctactacggtatttggcgactggagcgccgccagcggttggcagaaaactttcgagctcctccatctgcagccgcggatcagcgccatagtggtggcaaacgatcagatggcgctcggcgtgctcagcgcgctggcccagctcaatcgcagcggcagccaggcggtatcggtgaccggctacgatgacaccgccgacagcctttacttccagccgccgctcaccacggtggcgcaggacttcgatctgttgggtaaaagggcggtggagcggttgattgccctgatggcggccccgcagctgcggatccgcgagctgctgccgacccggctcatcgtgcgccagtcggcctggcctgtcgccgccgcggaggaccggcagcagaccctggcgcagctgaaagcgctggtggagaagctttag

SEQ ID NO: 139535 - DNA, 1245 bp, Enterobacter cloacae
atggcgtctccgttatcgttactgattgcattgcgtttcagccgcggccggcggcgcggcggcatggtgtcgctgatctcggtaatctccaccattggcattgcgctgggggtggcggtgctgatcgtcggcctcagcgcgatgaacggctttgagcgcgagctgaataaccgcgtgctggcggtggtaccgcacggcgaaatcgaacccgtgaatcagccgtggaataactggcaggaagcgctggcgaaggtgcagaaggtgaaggggattgtcgcggcagcgccctatattaacttcaccggcctggtggagagcggcagcaatatgcgcgccatccaggtgaaaggcgtcgacccgcagcaggagagccagctcagcgcgctgcctacctttgtgcagaataacgcgtgggccggattcaaggctggcgaacagcaagtgatcctgggcaaaggggtcgccgatgccctgcacgtgaagcagggggactgggtgtcgatcatgatccctaatgccgacgccgaccatcagctgctgcagccaaaacgcgtcaggctgcatgtgaccggaattttacagctgagcggccagctcgatcatagttttgccatgatcccgatgcaggatgcgcagcagtatctggatatgggcagcagcgtgaccggcatcgccatcaaggtcaccgacgttttccatgctaacaagctggtacgcgacgccggcgaggtgaccaacagctacgtctacatcaagagctggatcggcacctatggctatatgtatcgcgacatccagatgatccgcgccattatgtacctggcgatggtgctggtgatcggcgtggcctgctttaacatcgtctcgacgctggtgatggcggtcaaagacaaaagcggcgatattgcggtgctgcgcacgcttggcgcaaaagacggcttaattcgcgcgattttcgtgtggtatggtttattagccggatcggtaggcagcctgtttggggtggtgatcggcgtgatctgcgcgttgaacctgacgtcgatcatcaacggcatcgaatacctgattgggcataaattcctctccggcgacatctattttattgacttcctgccgtcagaattgcactggctggacgtcttttatgtgctggtgacagcactgttgctgagtttgctggccagctggtatcccgcccgccgcgccagccgcatcgacccggcgagggtgctgagtggccagtaa

SEQ ID NO: 139536 - DNA, 375 bp, Enterobacter cloacae
atgccgctgctgattggcaaaaagaagccggcggatattgaacgccaggcgaaagcgatgctgcaggcggtcgggcttgaacaccgcagccatcaccgtccgtcggagctctccggcggcgagcgccagcgggtggcgattgcccgcgcgctggtgaataaaccgcggctggtgctggcggacgagccaaccggtaacctcgacgctcgcaacgccgacagcatcttccagctgctgggcgaactgaacgtcgcgcagcgcaccgcgtttctggtggtgacccacgacctgcagctggcgaagcgcatgagccgccagctggagatgcgcgatggccgtctgaccgccgacctgaccctgatgggggccgagtaa

SEQ ID NO: 139537 - DNA, 1110 bp, Enterobacter cloacae
atgaccacattattaattaccggcgttacggggtttctgggcggtgccgcgttagagaaaatactccatcaggaaacccggttagatctgctgctgctggtacgtgctgatagccccgaggctggcctcgaacgggtcaaagagaacatgcgtaagttcaacatcgccgaggagaagctggcgatgttgcgccagcagcatatcctgctgggcgatctcgcctctccggagcattttcttaacgatccgcgcctcgatcaggtcacgcacatcctcaactgcgccgctgtcgcctcatttggcagcaacccgcttatctggaaggttaacgttgagggcacgctgcgcctggcgcaacgtatggcgcaggtgacgggtctgcagcgctttctgcacgtcggtacggcgatgtcatgttcgcctgaaccggattcactggtcgccgaaagcgcggagtttcgggaacgcgctgagcacctggtggaatatacccactcgaagtcgaccatcgagcagctgatgcagcagcagtgccctacgctaccgctggtaattgcccgcccctctatcgtggtgggtcatacccatcacggctgccggccttccagcagtattttctgggtgttcagcatggggctgatgctgcagaaattcatgtgctccatggaggaccgaattgacgttatcccggtggactactgcgccgacgccctgctaatgctgcttaaccagcctctggctcacggcgaggtggtgcatatctctgctggcgaagagaacagcgtgaagtttgccgaaatcgaccgggcgatggctcaggccctggagcaggcgccggtgggggataagtacgcccaggtgagctatgaaacgctggtcaaaatgagacgcgaactgaaagggatatttgggccatgcaatgagcggctgatgctgaaagccatgcgcttatacggcgcgttcgccaccctgaacgtgcgctttagtaacgacaagctgctgagcatggggatgccaaaaccgccgcgctttaccgattacatcgaccgctgcgtggaaaccactcgcgggttgtcgatccctcagcaaatggccgtcgactttaaataa

SEQ ID NO: 139538 - DNA, 228 bp, Enterobacter cloacae
atggcgaaagacgctggctacaccgctgttatctctcaccgttctggcgaaactgaagacgctaccattgccgacctggctgttggtaccgctgcaggccagatcaaaaccggttctatgagccgttctgaccgcgttgctaaatacaaccagctgattcgtatcgaagaagcgctgggtgagcaagcgccgttcaacggtcgtaaagagatcaaaggtcaggcttaa

SEQ ID NO: 139539 - DNA, 441 bp, Enterobacter cloacae
gtgccattcgtcagccaggtcctgcatctctgccgggatatcttcgtattcgaaggtaacgcccgcatctgcttcgttccagttgatggctttcattttcaccaggtcgataacgccggtgaaaccttcttcagcaccaattgccagctgaagcggaacagggttcgcgcccagacgggttttgatctggccaacaactttcaggaagttagcacccatacggtccattttgttaacgaacgcgatgcgtggaactttatatttgtttgcctgacgccatacggtttcagactgtggctgaacaccaccaactgcgcaataaaccattaccgcgccgtcaagaacacgcatggaacgttctacttcgatggtgaagtcaacgtgccctggggtgtcgatgatgtttacgcgatgcggttcgtactgcttagccatacctga

SEQ ID NO: 139540 - DNA, 1086 bp, Enterobacter cloacae
gtgcagcgcgataccgttggcgatagcggtcataccgaactcgcgcacgccgtagtggatgtagttcccggcagcgtcttcgttgatcggcttagagccagaccacagggtcaggttggacggcgcgagatctgcggagccgccgaggaattccggcagcagcgggccgaaggcttcgatggcgttctgcgaggctttacggctggcgattttcgccgggttggcctgcagcttcgcgatgaactcgttagctttcgcatcgaagtcagacggcatttcgcctttcatacggcgggtgaattcggctgcttcctgcgggaaggctttggcgtaagccgcaaacttctcgttccatgcggcttctttcgcctggccggcttctttggcatcccactgggcatagatgtcagacgggatgtcaaacggcgcgtgtttccagcccagcgcttcgcgggtcagggcgatttcggcgtcgcccagcggcgcgccgtgggagtcgtgggtaccggctttgttcggcgaaccgaaaccgatgatggttttgcacatcagcagggacggtttgtcggtgaccgcccgcgcttcttctaccgcgcgtttgatggcgtcagcgtcgtgaccgtccacgccgcgcaccacgtgccagccgtaggcttcaaagcgtttcgcggtgtcatcggtgaaccagccttcaacgtggccgtcgatggagatgccgttgtcatcatagaacgccaccagtttacccagtttcagggtaccggccagggagcacacttcgtgagaaatgccttccatcatacagccgtcgcccatgaaggcgtaggtgtagtggtcgacgatatcgtgtcccggacggttgaactgcgccgccagggttttctcggcgatagccatcccgaccgcgttagcgataccctggcccagcggaccggtggtggtttccacgcctgcggtgtagccgacttccgggtgacccggggttttggagtgcagctggcggaagtttttcagctcttcaatcggcagatcgtagccagtgaggtgcagcaggctgtaaatcagcatcgaaccatggccatttga

SEQ ID NO: 139541 - DNA, 444 bp, Enterobacter cloacae
atgaacaaatatatacgttcgacgggactgtatgcgtttttatttccagccagtttaaaagcacccgggcagacagcagcagaaaaaatagaacaactgaagccggaatttattcaccgggaaaggcgtctggaaatctatctggaattattcattgtgtttctcactgcaggtgctctgttgttatggataatgagaattttatttaatctctgcgtggatgactggatagccagcggtgacctgcgagtaaaagacctgtggaatattatgatgtacgccatcccttatgcgctgatcgctgttggggtggggttctttgttgccggagtgacattagcgatccgcaattttttcagttatcaccttaagaccctttttattctgagaaatgacagagttaaaaagaatgctgtgcgtaatggaggacaggatgcgaattaa

SEQ ID NO: 139542 - DNA, 558 bp, Enterobacter cloacae
gtgaaaaacagcctgatgaacctcgctaaggcgccgctggcggcactggctctttcccttgcactggctggggtggcacatgcgggaacgctcgatgaggtgaagtcgctctgggatccgcggggtatctccggtactgaaacggcctccccgcagagcgacactccccaggcggtgagcggggcatctcagccacgctggttacgactcagcaacggaaagcaggtggacctgcgcgactggaaagtggtgctgttcatgcagggacactgtccctactgtcataaatttgacccggtgctgaagcagctggccggacagtatggcttctccgtgttctcttacaccattgacggacagggtgatgacgcgtttccggaagcgctgccggcgcctcctgacgtgatgcagacctttttccccaatatcccggtggccacgccgactacgtttctggtgaacgtaaacaccctggcagcgtacccgatcctgcagggcgccacggatgcacagggctttatggccagagtggatacggtatttcagatgatgcactga

SEQ ID NO: 139543 - DNA, 201 bp, Enterobacter cloacae
atgtgggtgctggccgtgggcgtgtttttccacctgatagcccggcttgtcagaaaacagcctgagctggccgtccaggccggggaaatcttcgggctgggtatggtggtgttcgggggataccgcattctaaacgccctgattgctgaagccgaaaaagaggagaaagcctgtgaaaaacagcctgatgaacctcgctaa

SEQ ID NO: 139544 - DNA, 1521 bp, Enterobacter cloacae
atgcgttatgcacatcctggccagcccggcgccgtggtttcatttaaatcggcttacggcaactttattgacggtagatttgtcgagccgctgagcggtgaattctttatgaatacttcgccggtcgacggcagcaacattgcgcagtttccccgctcggatgccagagacattgacttcgccctcgacgccgcccatcgcgcggcgccggcgtggggtaaaacctcagtgcaacagcgctccaggctgctgctgcaggtcgccgatcgtattgaacagcatctggaatatctggcggtggcggagagctgggacaatgggaaaccgatccgcgaaaccctgaatgccgacctgccgctggcggtggatcattttcgctacttcgccggctgcctgcgcgctcaggagggaagcaccgccgagattgacgaaaccacggtggcctatcatttccatgaaccgctgggggtggtcgggcagattatcccgtggaacttcccgctgctgatggccgcgtggaagctggccccagccctggcggcggggaactgcgtggtgctcaaaccggcggaacagacgccgctaagcattaccctgctgctggagctgatcggcgatctgttcccggccggggtgcttaacgtggtgcagggtttcggcaaagaggcgggcgaggcgctggccaccagcaagcgtatcgccaagctggcgtttaccggctccacgccggtcgggcggcatattctcgcctgcgcggcggaaaatattatcccctgcaccgtcgagctgggggggaaatcgcccaacatctacttcgccgacgtgatggacggagaagaggaatttattgagaaggcggtggaggggctggtgctcggcttcttcaaccagggtgaggtctgtacctgcccgtcgcgggcgctgatccatgaatccatctatgagccctttatggcacgggtcatggagaaggtggcgcagatccgccgcggcgatccgttagataccgacaccatgatcggcgctcaggcttcccgccagcagttcgacaagatcctctcctatattcagattgcccgggaagagggtgggcaaattctgaccggcggcgagcgggcggctatcgcgccggcgctggataatggcttttatattcagcctacgctgattaaaggtcgcaacgatatgcgctccttccaggaggagatctttgggccggtgatcggggtgaccacctttaaggacgaagcggaagcgctggctatcgccaatgagacccagtttggtctcggcgccggggtgtggacgcgggataccaacctcgcctatcgcatgggtcgcggcattaaagccggtcgcgtgtggaccaactgctatcatgtctacccggcgcatgcggcgttcggcggctataaacagtccggcgtcgggcgggaaacgcacaagatggcgctggatgcctatcagcaaaccaaaaacctgctggtgagctacggcaccgcgccgctgggcctgttctga

SEQ ID NO: 139545 - DNA, 1809 bp, Enterobacter cloacae
atggtgctgtcggcggtatttatcccgatggcgttcttcggcggttcaaccggggccatctatcgccagttctccatcactatcgtttccgcgatggcgctgtcggtactggtggcgttaatcctgacgccggcgctgtgcgccacgatgctgaaacccattcagaaaggcagccatggcgcgaccaccggcttcttcggctggtttaaccgcatgtttgataagagcacgcaccattacaccgacagcgtaggcaacattctgcgcagcaccggtcgttatctggtgctgtatctgattatcgtggtgggtatggcatggctgttcgtccgtctgccgagctcgttcctgccggacgaggatcagggtgtattcctgagtatggcgcagctgcctgccggcgccacccaggagcgtacgcagaaagtactggatgagatgacgaattactatctcaccaaagagaaggacaacgtggaatccgtgtttgcggttaacggcttcggtttcgccggccgcggccagaacaccggtatcgcgttcgtttcgttgaaagactggagccagcgtccgggtgaggaaaacaaagttgaagcgatcaccgcgagagcaatgggctacttctcgcagattaaagatgcgatggtcttcgcctttaacctgccggctatcgttgaactgggtaccgcgaccggctttgacttcgagctgattgaccagggcggtctcggccacgaaaaactgacccaggcgcgtaaccaactgtttggcatggtggcgcagcatcctgacgtgctgaccggcgtgcgccctaacggtctggaagatacaccgcagtttaaaatcgatatcgatcaggagaaagctcaggcgctgggcgtctccatcagcgacattaacaccacgctgggcgcagcctggggcggaagctatgtcaacgactttatcgaccgcggccgcgtgaagaaagtgtacatcatgtccgaagcgaaataccgtatgctgccggaagatatcggcaagtggtatgttcgcggcagcgatggtcagatggtgccgttctctgctttctcgacctcgcgttgggaatacggttcgccgcgtctggaacgctacaacggtctgccgtcactggaaatcctcggtcaggccgcgccaggcaagagtaccggtgaggcgatggcgctgatggaagagctggcgggtaaactgccttccggtatcggctacgactggaccgggatgtcttatcaggagcgactgtccggcaaccaggcccctgccctgtatgccatctcgctgattgtcgtcttcctgtgtctggcggcgctgtatgagagctggtcgattccgttctcggttatgctggtcgtccccttgggtgtggttggtgcgctgttagccgccaccttccgcgggctaaccaacgacgtttacttccaggtgggtctgctgaccaccatcggcctgtcggcgaagaacgcaatattgatcgttgaattcgccaaagacctgatggagaaagagggcaaagggctgattgaggcgacgcttgaagcagtacgtatgcgtctacgtccaatcctgatgacatctctggcgttcatcctcggggtaatgccgctagttatcagctccggcgccggctccggtgcgcagaacgccgtcggtacaggcgtaatgggcgggatggtgaccgcgacgatcctggcgatcttcttcgtgccggtgttctttgtggtggttcgtcgccgctttagcaaaaaatcggaagatatagagcacagccatcaggttgagcatcattaa

SEQ ID NO: 139546 - DNA, 198 bp, Enterobacter cloacae
atgaaaagtaccacctatgcgcttattgctgtcgccgcgatcgcggcatttgccctcctgcgcgaacactggtcacatgtggcaggttactggccatatctgttattgctggtctgcccgctaatgcatcttttccacggtcacggggggcatggagatcatcaacatcacggaagtgaaaacgataaaaaaaattaa

SEQ ID NO: 139547 - DNA, 486 bp, Enterobacter cloacae
atgatgaacaaggttgctcaatattaccgtgaactggtctcctcgctcagcgaacggctccgccatggagagcgcgatatcgacgcgctggtgacgcaggcgcgggaaaaaatcgtccgcgccggcgatctgacgcagagcgagatcgagtcggtgattgcggcggtcaagcgcgacctcgaggagtttgcccgcagctacgaagagagtcacgaagacgagagcgacagcgtgtttatgcgggtgatcaaagagagcctgtggcaggagctggctgatatcaccgacaaaacccagctcgagtggcgggaagtctttcaggatctgaatcaccacggcgtgtaccacagcggcgaagtggtcggtctgggcaacctggtctgcgagaagtgccactatcacctggcggtatacaccccggacgtgctgccgcgctgtccaaaatgtggccacgatcagttccagcgtcggcccttcgagccctaa

SEQ ID NO: 139548 - DNA, 378 bp, Enterobacter cloacae
atgaatgccgccgatatcaccaccgatcacggcgtagtgaataattatggcaatattactgccaaaaatatttcaatcacgacctactcagatatcaccaacgaagggcagatcagcagcaccggcgacctgaccttaaataccaaaaataaaggcgcgatctacaattattcaaccctcagcgcgggcggcaacatgacgttaaccgccaccaaagtggtcaatggtggtaaaagttgcggcatactgggcctggcgaaatgcggagtcgggacgttaactgctgacaagctggtactgaactcatcgcagaaatatgttagcgacatgggtggaaaacagtatttcaagagcaccgaagtcaacacggtgaaataa

SEQ ID NO: 139549 - DNA, 225 bp, Enterobacter cloacae
atgcaaccgtggttaaagaagatgttgacaacttgtggtgttcccactgacggggcaaagcatgtacgtcgtaaaataggcggccgtttctgccttggcgctgtcttttttgtcattcctgctatgttgctggatctcccattatggggggtgttgcttacccaaatactctatggcttgtctatgtatatcggtatttcgctggcattcgataagaaaaagtag

SEQ ID NO: 139550 - DNA, 525 bp, Enterobacter cloacae
ttgtgcaatatggactccctgttaacagaaaggattctcatactactgaatatgaatttttatattattacagacaacacatacctgtttgcaggggtaaaacatttactctcggacttgcaagtttcactacatagagtagcgactaatgatatacattctttggcgtatccaagggatgcaatattattgcttgatggtgctagccataatatatcggttcgtgaatataagcatattaatcaactaaacacacctgtttactttatcctcaatataagaaatgaaattttatctcatcttgcaggcataaatatacttaacgcgtatggaaccgctgaggggctgagaagaagactgataaaaattttatgtggagatattccttcacataatcatcgtgtttatttaacccgcatggaatccgtcattcttcagctatatgtaaacgggttgtcagctttacagataagtcaggaaattactgtaaagaaaagaaccgtatccactcatcggctttgttga

SEQ ID NO: 139551 - DNA, 546 bp, Enterobacter cloacae
atgtctgaagctcctaaaaagcgctggtacgtcgttcaggcgttttccggttttgaaggtcgcgtagccacgtcgctgcgtgaacatatcaaattacacaacatggaagagttatttggcgaagtcatggtcccgaccgaagaagtggttgagatccgtggcggccagcgtcgcaaaagcgaacgtaaattcttcccgggctatgtcctggttcagatggtcatgaacgacgcaagctggcacctggtgcgcagcgtaccgcgcgtgatgggcttcatcggcggcacctctgaccgtccggcgccgatcagcgacaaagaagtcgacgccatcatgaatcgtctgcagcaggttggcgataagccgcgtccgaaaacgctgtttgaaccgggtgaaatggttcgcgttaacgacggtccgttcgctgactttaacggcgtggtggaagaagtggactatgagaagtcccgcctgaaagtttccgtttctatcttcggtcgtgcgaccccggtagaactggacttcagccaggttgagaaggcgtaa

SEQ ID NO: 139552 - DNA, 384 bp, Enterobacter cloacae
atgagtgcgaataccgaagctcaagggagcgggcgcggcctggaagcgatgaagtggattatcgttgccgtgctgctgatcgtggcgatcgtgggcaacttcctttatcgtgacattatgctggcggtgcgtgcgctggccgtggttattcttattgctgctgccggtggcgtcgcgctgttgacgacgaaaggtaaggcgaccgttgcttttgctcgcgaagcgagaaccgaagttcgtaaagtgatttggccgactcgccaggaaacgctgcatactacgctgattgttgctgccgtgactgcagtaatgtcactgatcctgtggggactggatggtattctggttcgcctggtctcctttatcactggcctgaggttctga

SEQ ID NO: 139553 - DNA, 801 bp, Enterobacter cloacae
gtgacgcggcagacggatcacgcggatatcgtgggcaaagtatttgccgccgaactgcgcgccgagaccaaggttctgcgcctccagcagcagctcctgctccagctgcacgtcgcggaacgcctggccgtgctcgttaccttcggtcggcaggccatcgtagtatttggtggacgccagcttcacggtcttcagcgtcgcttccgccgaggtaccgccgatcacgaaggcgatatggtacggtggacaggcggcagtaccgagggtgcgcatcttctcgacgaggtaatttttcagcttcgccggggtgatcagcgctttggtttcctggtacagataggttttgttcgccgagccgccgcccttggcgatgcagaggaatttgtactcatcgccatcggtagcatagagatcgatctgcgccggcaggttggtgccagtgttaacctctttatacatatccagcggtgcgttctgcgagtagcgcaggttgtcctggatataggtgttgtacaccccctgcgccagggcggcttcatcgccgccgccggtccagacgcgctggccttttttacccatgatgatcgcggtgccggtgtcctggcaggtgggcagaatacctttggcggcgatatccgagttgcgcaggaactgcagcgcgacgtatttatcgttttcgctggcttccggatcgttaaggatatccgccacctgctgctgatgcgcagggcgaagcataaaggaggcgtcgtggaaagcatgctgcgccagaagggtcagcgcctgagggtcaacttttag

SEQ ID NO: 139554 - DNA, 402 bp, Enterobacter cloacae
atggcgaaagaatttggtcgcccgcagcgtgtggcccaggagatgcaaaaagagattgccatcatcctgcagcgtgaaattaaagatccgcgtctgggcatgatgaccaccgtttccggtgtggaaatgtcccgtgacctggcctatgccaaggtgtatgtcaccttccttaacgacaaagatgaagccgcggtgaaagcgggcatcaaagcgctgcaggaagcttctggctttatccgctctctgctggggaaagcgatgcgtctgcgcatcgtaccggaactgactttcttctacgacaactcactggtggaagggatgcgtatgtccaaccttgtcaccagcgtggtgaaacacgacgatgagcgtcgtgtgaacccggacgacagcaaggaggactga

SEQ ID NO: 139555 - DNA, 945 bp, Enterobacter cloacae
atgagtcgtcctcgtcgtcgcggccgcgacgtgcatggcgtattgttgctggacaagcctcagggcgcctccagtaacgatgtgctgcaaaaagtaaaacgtatttataacgccaaccgcgccgggcataccggcgcgctggatccgctggcgaccggtatgctgccgatctgccttggcgaagcgaccaagttttcccagtatctgctggactccgataagcgttaccgcgtgatcgccaaacttggccagcgcacggatacctccgatgccgacggtcaggtggtggaagagcgcccgctgacttttagcgacgaacagctggcggcggcgctggacagcttccgcggcgagacgcagcaggtgccgtcgatgtattcggcgctgaaatatcagggcaagaagctatacgaatatgctcgccagggtattgaagttccgcgggaagcccggccgataaccgtctatgagctgctgtttattcgccgcgaaggcgatgagctggagttggagatccactgctcgaaaggcacctacatccggacgattatcgatgatttaggtgagaagctcggctgcggcgcgcacgtgattttcctgcgtcgcctggcggtaagcaaatacccggtcgagcggatggtgaccctcgagcagctgcaggcgctggtcgatgaggcggcggcgcaggatattcctgccgctcagttgcttgatccgctgctgatgccgatggacagcccggcctcggattacccgctggttaatattccagaaacctccgcagtctactttaagaacggcaacccggtacgtcagtcaggcgcgccgcttaacgggctggtgcgggtgatggagagcgagtccggcaagtttctcggcatgggcgaaattgacgatgaaggccgcgtggccccgcgtcgtctggtggtggaatacccggcgtaa

SEQ ID NO: 139556 - DNA, 543 bp, Enterobacter cloacae
atgtttacctttattaaaaaagttattaagaccggcaccgcgacgcacgcctacccgctggagccgatgccggtagacaaaaactttcgcggcaagccggagcatacgccacagcagtgtatcggctgcgcggcctgcgtgaacgcctgcccgtcgaacgccctgacggtcgagatcgatctggccactaaccagctggcgtggcagtttaacctcgggcgctgcatcttctgcggtcgctgtgaagaggtgtgcccgacggcggcgattaagctgtcgccggagtatgagctggcggtgtggaagaaagaggatttcctccagcagtcgcgcttcgctatctgccactgccgggagtgccagcgtccgttcgcggtgcagaaggagatcgactacgccatcgcgctgctcaagcataacggcgatacccgcgccgagctgcaccgcgaaagcttcgaaacctgcccggaatgcaagcgccagaaatgcctggtgccgtccgatcgtattgaactgacccgccatatgagggaggccagctga

SEQ ID NO: 139557 - DNA, 768 bp, Enterobacter cloacae
atgagtactttacttggcccgcgcgatgaaaacggcattcccgtgccgatgacggtggatgaatccatcgccagcatgaaggcctcgctactgaagaagattaaacgttcggcctacgtctaccgcgtcgactgtggcggctgcaacggctgcgaaatcgaaattttcgccaccctttcgccgctgttcgacgctgaacgcttcgggattaaggtagtgccttcgccgcgccatgccgatattctgttgtttaccggggcagtgactcgcgcgatgcgctccccggcgctgcgcgcctggcagtcggcgccggatccgaagatctgtatctcctacggcgcctgcggcaacagcggcggcatcttccacgacctgtactgcgtctggggcggtaccgataaaatcgtaccggtcgacgtctatattccgggctgcccgccgacgccagccgccacgctgtacggcttcgccatggcgcttggcctgctggagcagaaaattcatgcccgtctgccgggtgagctcgacgaacagccgaccgagctgctgcatgccgatatggtgcagcctctgcgggtgcgcatcgatcgcgaagcgcggcgtctggcgggctatcgctatggacggcagattgccgatgactatatgcgtctgcttggccagggcgacagtcaggtgctgcgctggctggaggcggagaaagatccgcgtctgaccgagatcgtcacccatctcaaccaggtggtcgagggggcgcgtatccgatga

SEQ ID NO: 139558 - DNA, 411 bp, Enterobacter cloacae
atgagcgagacggtggtgttcagtcagctgagccgtaaatttattgatgagaacgacgccacgccggatcaggcgcagcaggtggtctattacagcctggcgattggccaccacctcggcgtcatcgactgtctggaggcggcgctgagctgcccgtgggacgcgtatctggcatggatcgccacccttgaggccggaagcgccgcgcggcgcaaaatggagggcgtgccgaagtatggcgaaatcgtcatcgacagcagtcatgtggcgatgctggccaacgcctttgataaagcgcagtccgcgcagaccccgcagcagcaggcgtggagcaaaaccctgctcagcatgctgcatgatattcaccaggagagcgccatctacctgatggtgaggagattacgtgactga

SEQ ID NO: 139559 - DNA, 261 bp, Enterobacter cloacae
atgaaaaacatcaaatatgctgccgctgccatcgctctgaccgctctttccttcggcgcctttgccgccgaaccggttacccccgctcaggctgaaagcatgaataagatcggcgtggtgtctgcgcaaggcgcaaccactttagatggtctggaagcaaaactggctgctaaagccgaagccgctggcgcgaccggctacagcattacttccgctaacaccaacaacaaactgagcggtactgcggttatctataaataa

SEQ ID NO: 139560 - DNA, 969 bp, Enterobacter cloacae
atggagtacagcaaaattataaaagaggtgggtcgcggtaagaatcatgcccgcgatctcgatgaagagaccgcccgtgcggtctacgcgcggatgctgaacggcgaggtgccggagctggagctggggggaatattaatcgccctgcgcattaaaggcgaaggcgaagcggagatgaaaggtttttacgccgcgatgcagcagcatacgctgcgcctgaccccgccggccggcaagccgatgccgatcgttatccccagctacaacggcgcgcgcaagcaggcgaacctcacgccgctgctggcgatgctcctgcacaagctgggatttccggtggtggttcacggcgtcagtcacgatcccacccgggtgctgaccgaaaccatttttaccctgctggacattccggccaccctgcacgccggacaggctcaggcgcagctggagggccatgaaccggtgtatatcccggtgggggccttctgtccgccgctggagaaacagctggcgatgcgctggcggatgggcgtacgcaacagcgcccataccctggccaagctggccacgccgtttggcgaaggggaggcattgcgcctctccagcgtgtcgcatccggaatatgttccccgggtggcgaacttctttcgcgagaccggtggccgcgcgctgctgatgcatggtaccgagggcgaagtgtacgccaacccgcagcgctgtccgcagatcagcttgattgatgagcagggcgtgcgggtgctgtacgaacgccagactgagatggcagcggaggcggtggtcctgccgacctcgaaagaccctgaggtcaccgcgcgctggattgaacgctgcgtcgctggcgtcgaaccggtgcccacctcgttgaagatccagcttgcctgctgtctgctggcctgcggggaagtcacctcgctggagcagggcctcagccgcgtcaacgactgctggtga

SEQ ID NO: 139561 - DNA, 291 bp, Enterobacter cloacae
gtgatcaccgaaggcgaatggctgaaaagcctcaatcgttatcccttcgaggtacagagtttgcccagcgcctcctttaatcttattcagcaggtggggcgtttgatccgtagccataactgctggggagaggtggtgatttacgataagcgtctgttgaccaaaaactacggcgcgcgtctactgaacgcgttacctgtttttcccatagagcagccgggcgttccggaggttatagtaaaacggaaagcaaaacagacagcaaaacagacgggccgcaaacgtcgctga

SEQ ID NO: 139562 - DNA, 198 bp, Enterobacter cloacae
atgaatttcgacgcagtcaaaacctgcgcgccgaacgcgctccgcggcgtcaccaaatttctctaccgcatgataaatttcctcatgggtcatcggacgcggaatattaccgtgcttcttcgacggcgttgtagaagaggagagcggcgtctggccttccagtcggtaggcataagcggaagcgccggcatgatttaa

SEQ ID NO: 139563 - DNA, 711 bp, Enterobacter cloacae
gtggtttttcgcttccagcagccaggtatggcaaccaacttccgccgcggtgcaggcggcttccatcccggcggtgccggcgccgatgaccaccacgttagtgtcgcgattcacgcgccgcattttataggcgtcaccgtgaataatatccgggttaatcgaacagcgcagcgggcgcgagcgggcgatgcgatggtcggcgcagccgatgttgcaggagatacatttgcgcatcagacgctcttttccgccttgcactttctgcacccactccggctcggcaatcagaccgcggccaatggcgataagatcggcatcgccgctggcgaggatatcttcggctacctgtggagtgcgaatattgccggcgatgaccgtgggtttatggaatttatcgcgcaccgcgcgggagagatagcgcttccagccatcctccagcgacatctgatcgatttgcagattcaggttgtcgttctgcgccgcagagacgttgatgatatcgaccttctcctggcagagctcaagaatacgcagggaatcttcgagggtattgccgcccttgaggaagtcgtcggcgctgatgcgcagactgaccggaaaacgcggccccacgcaggcgcgaaccttatcgacaatcagactcagtatccgagttcgattttcgacgctgccgccaaattcatcagtgcgcttattaaacagcggcgataa

SEQ ID NO: 139564 - DNA, 960 bp, Enterobacter cloacae
gtgctggaagctatctacacgcttggccacggccgggcatttcgcagtttgcaaattggccgagtgatccgccacgagcaggatgcgtttgttctgcatggccgtctgcagggcgaagagcgggaaaccgccatcggcctgaccaaagacaaacagggcgacagcaaggtgcgtatcgacggcaccgacggccacaaagtggcggagctggcgcacctgatgccgatgcagctgattacgccggaggggtttactttactcaacggcggccccaaatacagaagagcattccttgactggggatgctttcataacgaagccggattcttcaccgcctggagcaacctgaagcgcctggtcaagcagcgcaacgccgcgctgcgtcaggtcagccgctatgcccagctgcggccttgggatctggaattaatcccgctggcggagcagatcagccgctggcgtgccgaatacagcgccgctatcgtcgaagacatggcggatacctgtcagcaatttttaccggaattcacgctcaccttctctttccagcgcggctgggaaaaagagaccgactacgcggaggtgttggagcggaatttcgagcgcgacagaatgttaacctacaccgcccacggcccgcataaagcggattttcgcattcgcgccgacggagcgccggtggaagataccttgtcgcgcgggcagcttaagctgctgatgtgcgccctgcgtctggcgcaaggagagttcctcacccgcgtcagcgggcggcgctgcctgtacctgatagatgattttgcctcggaacttgatgatgcccgccgcggtctgttatccagccgcctgaaagcgacgcagtcgcaggttttcgtcagcgcgatcagcgctgaacacgttatggacatgtcggacaaaaattcgaagatgttccgcgtggaaaaaggtaaaataacggattaa

SEQ ID NO: 139565 - DNA, 666 bp, Enterobacter cloacae
atggtcttctttgccgtcgcgcttatcgcgcaggcggatagagacgccggagttcaggaacgacagctcgcgcaggcgtttcgccaggatgtcatattcaaattcggtgacattggtgaaggtttccaggcttggccagaaacgcaccatggtgccggttttgtcggtttcgccagtcacggccagcggtgcctgcggcacaccgtgttcgtacatctgcttgtgaactttgttatcgcgctggataaccagctccagcttctgcgacagggcgttaaccaccgagacgcctacgccgtgcagaccgccggaaactttataggagttatcatcgaatttaccgccagcgtgcaggacggtcatgataacttccgctgcggagacgccctcttccgggtgaatgccggtcgggatgccgcggccgtcatcctggacggagacggagttatcgctgtggatggtgacaacgatatctttgcagtaacccgcgagcgcttcgtcgatagcgttatccacaacctcgaataccatgtggtgcagaccggtgccgtcatccgtgtcgccgatatacatacccgggcgcttacgcaccgcatccagccctttcaggactttgatactggaggagtcataagaattcgacatcaacgtttctcgctcatttaa

SEQ ID NO: 139566 - DNA, 228 bp, Enterobacter cloacae; identical to SEQ ID NO: 101340

SEQ ID NO: 139567 - DNA, 282 bp, Enterobacter cloacae
atggctgcgtccttgatggtcgttgttttgcttgtgctctttcttttcattccagcctgtatcgccctgttcatgtcaggccgcagtctgctccttatattcctgggtgccgtggcgtgccaggcggctgttgccgttgcgtttgcaggactgtctgcccggggctggtctgagtcgatggggatgggggcggcatcactcattttctacgttatcgggctgcacaaggctgacggtgtaaaacagaatactcataacgggagagaaaagaatgaaagttaa

SEQ ID NO: 139568 - DNA, 633 bp, Enterobacter cloacae
atggtttgtggcggggatgtgttctgcctcgatggggagtgtgacaaagccacgtccgggaagagcaacgactttggccaggccgtgtctgagctggcagcgctggcggctgcagggaaggatgtcgcggcactgaacggggtggatgtcagggccttcacgggaaaagcgaaatactgcaaaaaattcgcggctggcttcagtaactgctgcaaagacggcggctggggccaggatgtggggctggcacgctgcagcagcgaggaaaaggcgctggccaaagcgaaaaaagacaagctgacggtcagtatcggggagttctgctctaaaaaggttctgggtatttgcctggagaaaaaaaggagctattgccagttcgactcaaaactggcgcagatcgttcagcagcagggcagaaacggccagcttcatatcggttttggcggcgccagcagtcctgactgtcggggcattaccgtcgcggaactccaggggattgattttaacgagctggatttcacaaacttcatggaggatttaatcaataaccagaaaatcccggataacagcgaactgaccgaaaaaacaaaagcgcgtattaaagaacttctcacgcagtcttcagcaaagtaa

SEQ ID NO: 139569 - DNA, 879 bp, Enterobacter cloacae
atgaacaagccgtggtctgagaagctgctggaagtgaaagaagatgtgcagcgcggcctgcagaaactgcagcagattgaagaagagaccggcctgaccatcgagcaggttaaagatatcaaccgtcgcatgtccatcggcgaagcgaaagcccgtcgtgcgaagaaagagatggttgaagcgaacctgcgtctggttatctctatcgccaagaaatacaccaaccgcggtctgcagttcctcgacctgattcaggaaggcaacatcggtctgatgaaagcggtcgataagtttgaataccgtcgcggctacaagttctcgacctacgccacctggtggatccgtcaggccatcacccgctctatcgcggatcaggcgcgcaccatccgtattccggtgcatatgattgagactatcaacaagctcaaccgtatctcccgtcagatgctgcaggagatgggccgtgaaccgaccccggaagagctggctgagcgtatgctgatgccggaagacaaaatccgtaaagtgctgaagatcgccaaagagcctatctccatggaaacgccgatcggcgacgatgaagattcgcatctgggggatttcatcgaggataccaccctcgagctgccgctggattctgcgaccaccgagagcctgcgcgcggcaacgcatgacgtgctggccggcctcaccgctcgtgaagcgaaagtgctgcgtatgcgtttcggtatcgacatgaacaccgaccacacgctggaagaagtgggtaaacagttcgacgttacccgcgaacgtatccgtcagatcgaagcgaaggcgctgcgtaaactgcgccacccgagccgttctgaagtgctgcgtagcttcctcgacgattaa

SEQ ID NO: 139570 - DNA, 507 bp, Enterobacter cloacae
atgattagcgatatccttgcgccgggcctgcgcgttgtcttttgcggtatcaacccggggaagtcctccgcccataccggctttcattttgcccatcctggcaatcgcttctggaaggtcatccatcaggccgggttcaccgatcggcagctcaggccggaagaggagctgcagctgctggatacgcgctgcggcatcaccatgctggtagagcgtccgacggtgcaggccagcgaggtcgccttgcaggagctgcgcagcggcggccgtgagctggtgcggaagattgaggagtatcagccgcaggcgctggcggtgctcggcaagcaggccttcgagctggcctttaaccagcgcggcgcgaagtgggggaaacaggctatgaccatcgggacgacccaggtgtgggtgctgcctaatcccagcggcttaaaccgggcgacgctcgataagctggtggcggcctatcgtgaactggacgatgccctggcaacccgcggccagtag

SEQ ID NO: 139571 - DNA, 1011 bp, Enterobacter cloacae; identical to SEQ ID NO: 101477

SEQ ID NO: 139572 - DNA, 285 bp, Enterobacter cloacae
atgaccgttgatatggtgcgccggaccgtgatccgttcggggaagaagatccatctcaccggtaaagaatacgttctgcttgagttgctgctgcaacgcaccggagaagtgttacccaggagtcttatctcgtccctggtctggaacatgaattttgacagtgatacgaatgtgattgatgtcgccgtgagacgtctgagaagtaaaattgatgatgactttgagccaaaactgatccataccgttcgcggtgccggatatgtcctggagatcagagaagagtga

SEQ ID NO: 139573 - DNA, 267 bp, Enterobacter cloacae
atgcaaggaaaagcaaagatgaatcgatatatcacgattgagaaatttatagacattctgaatgaagagaatttaccccaggagcatcatgttatggtactggctgttcttgcggatatctctctgcatacagacaggttcctgattaactcgtccgaactggttcagatggccgctcagtactcacctgctttccagaaactgccagcggaccggcaggcttttatatcttcagtactgagcatgccgctattccttattatgtga

SEQ ID NO: 139574 - DNA, 255 bp, Enterobacter cloacae
atgaaaatgagttttcacaaaaagcctgttattgattttgtcctgagattaacgctaacaataatcattatttctccggtgatttatttctcctgggatgcagtcaaagggacgtcgggaagtgattatgtcgaaagtgtggtctttattcttatggctgggtttgccatgtctgtgtgttatttgtttttctcagtcctggagaaagttataaatgcaaggaaaagcaaagatgaatcgatatatcacgattga

SEQ ID NO: 139575 - DNA, 633 bp, Enterobacter cloacae
atgatctgcggcggtgatgtcttctgccttgatggtgaatgtgacaaagccacgtccgggaagagcaacgactttgggcaggcggtgtctgagctggcggcactggctgccgcggggaaggacgtcgcggcactgaacggggtggatgtccgggcattcaccggaaaagcgaagttctgtaagaagtttgctgccggcttcagtaactgctgcaaagacagcggctggggccaggatgtggggctggcacgctgcagcagcgaggaaaaggcgctggccaaagcgaaaaaagacaagctgacggtcagtataggggaattctgctctaaaaaggttctggggatttgcctggagaaaaaaaggagctattgccagttcgactcaaaactggcgcagatcgttcagcagcagggaagaaacggtcagctgcatatcggttttggcggcgccagcagtcctgactgtcggggcattaccgtcgcggaactccaggggattgattttaacaagctggatttcaccaactttatggacgacctgatgaaaaatcaaaaaataccggaaaacgatgtgctcaccaataagaccagagaacgaattaaggaaatcatgagtcagcaatccgcgcaataa

SEQ ID NO: 139576 - DNA, 642 bp, Enterobacter cloacae
gtgcagcaagccaatggcgaagcagagccgacgccgcacgtctttagcctgctcacgcagcaggggctggcgaagaccgaggaagatcgcggcacgccgcccgacgatatcacccgcaccccgccggtctacccctgctcgcgttcctcgcgcctgcagcagctgatgcgcggcgatgaaggctacctgctggcgctggcctattcgacccagcgcggctatggccgcaaccatccgtttgccggcgagatccgcagcggctacgtgcaggtggaaatcgtcccggaagagctgggctttagcgtcaatattggcgagctgctgctgaccgagtgcgagatggttaatggcttcgtcgccccgcaggaggagccgccgcacttcacccgcggctacggcctgaccttcggcatgagcgagcgcaaagcgatggccatggcgctggtcgatcgtgcgctgcaggcgccggactatgacgaagagattgccggcccggcgcaggatgaagagtttgtgctggcccacgccgataacgtcgaagcggccggcttcgtctcgcatctgaagctaccgcactatgtcgatttccaggccgaactggcgctgctgaaacgcctgcaacgggagaacgaacgtggctaa

SEQ ID NO: 139577 - DNA, 849 bp, Enterobacter cloacae
gtggctaacccactgactggctataactttgcttacctcgacgagcaaaccaagcgcatgatccgccgggctattctcaaagcggtagcgattcccggctaccaggtgccgttcggcgggcgcgaaatgccaatgccctacggctggggcaccggcggcatccagctgaccgccagcgtcatcggtgagaacgacgtgctgaaggtgattgaccagggcgcggatgacaccaccaacgcggtgtcgattcgtcagttctttaagcgcgtcaccggcgtcgccaccaccgagcgtaccgaagacgccaccctgatccagacccgccaccggatcccggagacgccgctggtggaggatcagatcctgatctaccaggtgccgatcccggagccattgcgctttatcgagccgcgtgaaaccgaaacccgcaccatgcacgccctggaagagtacggcgtcatgcaggtgaaactgtatgaagatatcgcccgcttcggccatatcgccaccacctacgcctatccggtgaaggtcaatggccgctacgtgatggacccttcgccgatcccgaaattcgataacccgaaaatgcacatgatgccggcgctgcagctgttcggcgccgggcgcgaaaagcggatctacgccgtgccgccctataccccggtggagagtctcgatttcgacgaccatccctttaccgtgcaggagtgggatgagccctgcgccatctgcggctcgcgccacagctacctcgacgaagtggtgctggatgacagcggccagcggatgtttgtctgctccgataccgactattgccgccagcagagcgaggggcagaaaaaatga

SEQ ID NO: 139578 - DNA, 1095 bp, Enterobacter cloacae
atggctcaacagactccgttgtatgaacaacacacgctgtgcggcgcgcgcatggtggatttccatggctggatgatgccgctgcattacgggtcccagattgatgagcaccatgcggtgcgcggcgatgcagggatgttcgatgtgtcgcatatgaccatcgtcgatttccacggcagccggatccgcgagttcttgcgctatttgctggccaacgatgtggcgaagctcaccaccccgggcaaagcgctctacaccggcatgctgaccgcctccgccggcgtcatcgacgacctgattgtctatttcctttctgaagattatttccgcctcgttgttaactccgccacccgcgaaaaagacctcgcctggatctccgaacaagctgaaccttacggccttgaaattaccgttcgcgacgatctgtcgctgatcgcggtccagggcccccaggcgaaagcgaaggcggcgacgctgtttaccgacgctcaacgtcaggccgtggaaggcatgaagccgttcttcggcgtgcaggccggcgacctgtttatcgccaccaccggctataccggcgaagcgggttatgaaattgcgatgccgaacgagcaggcggctgatttctggcgcggtctgctggacgctggcgttaagccgtgcggtcttggcgcgcgcgacaccctgcgcctggaggctgggatgaacctgtacggccaggagatggacgaaggcgtttccccgctggcggcgaacatgggctggactatcgcctgggagcccgccgatcgtaacttcatcggccgcgaagcgctggagatgcagcgcgaaaaaggcaccgagcagctggttggcctggtgatgaccgagaaaggcgtcctgcgcggtggtctgccggtccgttttaccgatagcgacggtaatcaaaaagaaggcattatcaccagcggcaccttctcgccgacgctgggctacagcatcgcgctggctcgcgtgccggccgggattggcgacaccgcggtggtgcaaatccgtaaccgtgaaatgccggtaaaagtgactaaacctggttttgtacgcaatggcaaagccattgtgtga

SEQ ID NO: 139579 - DNA, 381 bp, Enterobacter cloacae
atggacggcgtcaaccagggcgatcacgccgtccagcagatagcgctcgcagagcacctgatgggagaaaaaggtctggataatcggccccgggtcggccatgccggtgcattcaatcaccagccggtcaaactcgatttcgccgcgatcgcgactgtcgaggagatcgagcagggcgtcttccagttcgttggagcgtgtacagcagatacagccgttggtcagggttttaatctgcgtggcgcggtcgccgatgagctgatcgtcgacggagacttcgccgaattcgttttcaatcacggcgattttgaaaccgtgctgctcattgaggatatggcgcaggagggtggtttttcctgcgccgagaaaaccggtgagtag

SEQ ID NO: 139580 - DNA, 204 bp, Enterobacter cloacae
atgtttggtaacttaggtcaggcaaaaaaatatctcggtcaggcggcaaaaatgctgattggcattccggattacgacaactacgtcacgcatatgcaaaccaaccatccggatcagccgtacatgacttatgaagaattcttccgcgaacgccagcaggcccgctacggcggcgacggcaaaggcggcgtacgctgctgttaa

SEQ ID NO: 139581 - DNA, 468 bp, Enterobacter cloacae
gtgaagagcctgtggccgctgttcgggatctctaaccagatgctggccgccgtggcgctggtgcttggcaccgtggtgctggtcaagatgcagcgcaccaaatatatctgggtcaccgttatcccggcggcatggctgctgctgtgcaccacctgggcactgggcctgaagctgttcagcagcaacccgcagatggaaggcttcttctttatggctcagcagtataaagagaagattgccgccggcggcgagctgaccgcgcagcagatcgccaacatgaaccatatcgtggtcaacaactacaccaacgccggcctgagtattctgttcctggtggtggtgtacagcatcatcttctacggcatcaaaacctggctcaatgtccgcaacaataaggtgcgtaccgacaaagagactccgtacgtgccggtaccggaaggcggcgtgaagacttcgtcacatcattaa

SEQ ID NO: 139582 - DNA, 561 bp, Enterobacter cloacae
atgagcttacccccactggattctgtccccctgatccttcgtccgcaggcgtggcttcaccgccggcattacggccaggtgctgagccccattcgctggtggggtcggatcccgtggctgttttacctggtttcgctgttcgtgggctatattgaacgccgccgctcgccgctggatccggtgctgcgctcgctggtcagcgcccgcatcgcccagctgtgccactgcgaattctgtatcgatatcaccagcatgaccctcgcggcgcggagcgggagccaggacaagctgctggcggtcgccgactggcgcagcagtacgctgttcagcgaaaaagagcgcctggcgctggcctatgccgaagccgccacccagacgccgccggcggtggatgatgccctgcgtagcgcgatggccgcgcattttgacgcccgggcgctcaccgagctgaccgccctgatcggcctgcaaaatttatcagcgcggttcaatgccgcgatggcgatcccggctcaggggttgtgccagatacccacctcttcctcgcagaataaggagtaa

SEQ ID NO: 139583 - DNA, 180 bp, Enterobacter cloacae
atgctggccaccggcgtgggccagctcccggcgactatcgtttattcctgggccgggagtctgctcaccgggggcaccttctggctggccaccgggctttcgctgctttttgccctggcggtggtcatctctatcgccaaaaatatttaccgtgaacgtcataagagatcgtcgccatga

SEQ ID NO: 139584 - DNA, 705 bp, Enterobacter cloacae
gtgaacttcgccttcggtcatgttggcgaacatgttctcaagtttagatttctgctgacgagccagtttcacttcacggaatttaccctgacgatacagagcgacttcacgcgctttcttctcgtcacgtaccacggtgacttcgtcaccggcagccggaacaccggacaggccgagaatttccactggaatggacggacccgcttccagcacttcctgacccagttcgttacgcatcgcacgaacgcgaccgtattcgaaaccacacagaacgatgtcgcccttgtgcagagtaccttcgcgaaccagaacggtagcaaccggaccacgacctttatccaggaaagattcgattaccgcgccgctcgccatacctttacgaaccgctttcagctccagaacttcagcctgaagcaggatggcgttcagcaggtcgtcgataccggtacctgcttttgcagatacagggatgaactgcgcttcaccgccccactcttccggcataacgccgtactgggacagttcgttcttcacgcgatccatatcggcttctggcttatcgattttgttgactgcaacaaccagaggcacctgcgccgctttcgcgtgctggatagcttcaatggtctgtggcatcacgccatcgtcggcagcaacaaccagaacaacgatatccgttgcctgagcaccacgagcacgcattga

SEQ ID NO: 139585 - DNA, 276 bp, Enterobacter cloacae
atgattaacggcttcggttctgccaaagagcagtggttctcctcttttatgctgcaggtggaagcgaactgctcctggcaccgcctgttcgtcgacccgctcagccgggcgatgtactcctcaaaaggcccggattttgagtacatgaaagcgcgtcgggaagagggggtcgatatccacgatgcggtgtacggcctcgcgtgtcgcaactttaaagaagaaatggctgaacttgaatcccgaataccggtgaatgacatggaggataaacagtga

SEQ ID NO: 139586 - DNA, 390 bp, Enterobacter cloacae
atgaaaaacaacaccgaacaaccggtcagtacgacctctcttacctttcgccggatacctgtcatcgttgctctcgtgcttttcgccctggcaaccagcgcgtttctctcacgcgtggttctggactactccacgccgcgggtggtggcttttgatatgaagaaaacgctcgacagctttatggacagtgtgagtcagaagcagctgacagaggcgcagtccaaagcgctctctgatcggtttaacgacgcgctggagaagagtctggcggagtatcagcagcagcatcatgtggtcattctggtttcacctgccgtggttcagggcgcgcctgatgtgacccgcaacatccagcacgacattgcccgccggatgaaaggagaacagtaa

SEQ ID NO: 139587 - DNA, 627 bp, Enterobacter cloacae
atgatacgactgaaaggctgtctgctcgccgcctgtctgttatcgccgctgactcaggcggctgatctcggtacctggggggatttatggcccgtccgggagcaggacatgctgcagctcatcacgcagcgtctgcagtcgctgcaatcctctggccagtgggaccagacgatggacgcgtttaagcagcgggttatcgagaacagtcagcgtccggcgccggtggaaggcattaagcgtgcggagaaatacgagcagcgctggtttgatcccagcatccgcctgaccgaagacctgaaggacaatgaggggcgggtgtttgcccgcaagggcgatgtggtgaacccgcttaaaaccgtaccgtttgtccagaccctgtacttcatcaatggtgacgatgccgaccagctggcctggatgaagcgtcaggtgccggaaaccctgatgagcaaaattatcctggtgcgtggcagtatcccggacacctccgcagcgctggacagccggatctatttcgaccagaacggcgtactgagcaagcgatttggcctgacggcggtcccggcgcggatcacgccggcgccctccggtgaacggctgaatattgagaccttccctgtaaaataa

SEQ ID NO: 139588 - DNA, 858 bp, Enterobacter cloacae
gtgaaagctgacaacccttttgatcttttgctccctgccgcgatggcgaaagtcgccgaagaagcaggtgtctataaagcaacgaagcatccgatgaagacgttttatctggcgatcaccgctggcgttttcatctccatcgctttcgtattctatatcaccgcgaccaccggcactgccgcgatgccttatgggattgccaaacttatcggtgggatctgtttttctctgggtctgattctgtgcgttatctgcggcgctgacctctttacctctacggtactgatcgtggtggccaaagccagcggtcgaattacctgggggcaactggcaaaaaactggctcaacgtctattttggtaacctggtgggcgcgctgctgtttgtgctgctgatgtggttatcaggcgaatatatgactgccaacggcggctgggggctaaacgttctgcagaccgccgaccacaaaatgcaccatacttttgtggaggccgtgagcctgggtatcctcgctaacctgatggtttgtctcgccgtatggatgagctattccggtcgtagcctgatggataaagcgatgatcatggtcctgccggtagcgatgttcgttgccagcggctttgagcacagcatcgccaacatgtttatgatcccgatgggtatcgtaatccgcaactttgcaagcccggaattctggaccgccatcggttcgactccggaaagtttctctcacttgaccgttatgaacttcatcactgataacctgattccggtaactatcgggaacattatcggcgggggtctgctggtcgggttgacatactgggtcatttacctgcgtggcaacgaccatcactaa

SEQ ID NO: 139589 - DNA, 414 bp, Enterobacter cloacae
gtgagttttacggtactctgtgaagatttttttcagcatcgggtccagctcgcgattatacgctttgcaggaaccttcaaccattttgataccaccgaacgggatgatcgcacgtttcagcggcgcttcggtctgcagaccaacgattttttccagacctttctcgatatagcccgcgtcgtgagaggtgatggtggaagccagggcagtgtcaaaatcaacaggcgcgtgagtgcggttttcctgttttacaccttccattacggtgtcccacagcttggtggtcgcttcagtcgcgccagccaggaaggattcgtcgccttcatatggggtgtagtttttctgaataaagtcacggacgttgacttcattctgccagtcacctttcgcaaaaccttcccaggctgtggctaa

SEQ ID NO: 139590 - DNA, 648 bp, Enterobacter cloacae
gtgtacgggatcgtgttccggcaccagacgaccgataatcgcgtggcccgcttcgtgatatgccgtggactctttctgcgcttccgtcatcaccatggagcgacgttccgcacccatcatgattttgtctttcgctttctcgaattccaccatggacacgacgcgcttgttaccgcgagcggcaaacagtgctgcttcgttgaccaggttagccagatccgcaccggagaagcctggagtaccacgcgcgatgattgccgcgtcgatatctggcgccagcggtacgcgacgcatatgcactttcagaatctgttcacgaccgcgaacatccggcagaccgaccacaacctgacggtcgaaacggcctggacgcagcagcgcagggtcaagtacgtccggacggttagttgccgcgataacaatgataccttcgttaccttcgaagccgtccatctcaaccagcatctggttcagggtctgctcacgttcatcgtgaccaccacccaggcctgcgccacgctggcggcctacggcgtcgatttcatcgataaagatgatgcacggtgctgccttcttagcctgctcgaacatgtcacgcacacgagatgcgccgacacccacgaacatttcaacgaagtcagaacctga

SEQ ID NO: 139591 - DNA, 1479 bp, Enterobacter cloacae
atgatttcggtcaaactggtttctgagccgggcgttggcaccatcgccaccggcgtggccaaagcctatgccgacctgatcaccatcgccggctacgacggcggcaccggggcgagcccgctctcttcggtgaaatatgccggctgtccgtgggagctcggcctggtggaaacccagcaggcgctggtcgctaacggtctgcgtcataagatccgtctgcaggtggatggcggtctgaaaaccggcctcgatatcatcaaagcggcgatcctcggcgcggagagcttcggtttcggtaccggcccgatggtcgcgctgggctgtaaatacctgcgtatttgccacctgaacaactgcgctaccggcgtggcgacccaggatgacaaactgcgtaagaatcactatcacggtctgccgttcaaagtgaccaactactttgaatttatcgcccgtgagacccgcgagctgatggcccagctgggcgtcaagcgtctggtggatctgattggccgcaccgatctgctcaaagagctggatgggttcaccgccaagcagcagaaactggatctgggtaaactgctggagaccgcagagccgcatccgggcaaagcgctgtactgcaccgagaacaacccaccgttcgataacggcgtgctcaacgcccagctgctgcagcaggcgaaaccgtacgtggatgaaaagcagagcaagacgttctggtttgatatccgtaacaccgaccgctccgtgggggcctcgctgtccgggtatatcgcccagacccatggcgaccagggactggcgggcgacccgatcgtcgctcactttagcggcaccgcgggccagagcttcggcgtgtggaacgccggcggcgtggaactgcatctgactggcgacgccaacgactacgtcgggaaaggcatggcgggcggtctgctggccattcgtccgccggtgggctctgcgttccgcagccatgaagccagtattatcggcaacacctgcctgtacggcgcgaccggtggtcgtctgtacgccgcaggccgcgcgggcgagcgtttcgccgtgcgtaactccggcgccatcaccgtggtggaaggcatcggcgacaacggctgcgaatatatgaccggcggcatcgtctgcgtgctcggaaaaaccggcgtcaactttggcgcagggatgaccggcggctttgcctatgtcctggatgaagatggcgacttccgcaaacgcgtgaacccggagctggtggaagtgctggacgttgattctctggccatccatgaagagcacctgcgcggtttaatcaccgagcacgtacagcttaccggttcgcaacgcggcgaagagatcctcgccaactggccggccttctccgcgaagtttgcgctggttaaaccaaagtccagcgatgttaaagcactgttgggtcaccgtagtcgttccgcagctgagctgcgggtgcaggcgcagtaa

SEQ ID NO: 139592 - DNA, 1239 bp, Enterobacter cloacae
atgctcgccattctgacgggtaacgtcgggatcaacggcggcaatagcggggcgcgcgagggctcgtatagtttgccttttgagcgtatgccgacgctggagaatccggttgagaccagtatctcgatgtttatgtggaccgatgcgattgagcgcggctcggaaatgaccgctctgcgcgacggcgtacgcggtaaagataagctcgacgtgccgatcaaaatgatctggaactatgcgggcaactgtctgattaaccagcattctgagatcaaccggacccacgaaatcctgcaggacgacaagaaatgcgagatgattgtggtcattgactgccatatgacctcctcggcgaaatacgctgatattctgctgccggactgtaccgcctccgagcagatggatttcgcgctggatgcctcctgcggcaacatgtcctacgttatctttgccgatcaggccatcaagccgcgctttgaatgcaaaaccatctatgagatgaccagcgaactggcaaagcgtctgggcgtcgaagagcagtttaccgggggccgtacccaggaaggctggatgcgctatctgtatgagcagtcgcgcaaagcgattcccgacctgccggatttcgacaccttccgtcagcagggcatctataagcagcgcgatccgcaaggtcatcatgtggcctacaaagccttccgtgaggatccgcaggctaatccgctgaccacgccttcgggcaagatcgaaatttactcgcaggatctggcgaaaatcgcggctacctgggagctgccggaaggggatgttatcgatccgctgccgatctacaccccgggtttcgaaaactacaacgatccgctgacagcgaaatacccgctacagctcaccggcttccactataaatctcgcgtccactcgacctacggcaacgtcgatgtgctaaaggccgcctgtcggcaggagatgtggattaacccgatcgacgcccgcaagcgcggcattgccaacggcgatcgtattcgcatcttcaacgatcggggtgaagtgcatatcgaagcgaaggtgacgccgcgcatgatgccgggcgtcgtcgcgctgggggaaggggcctggtacaacccggacgcctcgcgtgtggatcaggcgggcagcatcaacgtgctgaccacccagcgtccgtcgccgctggcgaagggaaacccgtcgcataccaaccttgttcaggttgagaagctgtaa

SEQ ID NO: 139593 - DNA, 960 bp, Enterobacter cloacae
  misc_feature (787)..(796): n is a, c, g, or t
gtggcaggcaatccctttcttctcgcaccagaggttaatgcgaatcccctgctgagcgattcgtggtctcgctgccagcgctacgggctggatcccgccaccgaggattttccccgcctcggcgccggcgagctggcggaccggctcgccagccaccgcggcctgcagcagctggcgcagccggtggtggaagccctgtcgcgccaggtcgcagacctgcagtcggtggtgatcctttccgaccccgacggcctggtgctgcatactctcggcgatacccaggcgctgcaaaaggcccagcgcgtggcgctggctcccggcaatctgtggagtgaaagcgggcgcgggaccaacgccatcggcaccgcgctggcgattgacgatggctgcgagatcgatggccgtcagcactttcttacccgcaaccagaatctgtactgcgcagcgatgccgctccagcgaccggacggaagcatcgccggggtgctggatatctccggcccggcgaattttccccaccagcacacctttggctgggtaaaagcggcggcaaagcaaattgaatatctgtgggtgaaacagagtctgcatcctgagcagtggctgatgagcctgcaccggcaggtggacaaactcgacagcgtcgaggagctgctgctggtcttttccgacaacgtcctcaccgccggcaaccggctggcgatgcgcgagttcggcctgagcgcagcgcagtttggccagctcacctttgcctcgctttttccgacgctgacgcaaacggcggtcnnnnnnnnnnccgctgaccacgccgcagggccgctaccactatcgcctgcgggagcccacccgccgccgggtggcggtaagcgccccgccggccatgcatctcccctttaccagtccgcgcgaaggcgaaaagctgctgcggctgctcaacgccggcatcgccctgtgcattga

SEQ ID NO: 139594 - DNA, 1014 bp, Enterobacter cloacae
atgataatgacagttttacgtcagcagccgcgcgccgcgggtctggtgctggggttgatcgcggcgaatttactggcctggtgctgggcgctgcaggcctttggcgacagcggcgcgctgatggccgccagcctgctggcctggggctacggcctgcgccacgcggtggacgccgaccatattgcggcgattgataacgtgacccgcaagatgatgcagcaggggcggcggcctttcgccgtcggggcgtggttttcgctgggccactcatcgattgtggtgctggcctcggcggcgattgccgcgaccgccaccgccttcagcacgcagatgagctggctgcatgataccggcagcgttatcggcaccgccgtgtcggccctgtttttactggcgatggcctttatcaacctggtgattttacgcagcgtgtggcgcagctttcgggcatggaagcgcggtgaaaaggtcagcgacgaaatcgtcagcggcggcggcatgatgagctggctgtttggcaagaccttccgtctgataagccgcagctggcagatgtacctggtcggtttcctgtttggcctcggttttgataccgccaccgaaatcggcgtactgggtatctccgccgccggcgcgtcgagcgggatttccgtctggtcgattatggtcttcccggcgctgttcgccagtggtatggcgctggtggataccctcgataacgtgctgatggtcggcgcctacggctgggcgttcagcaaaccgcagcgcaagctttattacaacatgaccatcaccggcacctcggtggtggtggcgctgtttatcggcggcctggaagcgctgggcctgctgatggataagtttgcgctcagcggcggaatatggcgctgggtaggggcgttaaacgacaacctcggcgacgccggatttgtggtggtcgggttgtttgtcgcctgttgggcgctatcggtgcttaactatcgctggcgcggctacgacaatctggcgcgctag

SEQ ID NO: 139595 - DNA, 258 bp, Enterobacter cloacae
atgtgcctgagtaaaaatctgctggcgcaggcgggagaactcaagctgccgccaatgctggtgaaggtgaaaaccccggatctgccgctgcatctggccggcgacacccgccgcgacgatctgacgtggaatatcgtggccgccaaagaggggctggtggcgaaaggcgtggatgccgaaaaccagctgcgggcctttgtggtgagtgaagacaaaatgaaggaagcctttgcgctgctcaaacaactggtaagttga

SEQ ID NO: 139596 - DNA, 495 bp, Enterobacter cloacae
atgatcgctctgccggttatggcaatcgcggcatgttcttctaacaagaacgccagcaacgaccagagcggtgaaggcatgctgggtgccggcactggtatggacgctaacggtaacggcggcaacatgtcttctgaagagcaagctcgtctgcagatgcagcagctgcagcagaacaacatcgtttacttcgatctcgacaagtacgatatccgttctgacttcgctgctatgctggacgcgcacgctaacttcctgcgcagcaacccgtcctacaaagtgactgtagaaggtcacgcggatgagcgcggtacgccggaatacaacatcgctctgggtgagcgtcgtgctaacgccgttaagatgtatctgcagggcaaaggtgtttctgccgatcagatctccatcgtttcttacggtaaagaaaaaccagcagtactgggtcatgacgaagcggcatatgccaaaaaccgtcgcgccgtactggtttactaa

SEQ ID NO: 139597 - DNA, 795 bp, Enterobacter cloacae
atgagcagtaacttcagacatcatttattgagtctgtcgttactggttggcatagcggccccctgggccgcttttgctcaggcgccaatcagtagtgtcggctcaggctcggtcgaagaccgcgtcactcaactcgagcgtatttccaatgctcacagccagcttttaacccaactccagcaacaactctctgataaccagactgacattgattctctccgcgggcagatccaggagaaccagtaccagctgaatcagatcgttgagcgccagaaacagattctgctgcagatagatagtttgagcagcggtggcggcgctgcatcaggtgcgcaggctccgtcgtcttctggcgatcagagcgcggctgccaccagcgcagcgccagcggccacctcaggcgccccggcgatgaccggcgatgcgaacaccgattataatgccgctattgccctggtgaaggatgcctcacgccaggatgacgcgatggtggcgtttcaaaacttcgtcaaaaagtacccggattcaacctaccagccaaacgctaactactggctcgggcagttgaactacaataaggggagaaaagacgacgcggcgttttacttcgcttcggtggtgaagaactacccgaaatcgccaaaagcgcctgacgcgatgtttaaagtcggcgtgatcatgcaggacaaaggtgataccgcgaaagcgaaagcggtttaccagcaggtgatcaataaattccccggcaccgacggtgcgaaacaagcgcaaaaacgacttaatgctcttggttga

SEQ ID NO: 139598 - DNA, 1338 bp, Enterobacter cloacae
atgctctccgcagccatggataccgtaacggaagcgcgtctggctattgccctggcacaggaaggcggcatcggctttattcacaaaaacatgtccatcgagcgccaggcggaagaagttcgtcgcgtgaagaaacatgagtccggcgtggtcaccgacccgcagactgttctgccgacgaccactctgcgtgaagtgaaagagctgaccgagcgcaacggtttcgccggctacccggtggttaccgaagaaaacgagctggttggcatcatcaccggccgcgacgtgcgtttcgtcaccgatctgaaccagccggtcagcgtctacatgacgccgaaagagcgtctggtcaccgttcgtgaaggcgaaagccgtgaagtggtcttcgctaagatgcacgaaaaacgcgttgagaaagcgctggtcgtggatgagagcttccacctgcgcggcatgatcaccgtcaaagacttccagaaagcagaacgtaaaccgaacgcctgtaaagatgagcagggccgtctgcgcgtaggcgcggcggtcggcgccggtgccggcaacgaagagcgcgtagacgcgttggtagcggcaggcgttgacgttctgctgatcgactcctcgcacggtcactcagaaggcgttctgcagcgtatccgtgaaacgcgcgcgaaatatcctgacctgcagatcatcggcggcaacgtcgccactggcgcaggcgcacgcgcgctggcggaagccggctgcagcgcggtgaaagtgggcatcggcccgggctccatctgtactacccgtatcgtcaccggcgtgggtgtgccgcagatcaccgctgtttccgacgcggtggaagcgctggaagggaccggtattccggttatcgctgacggcggtatccgtttctccggcgatatcgccaaagcgatcgccgccggtgcggcggcggtgatggttggctccatgctggcgggtaccgaagagtccccgggtgaaatcgaactctatcagggtcgctcttacaaatcctaccgcgggatgggctcccttggcgcgatgtccaaaggatcctctgatcgctatttccagagcgataacgccgctgacaaactggtgccggaaggtatcgaaggccgcgtggcctataaaggccgcctgaaagagatcattcaccagcagatgggcggtctgcgttcctgtatgggtctgaccggctgtggtaccattgacctgctgcgtaccaaagctgaattcgtacgcatcagcggtgcgggcattcaggaaagccacgttcacgacgtgaccatcaccaaagagtccccgaactaccgtctgggctcctga

SEQ ID NO: 139599 - DNA, 804 bp, Enterobacter cloacae
atgctcgataaacagacccataccctgattgcccagcggctgaaccaggccgaaaaacagcgtgaacagatccgcgcgatctcgctggattatccgtcgatcaccattgaagacgcctacgccgtccagcgcgagtgggtcgagatgaagatcgccgaaggccgcgtgctcaaaggccacaagatcggcctgacctctaaagcgatgcaggccagttcgcagatcagcgagccggactacggcgcgctgctcgacgatatgttctttcacgacggcagcgatattcccaccgaccgctttatcgtgccgcgtattgaagtcgagctggccttcgtgctggccaaaccgctgcgcggcccgaactgtacgctgtttgatgtctacaacgccaccgactacgttatcccggcgctggagcttatcgacgcgcgctgccacaacatcgacccggaaacccagcgtccgcgcaaagtgttcgacaccatctccgacaacgccgccaacgccggggtgatccttggcggccggccgattaaaccggacgagctcgacctgcgctggatctccgccctgctgtatcgcaacggcgtaattgaagagaccggcgtcgccgcgggcgtactcaatcatccggccaacggcgtggcctggctggccaacaagctggcgccgtacgatgtccagctcgaagctgggcagattatcctcggcggctccttcacccgcccggtcccggcgcgcaagggcgataccttccacgtcgactacggcaacatgggcgccatcagctgccggtttgtctag

SEQ ID NO: 139600 - DNA, 228 bp, Enterobacter cloacae
atggccgacggcaggcaggattacgccttcgtgcatatgaccctgaagatcggcgccgggcgcagcctggagagccgtcaggacgtgggagatatgctgttcgcgctgatcaaatcccacttcgcgacgctaatggagagccgctatctggcgctgtcgttcgccatggaagagctcgacccgacgctgaactacaaacaaaacaacgtgcacgcgttatttaaataa

SEQ ID NO: 139601 - DNA, 789 bp, Enterobacter cloacae
atgggttttctttccggtaagcgcattttgatcactggcgtcgccagcaaactgtccatcgcctacggcatcgcgcaggcaatgcaccgcgaaggcgcggaactggcattcacctatcagaatgagaaactgaaaggtcgcgtagaagagtttgctgccgcgctgggttctgacattgtgctgccgtgcgacgttgctgaagatgagagcatcaccgcgctgttcaccgagctggaaaaagtctggccaaaattcgatggtttcgtccactcaatcggttttgccccggctgaccagttagacggcgactacgttgacgttgtcactcgcgacggctttaaaatcgcgcacgacatcagcgcttacagcttcgtggcaatggccaaagcctgccgcggcatgctgaacccgggttcggctctgctgacgctctcctacctgggcgcagagcgcgcgatcccgaactataacgtgatgggtctggccaaagcctctctggaagctaacgtccgctatatggctaacgccatgggtccggaaggcgttcgcgtcaatgccatctctgccggtcctatccgtacgctggccgcgtccggtattaaagatttccgtaaaatgctggcgcactgcgaagcggtcaccccgatccgtcgcaccgtcaccattgaagatgtgggtaacagcgcagccttcctgtgctccaacctgtctgcggggatctccggtgaagtcgttcacgttgacggcgggttcaatatcgccgccatgaacgagctggaactgaaataa

SEQ ID NO: 139602 - DNA, 303 bp, Enterobacter cloacae
atgcccggcgcgaagttcatcctgatttacgccgtacaccaccgtcgcgtcgaggtcgttgccgccggggtgggaaaagagcacttttttcgcccccgcctgaagatgggcttcaccgtgttcacggctcccgtatacgccggtacagtcaagcacgacgtccaccgccagttcgcgccagggcagcgccgcaatggtcggctcatgcagcagacggatggcatcgtcgccaacaaacagctgctcgcgctcctgacggacatcccaggcgaaacggccatggctggtgtcatatttcaataa

SEQ ID NO: 139603 - DNA, 1407 bp, Enterobacter cloacae
atgtccaagcaacagatcggggttgtcggtatggcagtgatggggcgtaaccttgcgctgaacatcgaaagccgtggttataccgtctccgttttcaaccgctcccgtgaaaagaccgaagaagttattgccgaaaatccaggcaagaagctggttccttactatacagtacaagagttcgttgaatccctcgaaacaccacgtcgtatcctgttgatggtgaaggcaggggctggtacagatagcgccatcgactccctgaagccttacctcgataaaggcgacatcatcattgatggcggcaacaccttcttccaggacaccatccgtcgtaaccgtgagctgtctgccgaaggttttaactttatcggtaccggtgtttctggtggtgaagagggggctctgaaagggccttccatcatgcctggtgggcagaaagaagcctatgagttagttgctccgattctgaagcagattgctgcggttgctgaagacggtgagccatgtgtcacctatatcggtgctgacggtgctggccattatgtgaagatggttcataacggcatcgagtatggtgacatgcagctgattgctgaagcttatgcgcttttgaaaggcggtctggcactttccaacgaagagctggcgcaaaccttcaccgaatggaacgaaggtgagctaagcagctacctgatcgacattaccaaagatatcttcaccaagaaggatgaagaaggtaagtacctcgttgatgtcattcttgatgaagcagcaaacaaaggtaccggtaagtggaccagccagagctcactggatctcggcgaacctctgtctctgataaccgagtccgtatttgctcgctatatttcttcgcttaaagaccagcgtgtagccgcgtcgaaagtgctgagtggtccgcaggcccagccggccggtgataaagctggatttatcgaaaaagtgcgtcgcgcgttgtacctcggtaaaatcgtctcctatgctcagggcttctcccagctgcgtgctgcttctgatgaatacaactgggatcttaactacggcgagatcgctaagattttccgcgctggctgcatcattcgtgcgcagttcctgcaaaagatcaccgatgcttatgcgcaaaacgctggcattgctaacctcctgctggcaccatacttcaaacagatcgctgatgactatcagcaagcgctgcgtgatgtggtggcttatgccgtgcagaatggtattccggtaccgacgttctctgccgcaatagcttactacgatagttatcgttccgcagttctgccagctaacctgatccaggctcagcgtgattactttggtgcgcatacctataaacgtaccgataaagaaggtgtattccataccgagtggctggaataa

SEQ ID NO: 139604 - DNA, 219 bp, Enterobacter cloacae
atgcatgcctttatttttctggtgctgatgacgccgagtagtggcggtgggatttgggatattactcccatgcctaatacagatgtctgcataaaaatgctacgggtactcgaagcacgtgggggcagaggttacggaagtaatacaggagagtgcattgaaattaaaacacgcgagcctttgaacagcgtgatggaaacattgagtgagggtgggtaa

SEQ ID NO: 139605 - DNA, 585 bp, Enterobacter cloacae
atgaaggaattaatgctgttaattcctctgggcagcgctttgctcttaaccgggtgcgcgggcacagagactgaatttcaatgtaatgccacgacgtcggatacctgtatgacgatggagcaggcaaatgaaaaagcgaagctgaaagaggaacgcagtgatgcaaagccggctgcggccgggttgccacaactggctgagggtaatttcagaaccacgtcagttaattcgtacccgttgccgcctcaacccaacctgaaccgggccagagtggcagcggagagagaacgagcacgtgcagtgtacctaaataatccaacggcaaagaatgaggcaatatattccgaaaccgggaaaaggctccagtctttgccggtagtgaaaatgtctttaccagtagtggcgtcaacgtttacgtcaccgtcaacaccgccaggtaattatccccggccattaagaaaaggggaggagacaacgtcattgtggatagcgccgtatgtggattcagatgatgtatatcaccagccggcaacggttctttttgtcgtaaaaccatcggcgtggggacaacctcgccttaattga

SEQ ID NO: 139606 - DNA, 474 bp, Enterobacter cloacae
atgagatcccatttcgagtaccagaaccggaaacgccagcaacaaccccagccagaagcgtcttgtcatgtcgtgaagttcatcactcggccccgtggatgccgtagctacgagcggctccagtgccattccacagacaggacagcttccgggaccactgcggcgtatctccgggtgcatcggacatgtccacacaccttcagaattctctttttccgcctggttgtgaggctgttttatctgatcagggctgacttcgtgatgatcgtggtgatggtgatgggaatgttcactggcatcttcggtaagataacgatcgggatgggctttaaatttactctcacagctggcggagcagaaataaagttggtggtcctggtatcgaatgctgctgtgcgccctgtcgggcaggatggccatcccgcacacgggatctctcaccttatgcaatacgtggccctcgtccggggataa

SEQ ID NO: 139607 - DNA, 1107 bp, Enterobacter cloacae
gtggctaaaaaatatactttaaaggatgtgattgaacagtatgaaaagaatgtgactattcacaaaaaaggatggcaacaagagcactatcgagcaaatattattcggcgtcatagaatcgcatcgttggatataaagaaaataaaaagtagtgatgttgaaaattacaagaatgaaagagtaaagggcggattgtcaggcaatactgtaaggatagaactttcattcctatcctctgtttttaagtacgcaattaatattctctctatttgtgatagaaatcctgtttcaaatatacaaaagccgaaagtctcaaagggaagagatcgacgtctggatgtcaaagaggaaaaatcaatcagcgcatattacttaaaaaataatattgagatgtattatatttttattctcgcgctagaaacggcaatgaggcaaggtgaaatattaggtttacgctgggaaaatatggatttgagaaaaggtgttgcatttttaccagagactaaaaatggaagtgaaagatatgttcctttatcaaaaaaagctaggttaattctatctgaaattccgcgagcatttgaaggtaagatatttagttatacttcaaattcgtttaagtcaagatggaggaatgatattgcgaacttaggtataaaggatctacattttcatgatttacgacatgaagctataagtagatttttcgagcttggtactctaaatgttatggaggttgccgcaatatcgggacataaatcattggcaagtttaaaacgatatacacatttgaaagcgcataaccttgtaaaaaaattagacgtacaaaagcgtaaagtcagtacacctgaaatttatttctcagcgttcccagcgaaagtcatagtgcattcgagtcatgttgagttgcatttattagattttgatgagatcaaagtatcagcgcagacaagagaagatgcatatagtcaggcatcttcaaaactgcttcataagcttgcatgttgttttcactacgggttagagcatccatcaccaacaagaacgcggagcgatgaaaatggtgagcatgaaattataatgataaatccgcttgttgttagtttgtga

SEQ ID NO: 139608 - DNA, 636 bp, Enterobacter cloacae
atgatggcaggcagcattattgttgtgctgagtttgctgggatttctggtgctgcttctgaaaggacgcgcagtaacgaagacttccccggttctgaggtcactgaaagccctgggtattcgcccctcagaggctgagcaacggttgtgtcgccagcgggtctgggtgggtaatgacacactgatgacgccacgggaacaacattttttccgggcattgctgaggcataccagccgaacacgctggctgttgtgtcctcaggtccgggtggcagatattgccacactctctccccatatccggccacgatcccggacctggtggcaactcttccggatggcatcacagtggcactgcgatgtggtcatcgttgacatccataccttcgctatcatctgcgcagttgaactggatgatgcctcacaccagaaaaaacaccgtatccggcgcgatattctgctggaagaggttctgaggcaggccggcattccactactacgcgatcgggattcggagagtctggtaagaaaggtcggagagtttctgaaataccgggaagccggtgctgaagaaaaatccataaccgttatgaaatcaacgacaaagcatagcgaacacaaggagaaagaaaaatga

SEQ ID NO: 139609 - DNA, 309 bp, Enterobacter cloacae
atgattatcgccgctgaagtgaaacgtgatgaacaggggtactggacacatcctgcgctggtacgaagtggctgtgaaacttccgcagaattaagttactggctcagaacccataaactccagtgctttgtgataacaatgcgcgatgaagcgcctgaagctttcgctgccggatttacggatgaagccccggatgcccgtggctggataccggagccaccggatgatgatggctggtttctgggatctgtccacgataccggcgacggacccgtctgctactggtttcgtcataccacaaaatcctga

SEQ ID NO: 139610 - DNA, 276 bp, Enterobacter cloacae
gtgaaaaaaatgaaccgtacgctccgcagatgttgtctgtccgggcttatcagcctgtctttgtttgcaccagttccggccgtgtatgccgccagcatcgagacggggtattcgccggaaggaacggctctgcagctggtcctgaagactattaattctgcacagcaggaaatccggctgatgggctattccttcacctcacccgaagtcgccggcgcgcttgtcagggcaaaacagcgtggtctcgatgtgaaagtggttctggacggggtctga

SEQ ID NO: 139611 - DNA, 810 bp, Enterobacter cloacae
atgaatggttctttacgcgcgcaatgtatcgccgagtttttaggcaccgggctgtttctgttttttggtatctgctgcctgagcgccctgaaactgaccggcgccagcctggggctgtgggagatctgtattatctggggactgggtatttctctggcggtgtacctgacggccggcatttcggggggacatctgaaccctgcggtcaccgtcgccctgtggctgtttgcctgcttcccgggcagaaaagtggtgccctatatcgtggctcaggtcgccggcgcgtttggcggcgccgtgctggcctggatactttacagcaccctgtttacgcaatttgaaacggtgcatcatatggtgcgcggcagcctggaaagcctgcagctggccagtatattcagcacctacccggcgcctgagctcagcatctggcatgcggcgctggtggaggtggtgatcacctcgatgctgatggggatgatcatggcgctcaccgatgatggcaacggcgtacccaagggcccactggcgccgctgttgattggcattctggtggcggtgatcggcgcctcgaccgggccgcttaccggcttcgcgatgaatccggcacgcgattttggcccgaaattgttcacctggttcgccgggtggggcaatatcgccatgaccgggggaagagatattccctattttatcgtgcccattatcgcaccgttgttaggggcctgcctcggcgccgcaatttatcgttttcttatcgccaataatctgccctgtcatacctgcgtggaggaagaaaatacgcgttag

SEQ ID NO: 139612 - DNA, 522 bp, Enterobacter cloacae
gtgacgcaatgttcatcgatcattgcggggtcaactatgctcgccgccctccccttcttgctgtgctatagcggtttgaccgtggcattatgccaccaggatctgcgccacggtctgttgcccgaccgttacacctgtcccctgctgtggagtggtttacttttttatctctgtctggcgccgcaccagctgcatgatgccgtctggggggcgatagcgggctatctctctttggctgcgatttactggctataccgcggtatccgcggctatgaaggattgggttatggagatataaaatatcttgccgccctcggcgcctggcatggctggcggttactgccgcagttggtcctggttgcctcgctactcgccggcatagcgtgggcaggagcaggtttatacgccagttgcggcgggaggagcaaatggagaagaagcaacccgctgccgtttgggccattcctggcggccgcgggtttttggtgcgggtggcagacgctggctaatctgacactttga

SEQ ID NO: 139613 - DNA, 387 bp, Enterobacter cloacae
atgtttaaaaattggggcctgatgcgcctcaacgatattgagtaccacgaatccatcgacgaaatgaagcacgccgataagtatatcgagcgtattctttttctcgaaggtatccctaatctgcaggatctcggcaaacttggcatcggtgaagatgtggaagagatgctgcggtccgatttgaggctggagctggaaggggcgcaaaatttgcgtgaggctattgcctatgccgacagcgtccatgactacgtcagccgcgatatgatgattgagatcctggcggatgaagaaggccatatcgactggctggaaaccgaactcgatttgattggcaaaatcggtctgcaaaattacctgcagtcgcagatcaaagtgtcagattag

SEQ ID NO: 139614 - DNA, 1140 bp, Enterobacter cloacae
gtgaaccaggccatcgatgccgccgtccaggccgatgaagataccgaagtcagtgatagacttgattttaccttcaacacggtcgcccttgttgtgggtttccgcgaactgctgccatgggttgtttttgcactgcttcaggcccagggagatacgacgacgttcttcgtcgatatccagaaccatcacttccactacatcaccaacgttaacaactttggatgggtggatgtttttgttggtccagtccatttcggaaacgtgcaccagaccttcaacgccttcttcgatttcaacgaagcagccgtagtcagtcaggttggtaacgcgaccagtcagtttagtaccttctgggtaacgcttagcgatagctacccatggatcttcgcccagctgtttcaggccgagggatacacgagtacgctcgcggtcgaacttcagcactttaacagtgatttcgtcgcccacgttcacgatttcgcttgggtgcttaacgcgtttccacgccatgtcggtgatgtgcagcagaccatcaacgccgcccaggtcaacgaatgcgccgtagtcagtgaggttcttaacgatacctttgacttccatgccttcctgcaggttttccagcagctgatcgcgttctgcgctgttttcggattcgataacggcacgacgggaaacaacaacgttgttacgcttctggtccagcttgattactttgaactcaagctctttgccttcgaggtgcagggtgtcacggactggacgaacgtctaccagagaacctggcaggaacgcacgaataccattcagctcaacagtgaagccacctttaactttgccgttgataacaccgaccacagtttcagcttcttcgtaagctttttccagcgtgatccatgcttcgtgacgtttagctttctcacgagacagcagggtttcgccgaagccgtcttctactgcgtccagagcaacgtcaacttcgtcacctacctggatttccagctcgccctgggcgtttttgaactgctcagccgggatggcagactcagatttcagaccggcgtcaaccagtacaacgtctttgtcgatagcaacaacaacgccacgaacgatggaacccggacgggtttcgatttcttttaa

SEQ ID NO: 139615 - DNA, 1209 bp, Enterobacter cloacae
atgtgcgaactcgatattttacacgactctctttaccaattctgccccgaattacacttaaaacgactcaacagcttaacgttggcttgccacgcattacttgactgtaaaactctcactcttaccgaacttggccgtaacctgccaaccaaagcgagaacaaaacataacatcaaacgaatcgaccgattgttaggtaatcgtcacctccacaaagagcgactcgctgtataccgttggcatgctagctttatctgttcgggcaatacgatgcccattgtacttgttgactggtctgatattcgtgagcaaaaacgacttatggtattgcgagcttcagtcgcactacacggtcgttctgttactctttatgagaaagcgttcccgctttcagagcaatgttcaaagaaagctcatgaccaatttctagccgaccttgcgagcattctaccgagtaacaccacaccgctcattgtcagtgatgctggctttaaagtgccatggtataaatccgttgagaagctgggttggtactggttaagtcgagtaagaggaaaagtacaatatgcagacctaggagcggaaaactggaaacctatcagcaacttacatgatatgtcatctagtcactcaaagactttaggctataagaggctgactaaaagcaatccaatctcatgccaaattctattgtataaatctcgctctaaaggccgaaaaaatcagcgctcgacacggactcattgtcaccacccgtcacctaaaatctactcagcgtcggcaaaggagccatgggttctagcaactaacttacctgttgaaattcgaacacccaaacaacttgttaatatctattcgaagcgaatgcagattgaagaaaccttccgagacttgaaaagtcctgcctacggactaggcctacgccatagccgaacgagcagctcagagcgttttgatatcatgctgctaatcgccctgatgcttcaactaacatgttggcttgcgggcgttcatgctcagaaacaaggttgggacaagcacttccaggctaacacagtcagaaatcgaaacgtactctcaacagttcgcttaggcatggaagttttgcggcattctggctacacaataacaagggaagacttactcgtggctgcaaccctactagctcaaaatttattcacacatggttacgctttggggaaattatga

SEQ ID NO: 139616 - DNA, 561 bp, Enterobacter cloacae
atggaggcgaccgccgccagccggctgccgccgctgcttacccgcttccaacagcagtgcccacaggtggatatcaccctcatcacccaaccgacccgccagttaaccgagggggtgttaaccgccgcccttgatgccgcgctggtctgcctgccgccaggggccgatgggcaacctgcctgtcccgccgaactggcattcaccccggtgttttatgaaaccctgatgctggtccgtccgcagaccccgggtccgctgcggttcgcggcatttgccagcggctgcagctaccgcgcgctgggagaacgctggctggcggaacagcaggcggccgtcgaggtgcatgaggtcaattcctatcacagcatgcttgcctgcgtggcgtccgggcgctacgcctgcctgctgccgcagagcgtgctgtcgctgatgacgcttcccgaaaactgccttagcgaaccgctgtgcgaggcgaccacccagcttatctggcgcagcggcttgagcgcccccgccctgagcgagtggcgcaagctgctgcaaagcgtggcgattggctaa

SEQ ID NO: 139617 - DNA, 513 bp, Enterobacter cloacae
atggtttacggtctggcgggcttcggctatatcatcaccgccacttatctgccgttgtttctgtccggttcgctgcagagcgttgacccggtccatctgtgggcgctgtttggtctggcggccgcgccgtcctgcctcatctggcataagctggtgctaaagtggggataccggcaagcgctgacccgcaacctgctcgtccaggcgcttggcgtgatccttccagcctgcagcgcttcattgctgttttgcgtgctaagcgcgcttttggtgggctttacctttatgggcaccgtaaccattgcgctaccgaaggcgaaaagtctcagccatcaggtgagcttcaatatgattgccgcgatgactgcactgtacggtgtgggacagattgccgggccgcttatcgccggcgcgctgtatcagatcgcggcttcatttaacccggcgctctatgccgcggcgctggcgctgctgattgccgcagggctggtctttaccgaacgccaggcttag

SEQ ID NO: 139618 - DNA, 585 bp, Enterobacter cloacae
atgaccttacaacccgcttttaccctggctgtgcaggatgcccaacacagttttcgtcgcctgctgaaagcgatgagcgagccgggggtgattgtctccctgcagcagcttcagcacggctggcagccattgaacgtggcctccaccagcctgctgttgacccttgccgatcatgaaacaccggtctggctcgccagcgctctgcgtaacgatctggtgggacagaatctgcgctttcataccggcgcgccgctggtggaccagccgcagcaggcggtttttgccgtcgccaatgacggcatcagcgccgagcagctcaacgtcctttccgctggcaccgtcaccgcgccggaaaccggcgtcacactgatcgttcagcttgccagcctcagcggcggacgcatgctgcgcctgaccggggcaggcattgccgaagagcgaatgatcgcgccgcagctgccggactgcatcatcgacgaattaaccgaacgcccgcacccgttcccgctgggcatcgacctgatcctcacctgcggcgagcgcctgctggcgatcccgcgcaccacccacgtggaggtgtgctaa

SEQ ID NO: 139619 - DNA, 453 bp, Enterobacter cloacae
atgcacttcgataccgccacccgccagcgctggatgtccgtgctggcccacagtgaaccgcaggaccttctggcgcgcatggagtccctgcagctggcgccggaatatgaattgattcgcaccccggaaaccgggctggtacagctccaggcccgcatgggcggtatcggcgaccgcttctttgccggcgacgccacccttacccgcgcagcggtacgcctggctgacggtaccctcggttacagctggatcttaggccgcgaccgcccgcacgctgaacgctgcgcggcgatcgacgccctgctgcagtcgccccgccattttcacaccttaatggaaaccctgataaccccgctggaagcgctacgcagcgcgcgcattgaagcccgacgcgccgaagtcaacgccagccgggtcgacttctttaccctggttcgcggagataacgtatga

SEQ ID NO: 139620 - DNA, 912 bp, Enterobacter cloacae
gtgcgattgcttaactggagaaggcaggcggcgctgaacgccatgccgggcatcagacccggcgagatccataccccctggcatgagttctggcggcgctttcgtcgccagccggtggcgatgggcgctggtattttcgtgctgttgctgattgcggtagccatcgttgccccatggatagcgccgtacgatgcggaaaattatttcgactacgaccgtctgaacgagggaccttcgctggtgcactggttcggagtcgactccctgggacgggatattttcagccgggtgctggtcggggcgcagatctcgctggccgccggggtactggcggtgctgattggcgcggccatcggcacggtgcttgggctgctggctggctactatgagggctggtgggaccggctcattatgcgactttgcgacgtgttgttcgcctttccggggatcctgctggcgatcgcggtggtcgccgtcatgggcagcgggatggccaacgtgatcatcgccgtggcgatcttctcgatcccggcgtttgctcgtctggtgcgcggcaatacgctggttctgaagcagcagacctttattgaatcggcgcgcagcatcggcgccagcgacgccaccattctgttcaaccatattctgccggggacggtgtcatcgatcgtggtttatttcaccatgcgcattggggtatcgattatttcggcggccagtctgtcgtttctcggcctcggcgcgcagccgcccaccccggagtggggcgcgatgctcaacgaagcgcgggcggatatggtgatgtctccgcacgtggcgctctttccggcggtggcgatttttgtgaccgtgctggcgtttaatctgctgggagatggcctgcgcgatgcgctggatccgaagttaaaggggtag

SEQ ID NO: 139621 - DNA, 141 bp, Enterobacter cloacae
atgattgccgacgggatgcaggtgattttcgaccagtggtggatcgccgccatccccggcgcggcgatcctgcttgccagcctggcgtttaacctgctgggcgatggcctgcgcgatattctggagccgcaacatgactga

SEQ ID NO: 139622 - DNA, 837 bp, Enterobacter cloacae
atgactgacatccgactgaccgtccagggactcgccgtcgactatcccaccgcccgggtggtggacaacgtcagcttcaccctcggcaacgagcggctggcgctggtgggcgaatccggctccggcaaatcgatgaccgcccgggcgctgatgggcctggtgcgcaagcccggggtggtgagcgctgaacggctggaggtgctggggcgcgatgtgctgaccctcagcgcccgcggctggcgcgcgctgcgcggcaacgatatcgccatggtgctgcaggacccgcgctatgcgctgaatccggtgcagtccattcagacgcagctggaggaggcgttaaccctccatcagcgtctgagccgccgcgcgcgcgccgaggcggtcaaagacgccatcgccgccgtcggtctggatctgccggtcctcagccgctatcccggcgaactctccggcgggatgggacagcgggtgatgatcgccctcgcgctgctcaataacccgaaggtgctgatagccgacgagccgacctcggccctcgacgcccgcctgcgcaaccagatcctcgagctgctggtggagcagtgcgcgcagcggcagatggccatgttactgatcagccacgatctaccgctggtagccgcgcattgcgatcgcgtgctggtgatgtaccagggaagacaggtcgacgagatgccggcgcgggcgctgccgagcgcgacgcacccttacacccgcaccctgtggacctgccggccaaatgcgcacacctacggccagatgctgccgaccctcgacagaaccctggactttacggagacagcccatggcgatcgttaa

SEQ ID NO: 139623 - DNA, 174 bp, Enterobacter cloacae
atgctgccggccggcatgaacgaggacggcgtcatcgaggacatgcaggcgtatgacgcctggctggcagatgagcagacacagcgggatatgcagcggcgtgaagaggtcaatatcaaccacagccaccggcacgatgaacaggatgatgtcgagattggggggaacttctga

SEQ ID NO: 139624 - DNA, 1149 bp, Enterobacter cloacae; identical to SEQ ID NO: 135755

SEQ ID NO: 139625 - DNA, 723 bp, Enterobacter cloacae
atgatccattcatcccgttcccttgttaccctgcaacctgctcgacaggctgcactgcaggccatcatgacggtggaagatgctcgccagcgcggcactcgtctgccatcgatgccacatgtgcgaacttttttgcgcctgctgacgggctgcggccgcattaacagcgaagtggcgcgacgcattcccggcttatatcgtgatccaaaggaccgactctcaaacctgaagcaggtggaagaagcgctggatgtattgattgcaagcaatggcgagtattgtcctttgccattgtcgcaggatgtgcaagctgaactgttcccggaggtgaggcacgcccgtggagagcggagaactcagcgtcagaacatcgcattcacccgcaaaatgcggcgggaggcgcggcaggttgaacagtcatggctactgcgccagaatttgctcgggcaggctgtcactgagctaaatttccagtcgccggaaacggttaacagctggtaccgccggtggagcgacgagtttgacgcgagtgagctggaaccggccttctggcgctggcagacgcgattcacatctctcagggatcttcactggctcctttgtgcacatgcccccttgtatgaggttatgcatgaaatccgtttcatcgttcaggaatcggaagaatccatccttgagagggagcgctggcttgtacctaacaaacttatctgcagaggataa

SEQ ID NO: 139626 - DNA, 927 bp, Enterobacter cloacae
atgaattactctctgcgtcagttaaaagtatttgtcaccgtcgcccgggccagaagcttcagccgggcaggggagatgattggcttaagtcagtcggccgtcagccatagcgtcaaggagctggagcatcagaccggcgtccgtctgctcgaccgtactactcgcgaagtggtgctcaccgaggcgggtcagcagctggcgggcaggctggaacgtttgctcgatgagttgacgattaccctgcgcgacgccgggcgggttggccagcagctgagcggcaccgtcaaggtcgccgccagtcagacgatttccgcccaccttattccgcagtgtattgctcacagcaatcgtcgttatcccgatatcgattttgtgctgcacgatcggccccagcagtgggtgctggagagtatccgccagggggaagtggattttggcatcgtgattgatccgggcccggcggcagaccttcagtgtgaagtggttctggcggaaccatttttgctgctctgccgggaggatcatccttttgccagcctgactgaagtgccgtggcaggcgctgcaggatgaaaggctaatcctgcaggattatgcgtccggcagccgcccgctgatcgatgcggccctcagcaggctggctatccgggcgaacatcgtccaggagattggccacccggcaacgctgtttccgatggtagaatcgggaattggcatcagcgttctgccggcgctggcgctaccgttaccgcaggggagccatctgacggtgaaacggctgactccggtgatggagcggcagctgatgctggcatgcaggaaaaatcgctcgctgtcgaccgccgctcaggcgttatgggaaattgtgcgtgaagaaggggagaatttaaccgccgccagggttgaagatccgctatatcagcgctga

SEQ ID NO: 139627 - DNA, 255 bp, Enterobacter cloacae
gtgtataagagacaggagcaggccgccgcgctgcgcttttccgccatcgaggccaatctggcgaaagtcaccatcaccgacaacgccattcaggcggtgaatatcgcgctcgagctgaccggcaatcatggcctgagtcgacagaacccgctggaacgccactaccgcaatgtgctctgcggacgggtacataccccacagagcgacagcgcctggctggcagctggcaacttcgtctttcaatcacaaggataa

SEQ ID NO: 139628 - DNA, 321 bp, Enterobacter cloacae
atgttcacagtcatctttcatgatgaggctgaaaaagagtttacggctctgcctgctgccattcgtgcaaaaatggccaggctactcatgaagctggaagcaaaccctcgccagctacgcgagccagataccaagccgcttggaaacggccttttcgaaatacgtacaatgggcgcagatatcgcccgcggaatctgggtatatcagagtggtgaacgtatttttctacttcggatctttatcaaaaagtcgccaaaaacgcccccggcagaaatagatcaggcacttcgcagactggaggaaatgcagaatgaaatataa

SEQ ID NO: 139629 - DNA, 279 bp, Enterobacter cloacae
atgaaatataaaacccttagccagattcataccgaagcaatgaacgatcatgagtacagcgcggcattcgaggcagaagaagcctcggagctacttcgggaaaccttagcaacatggagaaaagaagcgggtttgacgtcggcacaggttgcagaacgtatgggcatcaaagcgcctactatctcacgtatggagaagaacgcttcgcgaatgagtattcagacgctggttcggtacgccagagcctgcggtgttaactttaaaattcagcaggtttga

SEQ ID NO: 139630 - DNA, 216 bp, Enterobacter cloacae
gtgattagcgatgccaataaagcggtgaatgacctggcgagtattgtccctctgctgggtggcagttcgtccccgtctggccgcgcctcgaaaggccgcgcgcctgcggcgccgggaaaaccgggccgcgctgacgcgccgccctcatttcctttccgcgtcttccctgtttgctgcctgctgtctgtctgcttcctcttcttctccctgctgtga

SEQ ID NO: 139631 - DNA, 429 bp, Enterobacter cloacae
atggtgacccagtggggcttctccgacaaactcggtccgctgctgtatgcggaagaagagggtgaagtcttcctcggccgtagcgtcgcgaaagcgaagcatatgtccgatgaaaccgcgcgtatcatcgaccaggaagtgaaatcgctgattgagcgtaactacggtcgtgctcgccagctgctgaacgacaacatggacattctgcacgcgatgaaagatgcgctcatgaagtatgagaccatcgatgcgccgcagattgacgacctgatggctcgtcgcgaagttcgtccgccagcgggttgggaagaacctggttcttctaacaactctgacaacaatggcacgcctcgtgcgccgcgtccggttgatgaaccgcgtacgccgaacccgggcaacaccatgtcagagcagctgggcgacaagtaa

SEQ ID NO: 139632 - DNA, 651 bp, Enterobacter cloacae
gtgctgcggcgagcgaataatcccgctcaccgagcgggcgcccatcgccagcgcccactgccccagcagactggcgcaggaggacgatgccgcggtcagcacgaggtgttttccggcaaccggccagcgcttgagcatcagcatcgccgtcagcggattgatatacccgcgggcggccagcagatcgtcaactgccggcggcaccggcaccagccaggtctcatccagatcgataaaccgctgccaggtgccgcccccgcgcaggggcagcacccgctggcccgcggccaaccgactgccgtatggcgcggcgaccacctcgccaaggccttcatagccggcgacggccggcagtcgggtgcggtggcgataggcgccggtcacggggatcagatccgaaggattcaccggggcaaagcgcatcctgacccgcacccgtccgcccgccagcggcgccagcggcaggcgtttcagggtcagcacggcggccggcggcccgtagcggtcataaacaatggcgtcgttgaacatcgactggctccagacagcgaaaggcgggatcatagcagatcccgcttccagtggctcgcacccgcgccagcccgggtcagcccgggccgtcgctggccgccgccagcagcggcacgatga

SEQ ID NO: 139633 - DNA, 198 bp, Enterobacter cloacae
atgggcatcaaccaccacccgctgcggcacaaacgcgtaaatgctctgcatcagctgcagggcgctgcgccactgctgttcaacaccttcctcgccaagatcgccaaagtgctggctcagcaccgcttcgctgccgcgcgccaggcagaaggtatttttcatatccgcgccgagagccagcaggcgtccgggacgtag

SEQ ID NO: 139634 - DNA, 270 bp, Enterobacter cloacae
atgctgccgtctaatccgctgcagcatttgcttctgcaggggctggcgcgccccatcgtaatgacctccggcaaccttagcggccgtccgccggcgttaagtaatgctcaggcgctcaatgatttagccgacattgccgacggctttctcttgcataatcgcgacatcgtacagcggatggatgattcactggtgcgctcaagcggtgaaatgctgcgccgcgcccggggctacgtcccggacgcctgctggctctcggcgcggatatga

SEQ ID NO: 139635 - DNA, 618 bp, Enterobacter cloacae
atgggcgtgctcggtgccgtcgttgacgtgatccagcatcacgtactcgatggtcacccggccctggttggcgttggacttcgaaatatagccgcgcaccgagttgaggaacgtctcgatgttgtactttttgttgatcgggacgatttcgtcgcgaatggtgtcgttcggcgcgtgcaaggagatcgccagcgcaacgtcgatcatatcgccgagtttatccagcgccggcaccacgccggaggtagacaaggttacacgacgcttggaaaggccaaagccgaaatcgtcgagcatgatttccatcgccggaacgacattgttgaggttcagcagcggctcgcccatgcccatcattactacgttggtaatgggacgcacgccggtggtcttcaccgcgccgacgatcttcgccgcgcgccagacctggccgataatttcggatacccgcaggttgcggttaaagccctgctgggcggtggagcagaatttgcactccagcgcgcagcctacctgggaggagacgcacagggtggcgcggtcttcttccgggatatagacggtctcgacgcgctgatcgccaacggcaatcgcccatttaatggtcccgtcggttga

SEQ ID NO: 139636 - DNA, 363 bp, Enterobacter cloacae
atgtccaccacgctgtttaaagatttcaccttcgaagccgcccaccacctgccgcacgtcccggaaggacacaaatgcggtcgcctgcatggccactcctttatggtgcgtctggagatcaccggtgaagtcgatccccataccgggtggatcatggattttgccgagctgaaggccgcctttaagccgacatacgatcgcctcgaccactattatctgaacgatattcctggtctggaaaaccccaccagcgaagtgctggccaaatggatctgggatgagatgaaaccgcgggtgccgctgctgagcgccgtgatggtcaaagagacctgcaccgccggctgcgtctatcgcggcgagtaa

SEQ ID NO: 139637 - DNA, 672 bp, Enterobacter cloacae
atgcagtacccgattaacgagatgttccagaccctgcaaggcgagggttacttcaccggcgttcctgccatctttattcgtctgcagggatgcccggtaggatgcgcgtggtgtgacaccaagcatacctgggacaagctggccgatcgggaagtgtcgttgttcagcatcctggcgaaaaccaaagagagcgacaagtggggcccggcaagcagcgaggatctgctggcgattattgggcggcaggggtggacagcccgccacgtggttattaccggcggtgagccctgcattcatgatttaacgccgttaacctcgcttctggaacaaaacggctttagctgtcagattgaaaccagcggcacccatgaagtacgctgcagccccaatacctgggtgacggtttccccgaaggtcaatatgcgcggtggctatgacgtgctatctcaggccctgcagcgggcgaatgagatcaagcatccggtagggcgcgtccgcgacatagaagcgctggacgaactgctggaaacgctgagcgatgacaaaccgcggatcatcgccctgcagccgatcagtcagaaagaagatgcgacgcgcctgtgtatcgacacctgcatcgcccgcaactggcgcctgtccatgcagacgcacaaatatttgaatattgcctga

SEQ ID NO: 139638 - DNA, 669 bp, Enterobacter cloacae
gtggatttcgccggtggtgcccacctgctgcagcagcacgccgaagacatcctggtgatcgagcactttgtcggcgtcatcgacgatgacgtcgaagccgaaggtttccgcgcgggtgcgcaccacgtccagggtttgcggatggacgtcggcggcaacgaagaagcggttggcgttcttcagtttactgacgcgtttggccatcgccatcgcttcggcggcggcggtggcttcatcgagcagcgaagcggaagcgatatccaacccggtcagatccagagtgacctgctggaagttgagcagcgactccagacggccctgggatacttccggctggtaaggggtataggcggtataccagcccgggttttccagcatgttgcgctgaatgaccggcggcagctgcacggcggtatagcccatgccgatgtaagacttgaagcgcttgttgcgactggcaatcgccttcagctccgccagcgcggcgaattcggtagtcgcgtcgcccacctgcggtggggtcgccagctggatatcctgcggcacaatctggccgatcagggcgttaagcgaatccgcgccgacggtcttcagcatctcttgctgctgctgagcgtccgggccaatgtgacgttcaataaaggcgtcgcggttttcaagctgacttaa

SEQ ID NO: 139639 - DNA, 720 bp, Enterobacter cloacae
atgacggacgtcagccgttcgccaggttgcatggtcaatctggggggcttcagtatcaatctcggcaagaccggcatgggaaccgcgagaaaggacgataagcaggtgaacggcgccttctatcacgttcactggtacaagtacccgctgacgtactggctgaacatcatcacgtcggcaggctgtctggaaggcggagacatggatattgcctatctgtccgagattgacccgacctgggtggacagcagcctcaccaccatcctgaatccggaagccatcctgtttgccaaccccatcgcgcagggcgcctgcgcagcggatgcgctggccagtgcattccatatgccgctggatgtgctcttctggtgtggtggaagccacggctcactttacccgtttaacggccaggtcagtaatgaatccagcccgctgcagtcgtcggtactggtcagtgaacgtatggccttcaagcttcaccggcagggacaaattatggagagtatcgggaaggacaaggcggtctgttacgaatatccctccccgatcatcccgaaagaacgctggcgctatcagatggtgaacatgtatccggacagtggtcagtgccatccgcttggacgcagcgtgatgcgctgggaggccggcaaaaatccacccaactcccgcaagaactatggctatctgatgtggcgtaaacgcaattgtgtctttctctga

SEQ ID NO: 139640 - DNA, 720 bp, Enterobacter cloacae
atgacggacgtcagccgttcgccaggctgtatggtcaatctggggggcttcagtatcaatctcggcaagaccggcatggggaccgcgagaaaggatgacaagcaggttaacggcgctttttatcacgttcactggtacaagtacccgctgacctactggctgaacatcatcacctccgcaggctgcctggaaggcggagacatggatatagcctatctgtcagagattgacccgacctgggtggacagcagcctcaccaccattctgaatccggaagccatcctgtttgccaaccccatcgcacagggggcgtgcgcggctgacgctatggccagcgcgtttcatatgccactcgatattctgttctggtgtgccggctctcagggttcgatgtacccgtttagcggctgggtaagcaacgagtccagtccgctgcagtcctcgttacttgtcagcgagcgcatggcgtacaagcttcaccggcagggacaaattatggagagcatcgggaaggacaaggcggtctgctatgagtatccgtccccgatcatccccaaagagcgctggcgctatcagatggtgaacatgtacccggacagcggccaatgccatcccgtggggcgcagcgtgatgcgctgggaggccggtaaaaatccacccaacacccgtaagaactatggctatctgatgtggcgtaaacgcaattgtgtctttctctga

SEQ ID NO: 139641 - DNA, 942 bp, Enterobacter cloacae
gtgaaagagctggtggagctgctgtggctgaaaggcgacgagccggtgaccgttgagggcaaaactctgccgctgtcggaagccctgcagtggcattttgagctgacggttaacaccgcgactatcgttgaaaattacgccaccctgacgcgcagcgaatcgctgctgccgcttgtgggcgacaaagctcagttgcagcagtatgccgccgcgacgccgatcgtcgatatggtccgtttctctccggcgcagctggacgccgaggcgttaatcggtctgctgcgtccgctgacgccgcgcctgtattctattgcttcctcacaggcggaagtggagagcgaggtgcatgtcaccgtgggcgtggtgcgctatgaaattgaaggccgcgcccgggctggcggcgcctccagcttcctcgccgaccgcgtggaagaggatggcgaagtccgtgtctttatcgaacacaacgacaacttccgtctgccagccaacccggagaccccggtgatcatgattggcccgggcaccggtattgcgccgttccgcgcctttatgcagcagcgcgctgcggacggagcgcaaggcaagaactggttgttcttcggcaacccgcacttcaccgaagatttcctctatcaggtggagtggcagagctatgtgaaggaaggtctgctgacccgtatcgatctggcctggtcccgcgatcaacaacaaaaaatctatgtgcaggacaaactgcgcgagcagggggccgagctgtggcgctggatcaatgacggcgcccacatttatgtctgcggcgacgccaatcgtatggcgaaggacgtggaaaacaccttactggaagtgattgccgaatacggcgcgatggacgccgaagcggcggacgaatttttaagtgagctgcgcgttgagcgccgttatcagcgagatgtctactaa

SEQ ID NO: 139642 - DNA, 249 bp, Enterobacter cloacae
atgtcccacccgttcgtcggaatcggcagcaacaatcacatgatgatgttcctcgctgatttcgaatgcggcgcgtttatatctcagggatgggccattcttgagccagaatgctacaaaagccgcgcgcctgcggcgccaggaagaccgggccgcgctgacgcgccgcccgcatttcctctccgcgttttccctgtttcctgcccgctgtcttcctgcttctccttcctgctgtgtcgccgctggtaa

SEQ ID NO: 139643 - DNA, 213 bp, Enterobacter cloacae
atgactcacgtatttgtatatctcgttctcgcgtcaaatgtatccgctggttccagctggaatgtaacgccgatgcctaatatggatgtctgtgaacagttcatgcagactattaaccaaaaattgaactcgcctgtgcgcccgtcaaaactggttagctgtattgaggcaaagacagacaagccgatcaatgaggtcatgaaagcagaataa

SEQ ID NO: 139644 - DNA, 294 bp, Enterobacter cloacae
atgatgtgcatcagcctgctgtgccggctccgcctcctgattctgagcctgctgttgcccgttcttttccgcttccagttcttcaatcgttttcagctggaatccatcctggaacacgacggtcacttcgttgccggcaccaatcggaatgaccgggtgatactgctcggcccttttgatgtagtactcgctcagcgtctgcgcagctttagatgcaccaccgccgacccccattttcagaacgtcaccggcgccaacagatgcggttgcccccaggccaacagccggctgtga

SEQ ID NO: 139645 - DNA, 540 bp, Enterobacter cloacae
gtgctgaactttcaaaaagaccgggtaaagatcctgcgtcccgtgggagaagaagttgaaagccgccatcagcaccaccaggtacaggcacagcttccagtggctacgcagtaccggcagcagggccgtactctctttattctgcctggccgcctgccaaaccggagactcctcgacgcagaaatagataaacggcagcagaagcaccggcgcggcgccaatgacaaacatcccgcgccagccgagttgttcaaacagcagcccataggcgacggccgccagcaaatagccgaaggggtatcccgcctggaacaggccggacatcaggccgcgcgagcggtcggggatcgtctccatcgccagcgaagaggccacgccccagatcccgcccatcgccacgccgtacagcacccgcagcaggaaaaacagcatcaacgacggcgcggcggcggagagcagctcaaaagccgagaagaacacaatgttgagcatcaggattggtttgcgaccaaacttctccgccgccctgccgaaaattag

SEQ ID NO: 139646 - DNA, 861 bp, Enterobacter cloacae
atgctcggcttcttcatcgccttcgcggtgaaaatgccggtcgtaccgctgcacggctggctgccggacgcgcactctcaggcgccaacggcgggttccgttgacctggcgggtatcttgctgaaaacggcggcctacggtctgctgcgtttctccctgccgctgttcccgaacgcctccgcagagttcgcgccgattgccatgtggcttggcgtgatcggcatcttctacggtgcgtggatggccttcacgcagtacgacatcaaacgtctgattgcctatacctccgtttcccacatgggcttcgtgctgattgccatctacaccggcagccagctggcgtaccagggcgcggtgatccagatgattgcgcacggcctgtccgctgccggtctcttcatcctgtgtggtcagctgtacgaacgtctgcatacccgcgacatgcgtatgatgggcggtctgtggggcaaaatgaaatggttgccagcgctttccatgttcttcgcggtggcgactctgggtatgccgggcaccggtaacttcgtcggcgagtttatgatcctgttcggcagcttcaacgtggtaccgacgatcaccgtcatctccacctttggtctggtgtttgcctccgtgtactcgctggcgatgctgcaccgcgcttacttcggtaaagcgaagagtgaaattgctgcacaagaactgccggggatgtcgctgcgtgagctgttcatcatcctgctgctggtcgtactgctggtgctgttgggcttctatccgcagccgattctggatacctcgcactccgcgatgggtaacatccagcagtggtttgttaattctgcttctactacaaggccgtaa

SEQ ID NO: 139647 - DNA, 486 bp, Enterobacter cloacae
atgctgtgcgagggtcgagatagcccggcgctgttcggcatagtcggcagcgagctggttttttaccgtgccgttgtagtggctgtactgcaggttgtaatcgagttcggggttttccagcatggctttcttcgcactcatcgagaacaaacctgcctgctgcgtccagtagttctgcagccggaaatacttcacgaagttttcagacgatggatacagaatggcttcgtacaacgaccgtttggtggccgcctggagtgtggcgagtttctccagaatatccatttgcggcggtggtgccgctggtacggctttcctgtcctcatcacggggcttcagtttctcgttgtaccactgccagcccgcgtctttggcgaaagccggcatcagggcgcagcaaaggcaccccgccagcatggcggcatgtattgttcgcatggcaaatacccttttatgaattattgcgactggcgtgacagatgctga

SEQ ID NO: 139648 - DNA, 294 bp, Enterobacter cloacae
gtgcgtcagggcagcgtacccgatgagtatcagtctgtccccgtcacttctgaagtgctgcaggtgccggctggtctgcgcgccactgccgatcgggtctgggtcggtcatcacctgaaagttgtccgttacagtctggacaatgtctccctgtcggcccgtatggtgcgtgaaagcgatttctggcagcccggaacacgtgccgtcatgttcagtaccccggcaggcctgctgactgccggtggtcgcatgcatatctgggtcacgacgtcagatgaaggagtgaagcgctga

SEQ ID NO: 139649 - DNA, 309 bp, Enterobacter cloacae
gtgtttgatatcatctttttccagctggcggatgtggcgcgcggtgatacggcgacctttttccacatacactttgccgtcggcttcgatgtcgaacgacgcggtctcaccacgcagacgttccggcaccaactccatctgcaacttgttgtcgcggatttcaaagatcactttctcaaagaacaagtccaggatctgctcagtggtatagttcagtgcacgcagaatgatggttgcaggcagcttacgacgacggtcgatacggacaaacaggttgtcttttggatcgaattcgaagtccagccatga

SEQ ID NO: 139650 - DNA, 231 bp, Enterobacter cloacae
atggccgtccagcgtgatggctggcagatctttcagtttagcgagttccgctttctcggtagcaacctgctcctgaacggaacgcagctgctcgatcacatcgttagttgggttgacgtaaaccacattgtttacggcatccagaatcagatagtcgtcgtttttcacctgggaggtaacgctaccggtacccacaatggctggcagctccagagaacgcgccatgattga

SEQ ID NO: 139651 - DNA, 459 bp, Enterobacter cloacae
gtggaacacttcagaacccatacgaaccgcttctttcagggttttcgcgccaactggctgaatcatgaattcctgaatatcaacgttgttgtctgcgtgctcaccaccgttgatgatgttcatcattggtacaggcatggagtatttgcctggggtgccgttcagttcagcgatgtgctcgaacagtggcatgcctttagctgccgctgccgctttggcgttcgccagggaaacggccaggattgcgttcgcaccgaagttagatttgttttcagtaccgtccagatcgatcatgatcttgtcgatgccagcctgatctttagcatctttgccaacgatagcctgagcaataggaccgttaacagcgccaaccgctttcagtacgcctttgcccatgaaacgggatttgtcgccatcacgcagttccagcgcttcgcgggaacctgtagaagcacctga

SEQ ID NO: 139652 - DNA, 789 bp, Enterobacter cloacae
atgcgcgaagagatccgcaaaaccaaacagctgacggagaaaccctttggcgtcaacctgatcccgacggcggaaaatgacatctggacgccggcgatcctcccggtgatcaaagaggaaggggttaaggtggtggtctacaccggctacggcgacggttcgttaaaaccggcgctgttcgacgaactgaaagccgccgggatcaccattatctatcgtgacatcaacccgacgccggagaacagccgccgcgcggagcaggccggagcggatattattgtcgccaccggctttgacgaaggcggcacgctgccgggtaccgccctcgggaccttcaccatcgtcccgctgatcgttgacgcggtacagcgggttccggtgatggccgccggagggatcaccgacgcccggggcgcgcgcgccgttcatgccctgggggcggagggcgtcttcgccggttcggtatttatcagcaccatcgaaagccgggttcccgactcagtgaaagcgaaaattgtggccgccaacggtctggatctgcgcctgttccgtaccctgccggactactaccgcgcgctgcccggcaaactgagcgacacactggtggccatggaccgggccggcgcctccaggaccgagctggcccaggcgatgggtggtctgcgcgggatgcggctgggcatgctggaggggaataccgatgagggatatatctcggtgggcgcggggatcggcaacatccatgccatcacctccgtcgccgaggtggtcaaccagctggcggtgtaa

SEQ ID NO: 139653 - DNA, 714 bp, Enterobacter cloacae
gtgagactcagcgcgcagtacggtgacagcaaggccagcatcgatcgtcttgataacgtcatggcaagcgacagggaggcaacggcgcgttcgctgctgagtttgcagactgacgtgaacggcaacaaggcatccatcaacagcctgaaccagaccttctccgattaccagcaggccaccgccacgcagataaacggcatcacggcgaccatcaacggacatacctcagcgatcaccaccaacgcgcaggccattgcgaacgtcaatggcgacctgaaggcgatgtacagcatcaaggtcgggttatccagcaatggccagtattatgcggcagggatggggatcggtgtagagaatacgccgtccggcatgcagtcgcaggtcatcttcctggctgaccgcttcgccgtcactcaccaggccggagccacggtgaccttaccgttcgttatccagaacgggcaggtaattatcagggatacggtaataggtgatgccactatcacccgagcgaaactggctgaaacaatcagctcggttaattacgttcagaaccaggctgggctgtccataaacttcagaacgggcacgcttgagaactacggttcaaccgctggggaaggggcgatgaagcagactaatcaaacgatcagtgtcaaggatgccaacaatgtgttgagggttcagatcgggagaatcacgggaacatggtaa

SEQ ID NO: 139654 - DNA, 711 bp, Enterobacter cloacae
gtgagactcagcgcgcagtacggtgacagcaaggccggcatcgatcgtattgataacgtcatggcaagcgacagggaggcaacagcgcgttcgctgctgagtttgcagactgacgtgaacggcaacaaggcagcaatcaacaacctgaatcagacgttctccgattaccagcaggccacggccacgcagataaacggcatcacggcgaccatcaacgggcacacttcagcgatcagcactaacgctcaggcgatagcaaacgttagtggtgacctgaaggcgatgtacagcatcaaggttgccgtggacgcgaatggaaagcagtatgccgccggaatggggatcggtgtagaaaacactccatcgggcatgcagtcgcaggtgctattcctggcggatcgcttcgccgtcatggcgcaggcggggggagcggttacactgccgttcgttatccagaacgggcaggtgtttatccgggaaaccttcattcaggacggcaccattagcaacgcgaagatcggtaactacctccagtcaaataactatgtggctggttccgtcgggtggaaactggataagtcagggacgtttgaaaactacggctccacagctggagagggagcaatgaaacaaaccaatcagacaattagtgtccgggactccaggaatgtgttgagggtgcagatcgggagaatcacgggaacatggtaa

SEQ ID NO: 139655 - DNA, 465 bp, Enterobacter cloacae
atggccccaggcgtcaatttctgcggcgaagttggcgaccatatcctcgactttatcccagtgaccgctttcggcaagacccagcatcgtgaaatagctgtcccagtaatagacttcgcggaaacgtcctccgggcaccacgtagggcttaggcagcggcagcagcgagtcccatttttccacctcgacggtgctgcgggtcaggaccggccacaggccatcgatatgttgacgcagagtttgccctttgggcggcacataggtgtcgttctctttcggcagcgtgaagttcagttcgacgaagtggcgcaggtcgaagctggcctggtttttttgcatccggtaatcggcaaggatcatcagcggatcgctgttagggatagcgtcggcgaaggttttctgatcagaaaacagtttcgcgctttgcacatcattaaacagcggaccgagcaggatatcgggtga

SEQ ID NO: 139656 - DNA, 630 bp, Enterobacter cloacae
gtgcagcgtccctttcaggttggtgaagctgatatttttatcaacgatcagaccttccatctgatggaacatcggggtgtgggtctgatcgtagtcgttacgatagacgcggcccggcgcgataatacggataggcggctgctggttttccatggtgcggatctgcacgccggaggtctgcgtacgcagcaggcgagtggcatcgaaccagaaagtgtcgtggtcagcgcgcgccggatggtgacccggaatattcagcgcatcgaagttgtggtaatcgtcttcgatttccgggcccgtcgccacggtaaagccgagctcaccgaagaaactttcaatacggtcgatggtgcgagtaaccggatgcaggccgccgttttcaatgcggcgacccggcagcgagacgtcaatggtctctgcggccagacgcgcattcagcgctgcgccttccagttcagctttacgcgcgttcagcgcctgctgcacctgctctttcgcctcgttgatgaccgcaccggctgccggacgctcttccgccggcagctcacgcagggtggtcatttgcagggtcagatgcccttttttacccaggtattccacgcggacgttgtccagcgcagcaacatctga

SEQ ID NO: 139657 - DNA, 699 bp, Enterobacter cloacae
gtgctggaggatgccgatatcgaacaggccgcgcgcgggatctgctacggcattttcagctcggcggggcaggcgtgtatcgccgggtcgcggctgtttatccacgagagtatttacgccccgctgatggcgcggctgctggaattaactcgcgggctgcgcgtcggacatccatttaccgacggcgtgcatgtcggaccgctgatcggcgagaaacatcgccagagcgtgatccagtacgtcgaactggcgaagcgtgaaggggggcgggtgctgtgcggcggtgagatacccgccgatcccgctctggcaaacggcagcttcttcctgccaaccattatcgaagggctgagcaacagcgcccgcgcctgtcaggaagagatcttcggcccggtgctggtggcgatgccgtttgccgatgaagccacgcttatccgcgaggcgaacgactcggtttacggcctggcggcggggatctggacgcgcgataccggacgcgccctgcgtctcagcgagcagctggaggcaggcacggtgtggatcaacacctacaaggtttttgcgatttcgaccccgttcgggggctttaaagagagcggtctgggccgcgagaagggtattcaggggctgaaagcctggatgcaacaaaagagcatttatctggcgacgggtaacagcgtcaaccactggtgcgactga

SEQ ID NO: 139658 - DNA, 672 bp, Enterobacter cloacae
ttgaccaagatgaataacccaaagtttacgacgccctcgggcgacaccgcgccacggcaggtctggcagcagaccgttgacgcagtgctggcgcagaccaaaagccaggccgctgggttaagttccgcagacgccgccgagcgcctgaatacctgtgggccgaatgcgctgccggaaaagaaaggcaaaccgggctggctgcgctttctcgcccactttaacgacgtactgatttacgtgctgctggccgccgcggcgctgaccgccatcatggggcactgggtcgataccctggtgatcctcggcgtgacggtgattaacgccctgatcggccatatccaggagagcaacgccgaaaaatcgctgcaggggatccgcaacatgctctccagcgatgcccgcgtccagcgtaacggcaagcatgagactatcccgacgcgcgacctggttccgggggatatcgttatcctgcgcgccggcgaccgcgtgccggcggatatgcgcctgattgaaacccacaacctgcgggtggaagaggcgatcctcaccggcgagtcgacggtggtggataaaatcaccgacgcgctggaaggcgatctgccgctgggcgaccgggtgaacatggtcttttccgggaccaccgtcagcgccgcggcggccagcagcacgtaa

SEQ ID NO: 139659 - DNA, 240 bp, Enterobacter cloacae
atgccgcgaaactcagatatcgaaatagcctggcgtcaggcaattgtcattgagcctaatggccgccgcaccgtgacaacgtccggttttatccgggaactcgcaaaagttaactggcactggtcgccacgccaggctaaccagtggatagagcactatgtgacgacattccgggatgtctcaacgcaggaaggcgatgagcgcacgttccagttatacaacccgaacggagggctataa

SEQ ID NO: 139660 - DNA, 372 bp, Enterobacter cloacae
atgagcgcacgttccagttatacaacccgaacggagggctataacgtgggatttccgtcgccagcagcagactatgtagaagtacgactgaccgtcgataaactctgcggtaccggcccaaataccaggctcgttcagacagaaactggttacaccgtagtcgatgtctccgttaaaccaaagcaaggagataccgttttaattcaatacggcggcggcactgattttgcaaaaattatgggccgggcatttattacaagagacggggaagctctggaaggcgaggctttggatgatgttacagttgtcggggtggtgacattcgtcatcaatcgagcttggcctaatgatgacgaatgtcctgtcatataa

SEQ ID NO: 139661 - DNA, 594 bp, Enterobacter cloacae
gtggtagaagtcgttaccctcacgagtacgttcacccacgcccgcaaacacagagtaaccggagtgctcgatcgcgatgttacggatcagctccatcatgtttacggttttacctacacccgcaccaccgaacagaccaactttaccgcccttcgcgaacggacacatcaggtcgataactttgatgccggtttccagcagttcctgagagctggacagctcttcgtaggaaggtgccgcgcggtggatagcccaacgctcttcttcaccgatgtcgcctttcatgtcgattggctgacccaatacgttcatgatacgacccagtgttgctttacctaccgggacttcgatcgggtgctcaaggtcttttacttccagaccacgacgcagaccgtcggaagaacccatggcgatggtacgcacgataccgccgccgagctgctgctgaacttccagcaccaggctctcgttaccattctgtacctcaagcgcgtcgtacacgcgtggtacggcgtcctgagggaactcgacgtccaccacggcgccgattacctggacaatctttccagtagccatcttgaatcctctacgtaa

SEQ ID NO: 139662 - DNA, 300 bp, Enterobacter cloacae
atgcgcagccgcgtcggccgtcatgcctttatctttaatcagggctatgatttcctgctccagctcctcatcttcgagcagcataatgtgcccttcgaagatggcttctttttcttcaccgaaagtttcgccagctttagttttaatcgcttccagttgcgcagatgccttggcacgaccgctcagaaaacgttcaacttcctgatcaaccttgtcggcagaaatttttttccggtcaatgacgatttcgtcttctttcagcagcaatgctttgccgaaagcgatacccggggatgctaa

SEQ ID NO: 139663 - DNA, 210 bp, Enterobacter cloacae
atggtggtcgtggtgatggtgatgttcactggcatcttcggtaaaataatgatcgggatgggctttaaatttgctctcacagctggcggagcagaaataaagctgatggtcctggtatcgaatgctgctgtgcgccttgtcaggcaggatgaccatcccgcacacgggatctctcaccttatgcaatgcgtgactctcgtccggggatga

SEQ ID NO: 139664 - DNA, 216 bp, Enterobacter cloacae
atggccaccaccacggcaaccgacctgatgaagtccggggatgcgaccgttaaaggcacgtttggtaagcagtccagcgtcgtcaaatgggtggttctggcggaagttgtcgccggcggcatcatgtacatgatgaccaaaaacgtgaagttcctgtttggcttcgcgattatttccacctttatcaccatcggtatgtcggtcgccggttactga

SEQ ID NO: 139665 - DNA, 306 bp, Enterobacter cloacae
atgacgggagacgaattaaagcgataccgtttcccggaaacactgactaaccagtcccgctggtttggcttatatctcgatgaacttatcccggccgtgatttgtctcggctggggtttctggaccagcaagttcatatttggcatagcttcagcggtactggttttctggggtatcaagaaactgaaaaaagggcggggcagttcctggctacgcgacctgatttactggtatctgccaacctcccttcttaaaggtttctttcatgatgttccggactcctgtttccggcagtggattaaataa

SEQ ID NO: 139666 - DNA, 579 bp, Enterobacter cloacae
atgaatcccggcctggaaattaatttaaattatcaagattttattgagattctcaaggagtctgttggagaaacgtatacattaaatttcaaggatgaagtccttgaacaacatttaaaagaattagttgatggtcagtctgataattataaggatttaataaaagatgggttgagttatttttgcagagatgactttatatcattttcagagtgtgctggaaatctttttgattctgcactacaataccctgaaattaatgaacaatgtttagttacaagcgtaggggtcatattaagggattattgtaggatacagtttgcacatcgacaaagaattaatgccagatatgtagaatatcatggggacaccaatgatatatatttgccaattgataattctttacttatgggtacgatcctaaagcatgaacgctggacaaatagcactaaacttgaggctttcattaaatccgttattacatttgctgaaagtatttcatgccgagagttaaagaatgatgctgagaactttatgaaaaaaattgggacggaaaatcctcctttaccagagaggtaa

SEQ ID NO: 139667 - DNA, 504 bp, Enterobacter cloacae
atggtaactcccttacagttagcgcgagtctacgcaacgattggcagctatggcatttatcgcccgctgtcgatcaccaaagttgatccaccggttccgggggaacgtgttttcccggaatctatcgttcgtaccgtcgtgcatatgatggaaagcgtcgcgttaccaggcggtggcggcgtgaaggccgcgattaagggctatcgtatcgccattaaaaccggtacagcgaaaaaagtggggccggacggccgctatatcaacaaatacattgcctataccgcaggcgtagcgcctgcaagcaatccgcgttttgcgctggtggtcgtcatcaacgatccgcaggcgggtaaatactacggcggcgccgtctccgcgcctgtgttcggggctattatgggcggcgtgttgcgcaccatgaacattgaaccggatgcgctggcgacgggcgaaaaaagtgaatttgtaattaatcaaggcgagggaacaggtggcagatcgtaa

SEQ ID NO: 139668 - DNA, 267 bp, Enterobacter cloacae
atgcaccttgttcaccagacgcgggttaatgcccgcttcacccagcacaatcgccgtaccgtgagtcgcatccagctcgaagccaaacttcagcagcttcgccgccaggtcaaccacgcgctctttatcgccttcgcggacggagagcagcgcacgaccctgtttcttcatggtcgagttgctgcccagctgcgctttggcgaacgcttcggcaaaggtacggccgacgcccatcacttccccggtggagcgcatttctggccctaa

SEQ ID NO: 139669 - DNA, 534 bp, Enterobacter cloacae
atgccgccgtctggggcgatccgagcgtactggatccgcagcgtctgcctgacggccagcgccaggcgctggcggcagccctgccgcaggatctgccgccggtgcttgccgagcctcacgcggcatgggttgacgcgctggagcaggaatggctgcgccgctacggtacccactgatcctgctggcctggggggcgatggcggcgatctatctgccgctgctccccgccgccggggaactggtgggcgctgcgcgctccccggcccactggcgggcgctgttcgccgacccgcagctgagccaggcgctggccgccaccctcgtctccacgctgttatccgtcggcggcgcgctgctgatcgccctgaccatcgtcgccgccctctggccttcggcccgctggcggcggctggcttcccgtctgccgctgctgctggcggtgccccatctcgccctggcgacggcggcgctgctgctgttcgccgaagggggctggctctggcagcggctgccgtttctgacgccgccggttga

SEQ ID NO: 139670 - DNA, 177 bp, Enterobacter cloacae
atgatcatcaccgtcatcggtaccatcagttttaatttcttattggcgtgctcgagtaattcaaactgtcctgagaatgccacactggtccccggtctcagtttcactttctcactgatggccgtcttaatatcgttcaccaccgacaccatgtccctgccgcgggcatcaacataa

SEQ ID NO: 139671 - DNA, 384 bp, Enterobacter cloacae
atgtcagtggcgaccggaaccgggtttatcgccctggccggggtggcagcagagtttggcgtggtcatgctgatgtatctgcgtcatgccattgaagcgcacccggaattgtcccgtaaagagacgttcacaccggaaggtcttgatgaagccctctatcatggtgccgtactgcgtgtccggccgaaagccatgaccgtggcggtgatcattgcgggtctgctgccaatactctggggaaccggcgcaggttcagaagtcatgagccgtattgcggcacccatgattggtgggatgatcacggctccgctgctgtccctgttcattattcctgccgcctacaaattaatctggctgcgcagacataaaaaaagcgtgtcataa

SEQ ID NO: 139672 - DNA, 264 bp, Enterobacter cloacae
gtgctctcggaaaaattcagcttcgaagacgcccacgttggcgaactgttgttcaatatgcatcatgactttaagcgcgccaacggctacagcgaactggagatcagccagaaacgcagcatgctggaaaatgtgatgctgacggactctgtcgaaacccataaagcccgcctgcgtcaggctgggtttgaacatgccgaactgtggttccagtgctttaactttggctcgctggtggccgtgaaagccggggagcaggcatga

SEQ ID NO: 139673 - DNA, 522 bp, Enterobacter cloacae; identical to SEQ ID NO: 114873

SEQ ID NO: 139674 - DNA, 255 bp, Enterobacter cloacae
gtgacccgtatcgttgactttggcgcattcgttgccatcggtggcggtaaagaaggtctggtacacatctctcagatcgctgacaagcgcgttgagaaagtgaccgattacctgcaaatgggtcaggaagtaccggtgaaagttctggaagttgaccgccagggccgtatccgtctgagcattaaagaagcaaccgagcagtctcagcctgctgcggcgccggaagctccggctgctgaacagcaaggcgagtaa

SEQ ID NO: 139675 - DNA, 252 bp, Enterobacter cloacae
gtgacccgtatcgttgactttggcgcattcgttgccatcggcggcggtaaagaaggtctggttcacatctcgcagatcgctgacaagcgcgttgagaaagtgactgactacctgcagatgggtcaggaagtaccggttaaggttctggaagttgaccgccagggccgtgtccgtctgagcattaaagaagcaactgaacagactccgtctgccgcagcgccggaagctccggctgccgagcagggcgagtaa

SEQ ID NO: 139676 - DNA, 561 bp, Enterobacter cloacae
gtgggtcacttccgggtggaactgcacgccgtagaagcgtttttcttcgttcgccatgatcgcgaacgggcagctttcggtgctggcaacggtcacgaagtcggacgggatagcggtgactttgtcgccgtggctcatccacacgtccagcagcggtttgccgtctgcggtcagggagtcttcaataccgcgcaccagcgcgctgtcggtgacgacttcaacctgtgcgtagccgaactcacgctcgttagagccttctacgtggccacccagctgcatcgccatggtctgcataccgtagcaaacgccgaacaccggtacgcccgcttcgaatacgtactgcggcgcacgcgggctgttctcttcggtagtgctttccgggccgccggacaggatgatgccgcttggattgaactcgcgaatctgtgcttccgtgacatcccacgcccacagctcacagtaaacgcccagctcacgcacgcggcgcgccaccagctgagtatactgagaaccaaagtccaggatgagaatgcgatgtttatgaatgttttccgtcattga

SEQ ID NO: 139677 - DNA, 348 bp, Enterobacter cloacae
atgcattatgtcacaacggtatatattgctgcgttcctggctattctgtttgtcacgttaactggatatatatttgctcgtaatattaacgtttcagagtatttcaggtgcacattcgttgtcatactcatacaaagtattttcattggttatgtggcaaagcagggtgtggcctgggacgtagtatcatttatggctgccagtattcagtgttgcgcgcctgtacagaccatgtttattcatcgggccatttatacccgacaggctagtaaggtgatattcagagtttgtattatggctggaatgccattgcttgcgtggttgtcgatagtgttgaggcttcagtga

SEQ ID NO: 139678 - DNA, 357 bp, Enterobacter cloacae
gtggcccgtatagcaggcattaacattcctgatcacaaacataccgttatcgctttaaccgctattttcggtatcggcaaaacccgttctaaagccatctgcgctgaaacgggcatcgctgaaaatgttaagatcagtgagctgtctgaagaacaaattgatattctgcgtgaagcagtaggtaaatttgtcgttgaaggtgatctgcgccgtgaaatcaccctgagcatcaagcgtctgatggaccttggttgctaccgtggtttgcgtcatcgtcgtggtctcccggttcgcggtcagcgtaccaagaccaacgcacgtacccgtaagggtccgcgtaaaccgatcaagaaataa

SEQ ID NO: 139679 - DNA, 264 bp, Enterobacter cloacae
  misc_feature (242)..(251): n is a, c, g, or t
gtggttgtaacgtccacccagggggaaggagagccgccggaagaagcggtcgcattgcataagttcctgttctcgaagaaagcgccgaagctggacgggaccgcgttcgccgtctttggtctcggcgatacctcttatgaatttttctgccagtccggcaaagatttcgacaacaagctggccgagctcggcgcggaacgtctgctcgatcgcgtcgacgccgacgttgaatatcaggccgnnnnnnnnnnccgcggccgctga

SEQ ID NO: 139680 - DNA, 138 bp, Enterobacter cloacae
atgggccacgcgggcgctatcatcgccggcggtaaaggtacagcggatgagaaattcgcagcgctggaagcggcgggtgtgaaaactgttcgcagcctggccgacatcggcgaagcgctgaaagctattatcaagtaa

SEQ ID NO: 139681 - DNA, 327 bp, Enterobacter cloacae
atgctgcacgaaacccggcagtatggcattccggcgacactgcgcgggctcgtcaataacgacatgaggaccaccaccgacgcggtgctgcagctggtgaaagacggcgtcaccgacggggtgcagatcgacccgacactgtacacgcagtacggcatccggagtgtgccgtctctggtggtacggtgtcaggccggatatgacgtggtacgcggtaacattcacgtcaaacaggcgctggagaaagtggcacaaaccggtgactgcgcacaggtggcccggcagatgcttgatgcgccctcaaatgccgccgggagccagccatga

SEQ ID NO: 139682 - DNA, 336 bp, Enterobacter cloacae
gtgatattccatcacttctttcagtttttcagcgaaggtcgctttgtcgaagaggtcgcccacgcgcagaccgcgacgagccactttatcttcgtaagccgggccgataccacgaccggtggtgccgatcgctttcgcgccacgcgctttttcacgcgccacgtccagcgccacgtgataatccaggatcagcgggcaggcttcggagagcagcagacgctcacgaacagggataccacggtcttccagacctttcatctctttcatcagcgcagctggagacagcacaacgccgttaccgatgatgctggtgacgttttcgcgaagaatgcctga

SEQ ID NO: 139683 - DNA, 198 bp, Enterobacter cloacae
gtgctgtgggccctcatggtgttgctgatgaatatgaatgacctgagtgaatcagtggccgggctggcgattgctctgctggcgctgatggtgtgctcatctgccggagagcgtgtgaaacgcttctggccacggcagttcttcgtgatgttctatgccgttcacctggcggtactcggtattgtcgtctcgatgtaa

SEQ ID NO: 139684 - DNA, 498 bp, Enterobacter cloacae
atgattgctcacggtctgtccgcggcgggtctgttcattctgtgcggccagctgtacgaacgtctgcacacccgcgatatgcgccagatgggcggcttgtggagcaaaattaaatggctgccggcgatgtcgatgttcttcgctgtcgccaccctggggatgccgggcaccggtaacttcgtcggcgaatttatgatcctgttcggcagctataaagtggtgccgacgatcaccgtcatctccacctttggtctggtattcgcgtccgtttactcgctgtcgatgttacatcgcgcttacttcggtaaagcgaagagcgaagtggcggcgaaagagttgccggggatgtccctgcgtgaactgtctatcatcctgctgctggtggtgctgctggtgctgttgggcttcttcccgcagccgatcctcgacacctcgcatgctgcgatgagcaacattcagcagtggtttgttaattctgtttctactacaaggccgtaa

SEQ ID NO: 139685 - DNA, 243 bp, Enterobacter cloacae
atgacccaattgtgggttagagagcgcttcgggttgcccatgatttatgctgatgcggaaataatcatgactatttatataggggtaaaagaggtctatgctctgcctgcccctcatcaatatatcgctgccgtatttacctataacaaagatttatttgtagaaaccgtgactttttacccactagaacgggccaaagagattcaggcagtactggagaaaaaacaacttggtggcaaatga

SEQ ID NO: 139686 - DNA, 357 bp, Enterobacter cloacae
atgttcagaagagcgatcaataatctgttatccaacgccctgcgttataccccagagggacaggcaatcaccgtctcaataagagagcaggagagcttttttgaccttgtgattgacaatccggggaaaccaatccctgaagagcatttatcaaggttgtttgaccgtttttatcgggtggatccgtccagacaacgaaaaggagaaggcagcggcatcggccttgcgattgtgaagtcaatcgtggaagcacatcacggaagagtgcaggtggaatcggacgtacactcaacgcgttttatcttatccgtgcccagactggagaaaatgatcccggacacccagtgctgggaataa

SEQ ID NO: 139687 - DNA, 123 bp, Enterobacter cloacae
atgctgggcatcaaccgtttccggcgtgacattcagacgcagggcaacaaaggacaggcccagctgctcaatataagaggcgtcagtctggttctgagacaccgcaaagggtgcacggaataa

SEQ ID NO: 139688 - DNA, 315 bp, Enterobacter cloacae
atggcggaatatggagttcagacatgggacgcctcaggcaaggtaaataactatggcgttaagcctgtcagcgtttgtggctatctccagctggcccagaaccagaaaacaggctcttacaccgtagcgcttccaccgggttgcaggctgacctattttcagagcatgaacggcgatcagtttggtacgagtcggaggaagatcaccatttcggggggaacagcaacagtgtcagcagcaggtgataccgactactcagcagggactgagcctgcggcggcggcttatctcattttccagatcgagagggcataa

SEQ ID NO: 139689 - DNA, 198 bp, Enterobacter cloacae
gtgttgtgggccctcatggtgttgctgatgaatatgcatgacgtgagtgaatcagtggccgggctggcgattgcgctgctgacgctgatggtgtgctcatctgccggagaacgtgtgaaacgcttctggccgcggcagttcttcgtgatgttctatgccgtgcacctggcggtactgggtattgtcgtctcaatgtga

SEQ ID NO: 139690 - DNA, 408 bp, Enterobacter cloacae
atgtttattctgcgccagctggagttcggcctgttcgatttccgcctgcatgcggagtacaaaccggagcagggagcgaaaatccttgagaccctggccgagattaaaaagcaggtcgccgtggtgccggggccgacctggggccgcttcccgcacgccttcagccacatcttcgctggcggctatgcggcaggctactacagctacctgtgggccgacgtgctggcggcagacgccttctcacgcttcgaagaagaggggattttcaaccgtgaaaccggtcagtcgttcctcgacaatatcctgagccgcggcggttccgaagagccgatggagctgttcaaacgcttccgcgggcgtgagccgcagctggacgcgatgctggagcattacgggatcaaaggctga

SEQ ID NO: 139691 - DNA, 285 bp, Enterobacter cloacae
gtggatcaggaagccgacgccggtgaccacggagagcatggtcagagacagaccatccagcaccaggttgaaaccgatgttgaagttaccgaccgacatccagttccacagcggtacgctgtaggcctgacgtccattgttaaagaagtcgatacccgcatacgctgtgaccagcgcagccaggccgatagagccaatgcccacggtggcagacagattctcagaccagcggccgcgagaaaacgccagcagcacgaagccaatcagcggaaaaataatggttaa

SEQ ID NO: 139692 - DNA, 177 bp, Enterobacter cloacae
atgatcatcaccgtcatcggcaccatcagcttcagtttcttgttggcatgctcaagcagttcaaactgtccggagaatgccacactggttcccggtctcagtttcactttctcgctgatggccgtcttaatgtcgttaaccaccgacaccatgtccctgccgcgggcatcaacataa

SEQ ID NO: 139693 - DNA, 219 bp, Enterobacter cloacae
atgctgcttatccagctgactcttgcagcctgcgcggcgatcattatgccgcttaccacgccgatgatgctggcggatttcagcgccgtcggcggcatgctgctggtggccaccgggctgcgcatctgcgggataaaaatgtttgccgtagtgaatatgctgcctgcgctggtgctggcgatgccgatttccgcggcctggacgctgttttttgcctga

SEQ ID NO: 139694 - DNA, 159 bp, Enterobacter cloacae
atgggagcaccgatgatacaactgctttacaaaatgcacttgatgcttcgattaacaaagttcttattttggcgcccaaaaaataccgtgctcgaaatctctttattaaaggtccacttattattaaaggtgccggaagacgaatcgatgcggccttga

SEQ ID NO: 139695 - DNA, 123 bp, Enterobacter cloacae
atgctgggcatcaaccgtttccggggtgacattcagacgcaaggcaacaaaggacatgcccagctgctcaatataagaggcgtcagcctggttctgagacaccgcaaagggggcactgaataa

SEQ ID NO: 139696 - DNA, 210 bp, Enterobacter cloacae; identical to SEQ ID NO: 125387

SEQ ID NO: 139697 - DNA, 501 bp, Enterobacter cloacae; identical to SEQ ID NO: 83644

SEQ ID NO: 139698 - DNA, 1497 bp, Enterobacter cloacae
ttgtctgcaacaagtgcagatcttgaatatcaacttcagtctgctttgttgcaaacctattggtatgatggattaaatgataaaccacttgaagttaaaaaaattgcgatactagcttctgattttgcagataggctgtattactcttcacctcgtatttatagtgaactggttaatagagataatctgtctagcagcagtgttaaggctcgacgtttattactacatgcaatgattcagcatgagaaagaagatttcgttggattctctggataccctgcagagagagggctttatgatacgctcatacaccaaactggcttacaccgtaaaaataaagatggagagttatcgtttctttctccggaaaaaggctcagctagtaatttgaatggtttgtgggatgcaacacaagctttattcaccgatgttgatagcaaaatttcgatagataaaatttatgagttttggtcattacctcctttcggcattaaacaagggttattaccagtcattttaattgcatttgtattagctcataaatctacggttgcaatatataaagatggcatgtttatgccatatcttgaagatgtagatatggacgagtgtttacaagcaccagctcggttctcattgcgatgggttgctctcgataagaacaagaacgagattttagaaggtatatcaagcctattgagtgaagtatgtgaaaataggactagcatcgaccctcttgatgcagcaagaggcttggttggcatggtttataacttacctgattggactagaaaaacacagaaaattagctctgttgcaaaatctgttcgcgatatgcttttgaaagctaatgatccacacaaggtactttttgttgatttggtcaccttactcaaggtttcggatggaaaaagttatatagaagttttaaggccaataattaaagaattattgtatgcctatgaaaaacagttatcaaaagtaaaagagaaacttttcttggccttagatgttaaccctaatgatatccagtctctcaagattagggctagtgctgtatctggtattttaggggatataagactagatgcctttgctggacgtttagccaattttgagaatgatgtagtatctatcgaaggtttggttagttttgctgttgagacgccaccaaaagggtgggttgatcgtcatattgatgctgcaatattagagctaagtaaattagctcgacgttttcgagaggcagaagcatttgcatctgtccaagggagagaatcacatagtgaagcaattgcattggttctgggaaccggttccgaaactgtaactgtttctcgttccttcgcaatttcggaacaccatcaggacactataaaatcaaaatttaaagagattgtttcaatattacaaaaccagaatctaaacactgaggtagctttggctattattgccaaggttggaatggagcttgttgtcagtgaaaagggggagtag

SEQ ID NO: 139699 - DNA, 288 bp, Enterobacter cloacae
atgccaacggagtttgaatgggataccaacaaagcgaaaagcaatctcattaagcatgggatccgctttgaagaagctgttctggtgtttgacgatccttaccatttatctttgcaggatcgtcatgaaaatggagagttccgttggcagaccattggccttgtacatggtctaattgtcattatggtcgcacacacggtacgttttgaaagtggtgacgaagtcattcgaatcattagcgcacgaaaggcggaccgtaaagagaggagccgttatgagcatggttaa

SEQ ID NO: 139700 - DNA, 516 bp, Enterobacter cloacae
atggtcgaccttaacctcaccgtccgccccacgcgtcccggcgacgttgcctccttgcccgccattgaacgcgcggcgggcgagcgctttcgtgaagacccggagctcgcctggcttgccgacggtgaggtcatttccgctgagcatcaccttgagtatgttgaacgtgggctaagctggctggcgctggcgaacgaccagcccgtcgggtttatccttgccgaggcccatccttcatcactgtttattgtcgaactctcggttgatctggagtggcagggaaaagggatcggcaggcagctcatcgcctgcgtggcagaccatgcccgtaaaagagggctgacagcgctgacgttgacgacgttcagggacgtaccgtggaacgcgccgttctatgcaaagctggggtttgaatacatagctgaactcacgcctgaactgcgtgaaaaacgtgaagaagaagcagcgcacggcttagcgtataactcccgctgtgccatgcgtctgccgctttga

SEQ ID NO: 139701 - DNA, 411 bp, Enterobacter cloacae
atgaataccgatcaactcgtggcgctttgtcagcgccatcacgcactgctgctcaccagcgacagtgacatggtcagcatcgccgtcgtgggcagccccgcggctgaactcatggaggcgctgcgcttcgcgacccagaaacggattgatattgagtgctggagcgctgagcgcatggaaaaacaccggcagctaacgtcacaatcgcatctgcccgtcgtttcgcaaacacactcgacggtggatatcctcaaccacacgctgcagcaggcaatcaaccagcgcgcatatcgaaccgatggagcatgcatgccagattcgtttacgcatcgacggggttctttgcccccagcctccgctttccgcctcgctggcaagcctgttcagcgcacgtttaaaggtgctgggtaa

SEQ ID NO: 139702 - DNA, 597 bp, Enterobacter cloacae
atgctgaacggaattcgggaaaaagggctgagcgctctgaactggacgccggaagcggagcagtaccgcattcgtctgcactgcgccgcgaagtggctaccggaatatagttggcctgcggtggatgacgagacgctgctcgctacgcttgagcgctggctactgccgcaaatgagcggcgtacactctctgcgagcccttaaggcgcttgatgttaagaccgcgttacagaatttactggactggtcattacgtcaacgtctggatagtgaactgccagggcattacactgtgccgaccggaagccggattgccatccgttatcatgaggataatccgccagcgctggcggttcggatgcaggagatgtttggtgaagccaccacgccgtccattgcggaagggcgtgtgccgttagtgcttgagctgctgtcacctgcgcatcgtccattacaaatcacccgagatctgggggcgttctgggcgggaagctaccgtgaagtgcagaaagagatgaaggggcgatatcccaaacatgtctggccggacgatccggcgaatacggcgccgacgcggcgaacgaagaaatattcgtag

SEQ ID NO: 139703 - DNA, 2526 bp, Enterobacter cloacae
atggcggggaatgaccgcgagccaataggacgtaagggaaaaccaacgcgtccggcgaaagaaaaggtaagccgtcgtcgcctcagagatgaggactatgacgatgactatgaagacgattatgaggatgaagaaccgatgccgcgtaatggaaaaggcaaagggcgtaagcctcggggcaagcgcggctggttctggctgctgctgaagctgtttattgtttttgttgtcctgatggcgatttacggcgtgtatctggatcagaagatccgtagccgtatcgacggtaaagtctggcagctccctgcggcagtgtatggccgtatggtgaaccttgagccagatatgtccatcaccaagaacgagatggttaaactgctggaagccacccagtatcgtcaggtgtcaaaaatgacgcggcctggcgaatttaccgtgcagtccaacagcattgagatgatccgtcgtccgtttgatttcccggacagcaaagaggggcaggtgcgcgcgcgtctgacctttgacggcgatcgtctggacaccatcgagaacatggataacaaccgtcagttcggtttcttccgtctcgatccgcgtctgatcaccatgctttcgtcagcaaacggcgagcagcgcctgttcgtggcgcgtaacggcttcccggatctgctggttgataccctgctggcaaccgaagaccgtcacttctacgagcacgatggcattagcctctactcgattggccgtgcggtactggctaacctgactgccggtcgtaccgtgcagggggcgagtacgctgacccagcagctggtgaaaaacctgttcctctccagcgaacgctcttactggcgtaaagcgaacgaagcctacatggccgtgctgatggatgcgcgctacagcaaggatcgtatccttgagctgtacatgaacgaggtgtacctcggtcagagcggtgataacgaaatccgcggcttcccgctggcgagcctgtactactttggccgtccggtagaagagctgagcctggaccagcaggcgctgctggtgggcatggtgaaaggggcgtccatttataacccgtggcgtaacccgaaactggcgctggagcgtcgtaacctcgttctgcgtctgctgcaacagcagcaggtgattgaccaggagctgtacgacatgctgagcgcgcgtccgctgggcgttcagccgcgcggcggcgtgatttcgcctcagcctgcgtttatgcagctggtgcgtcaggagctgcaaagcaagctcggtgataaggtcaaagatctctccggcgtgaagatcttcactacctttgactccgtggcgcaggatgcggccgaaaaagcggcggtggaaggcattccggcgctgaagaaacagcgtaagctctccgatctggaaaccgcgatggtggtggttgaccgtaacaccggcgaagtgcgcgcgatggtgggcggggccgagccgcagtttgcgggctacaaccgtgcgatgcaggcgcgtcgctcaatcggctctctggcaaaaccggcaacctacctcacagccctgagccagccaaatcagtatcgcctgaatacctggattgcggatgcgcctatctccctgcgccagcctaacggccaggtctggtcaccgcagaacgatgataaacagttcagcggccaggtcatgctggtggatgcattgacccgttccatgaacgtgccaacggtgaacctgggcatgtcgctgggactgccggcgattgtcgatacctggcaaaagctgggcgtggcgaaagatcagctgcacccggtgccggcgatgatcctcggtgcgcttaacctgacgccgatcgaagtggcgcaggcgttccagaccattgccagcgggggcaaccgcgcgccgctgtctgccctgcgctcagtgattgccgaagatggctccgtgctttatcagagcttcccgcaggcggagcgtgccgttcctgctcaggccgcctacatgacgctgtggacgatgcagcaggtcgtgcagcgcggtaccggccgtcagctgggcgcgaagtatccgggtctgcatctggcgggtaaaaccgggaccaccaacaacaacgtcgatacctggttcgccggtattgatggccgtgaagtggtgatcacctgggtaggccgcgacaacaaccagccgaccaagctgtacggcgcgagcggggcgatgtcgatttaccagcgctatctggcaaatcagtctcctgtgccgctgaatctggttgcgccggaagatatcgtcgatatgggcgtggacagctccggtaacttcgtctgcggcggcggaatgcgtacgctgcctgtctggaccgcaaacccggactcgctgtgccagcaaagccagccagaacagccaacgggtaacccgttcgaccagtcttctcagccgcagcagccgcagcagcaacagccgcagcagcagaatgagaagaaagacagcgacggtgtcgcaggctggattaaagacatgttcggcggtaactaa

SEQ ID NO: 139704 - DNA, 993 bp, Enterobacter cloacae
atgcagatagcaaaatcgtttttcttacttttagttctggcgacggcagcactctttatgccgcacgcaaaggccaactgtgtctcacccaatttaccagcgctgctatcgttagcgtctatttcagtgcctaccagccttcccgtgggagagaccatcccgggaacggaacgttcggctcacattgcggggggctgctatacagccgaagacgcaggccgccagatcattgcctgttaccacggcctgggtagagagactcccaatatccctggtgtttatgagtcgggtgttgccgggatcggcgtgtcgctccgaaacagtaaaggggagcgtgtgatgggagcagcagaccaaatctgcacaactaagtcttccgtgggtcaggtgtctgattcgacgggtagcgatggttcatttgcgtttagcttcgacgtctcgctggaactggtgaaaaccagcgaggtggttaccgccggtacactcacatccagtaatacacaatttggctttggtgttgagcaagtagaaagcttgagttatccaaacaccctctcctactcaggtaacgtggtggttaaagcagtcacctgcaccgtatcacccaaatctctgaccgtcacgctgggggattttccggtgagccgttttaccggtccgggaaccctggtctcccagtcggtattcaatatcgacatgctctgcgatcaggatgtacagccggaaatgatggtcaccagtgccaatggctatgaaacgaattttcctggcgtgatcaaattaacgccggaaaacggcgtggcgaccggcgtgggggtgagaatgctctttaacggtcagatgcctgttttcgggcaatatatggatacctttaccgcctatgccaatatccgctcgcaatatcccttcagcgtctcttacgaacaaaccagttcggaggtgacgcccggaacggcgaatgccgtcgcaaccattacggtggcctacaaatga

SEQ ID NO: 139705 - DNA, 2499 bp, Enterobacter cloacae
atgtacagcacaactaagccgctattacgtcgactgcgtgaaatgctgcccactttttgtgggatagcggtgacatgctgcgcgctgcaggcccacgctgatgattattttaaccctgccctgctggatattgataatccagagcaggcaaagaccgatctctctgtttatgaaaacggtcccggtcaggcgccaggtaaatatcaggtcacgatgttcgtcaataacaataaaatcgacacccgtgacgtcctttttacattacaaaaagatgcgcagggaaatgattctctgcagccatgcctgagtctggatgaattaacgcatctgggcatcaaaaccaaagattattcaaagctggcggcaaaaggagaatgcgcggatctcagcgccatcccttcggcctcggcgactttccgcatcaaaaaccagcaactactgctgagtattccccagtcggcgctgggccaggtgcctcgcggctatatcgatccgaaagagtatgacgaagggatcaccgcgggcatcctgaactatagcgttaacgccagccaaagccacgcccgccagcatgggaaagcggacaacagcagccagtttattaacctgcgccccggttttaacaccggtgcctggcgcgtgcgaaattacagcacctggaaccacaattcggatggcggtcagggcgacggcaagctgaccccggtctatacctatgcccagcgcgatatcgtggggctgaagagcgagctgaccgtgggacagagcagcacccaggccgacgttttcgacagtgtctcttacactggcgcacagctggctaccgaaagcgacatgctgccggacagcgagcgcgggtatgccccggtggtgcgcggtacggcgcacagtaacgcccaggtggtagttcgccagaatggctacgttatctaccaaaacaccgtcgcccccggcgcgtttgagattaacgatctctaccccaccggcagcagcggcgatctgaacgtcacggtaaaagagaccgacggcagcgagagtcattttgtggtgccgtttgcctccgtgccggttctgcagcgggaaaaacacctgaagtacagcgtcgctgcagggcgctatcgttcatacgataaagaggttgagaagacccctttcgcccagggcagcgccatctatggtctgccacacggcgtcaccgtttacggcggtacgcagcagagttcgcattaccactccgccgcgctcggcgcagggaaaaacgttggtgacctcggggcgttctccgtagacgttacccgcgccaaagcgttactgaaaaagcgcaaaaccagcaacgggcaatcccttcgtctgcgctacagcaaaaattttaccgcgaccggcactcacttttcgctggcgggttatcgctacaacagcaaaggcttttacaccctgcaggacaccatggagtcctggaccagtgcaaacgactggtccgctccacagcagcgccgcgcacgggcagaggccaccgtcgaccagacgcttggcgacaagtggggttcagtgacgctaagcctggtgaaagagagttactggagccagcgtcaggatatgacctccctgagcgttaactacaacaatagctggcacggcgtgagctatagcctgagctacagcgtcaataaaaacagcgacgacacggacgaggacggtaaatccatcagctatgaccgacaaatcggccttaacgtgtcggttccgctcgaccgctggctgcctaacacctgggcaaactacagcctgaacaacggtaaagacggcaccacccacaacctgggcctgaatggtaccgcgctggagggagacaagctgagctggaacgttcagcagggactggacagcgccaataacaacacctccaccagtatgaatgcggattacaaaggcacctacggtgaagtgcgcggcggcgtaagccaggacagccatcagcacaccgtgaacgccgggatccagggcggcatcgtcgcccactctgacggcgtcaccttcggtcagaccctgggcgaaaccgtggtgctgattaaagcaccgggaacacacggcacgcacgttgccaaccagacgggcgtggaaacggactatcgcggctatacgctggtgccctttgtcactccgtggcgtcacaacccaatttcgctggataccgagacgctgccagacgatgccgacgtgacacacgcctcgcagacggtaacaccaacacgcggcgcgatagttcgcgccagcttcgatactcgcgtgggcaaccgcgtcttaatgacgctggcctggaaagacaaaccgctgccctttggcgcaacggtcaccacggaagacaagagcagtgaatttatcgtcggtaacgacggcctggtgtatctcaccggactgccgcagcacggacgccttttcgtttcctggggcaaggaggcgagcgagcattgcgtcgccgattacgccctgacgcaatag

SEQ ID NO: 139706 - DNA, 771 bp, Enterobacter cloacae
atgggctttaaaaacaaaaccgccgtcatcttcggcggcagcggcgccatcggtagttcagtggcgcacgctctggcgcgtgaaggggcggatgtgtatctcgccgcacgcgaccacgccaggctggagcaggtcgccagccgtattcgcgccaccggagggtctgccagcacatttatgttcgatgcgctcgatgattcttcgcagctcccggaccttgcccgcattgatatcgtcgtcaacgccacgggctttatgcacaatcagggcaaacgccttgaggcgttaacgctcgatgagttcaggcagggttttgatcccttcctggccgcctactttaacattgcgaaaaccgtgtcgccccgcatgggcggcgagcatggtggagtcattattaccgtcgtcgcgcctgccgcgaacatgacgatcgcgggccacctcgggcatatcgtcggctgcgcgggaacggaagccttgacccgggcgctggcggcggagctggggacacacaatattcgcgtgctgtgcgtgcgttcgcacgcgatagcagacgcggtgcaggcgggttcgtatgtgggagccattttcgccgccagggcgcaggcgatggggattacggttgagcagtctctcagcggtgccgcgcaaagcaccctgacgcatcgcctgccgacgctggcacaggtggcagacacgattacgtttctggcctcagatgcggcaggcgctatgacgggaaccaccgtcaatatgaccgcgggcgcaacctag

SEQ ID NO: 139707 - DNA, 255 bp, Enterobacter cloacae
atgcagatcgtgttcgaaaccgttaaccgcttgcgcaaggaccctttggtttgtcgtttcaccagagtgcaccccttgttcgagctgggaaagaagggtgatatttttattcaggcctacagcattgttatagtgtggagtaaatacataacggcaggtacaacattgaaagcggggtgttctggcttttgtgtatccatagcgaatgatgtgcgctgtaaaacagcggggacaaccttgtcctgtatttcctaa

SEQ ID NO: 139708 - DNA, 138 bp, Enterobacter cloacae
atgcgagtgattatgtttttcctgtttatcgtctgggctacgctgctcttgaatgtcaaaaatgtggcagtcttcctccactgtttaatacaaaagaatgtgacgagtggttcagtcaattcatgcaacgaaaattag

SEQ ID NO: 139709 - DNA, 1554 bp, Enterobacter cloacae
atgaaaaaaacagtaatcgcggttttattactatcgggatatgcttcgctaagtccagcgcaggacgttaccgtcatttataccaatgacctgcatgcacatgttgagccctataaactcccttatgttgcagaaggtaaaagagctgtcggtggcttcgcaaatattgcgacttacgttaagcaagaaaagcaaaagaataaggctactttttatttcgatgctggagattactttaccggtccgtacattagcagcctgacaaaagggcgggcaatcatagatattatgaatacaatgtcatttgatgctgcgtctgtcggcaatcatgagttcgaccatggatgggataatacgctgatacagctcagtcaggctaaattcccgatactgttagggaacgtgttttataaaaatagtaatgtccttttctggaataagccgtatacaatccttgaaaaggatggcgttaaaattggggtcattgggttgcatggcgtattcgctttcgatgataccgtttcatcgtcaatgcgtcagggtattgaagcgcgtgacgaggtgaaatatctccagcgttatctggatgaactacgtggaaaagtagatataaccgttgcactcatgcatgaaggtttccctgcacgccagtccagtatcggcaatactgatgtcaaacgcgcccttgataaggatatccagacggcgaagcaggtgaaaggactggatattctgattaccggacatgcgcatgttggaacgccggagccgcttaaagtaggtaacacgctggtgctttcgactgacagcggtggggttgatattggtaagctggtcctggatgtggatctaaaaaaacatcacaacaaaataaaaagctttgaacttaagaccctttacgctgatgaatggaaacccgatccggcaactcagagtgttattgatagctggaataaaaagctctccgaaacggttcgccaaaaagttggagagacgcctgttacgcttacgcgcgcctacggggaatcatcttcgctgggcaatttatttaccgatgcaatgcttgctgctgcgcctgatgcgcaactggcgctcactaattcaggtggtctgcgggctgatttgaatgccggtccgataaccctcggcgatgttattagcgcgttcccgtttccaaatgagcttaccgtaatggatttgaatgggaaatccttacgaaatcttatggagcatagtgcgtcactcactaacggtgttttgcagatgtcgaaaggactggagatgcgctacgaccaacataaacctgtcgggcaacgcgttgtgctacttacgcttaatggcaagccaattgtagactctgatacctatcgcgtagcgacaaatagtttccttgcccctggtggtgatggctttactgcattcattgatggtcagaacaaacaggtaaaaggtggatataacctttccaatgcggttattgattatctggtgaaaggaaataagatcattccccaacaggtgaatgagatgcgagtaaaagaagttacacagtaa

SEQ ID NO: 139710 - DNA, 1104 bp, Enterobacter cloacae
atgatgaagcgcaatattctggcagtggtaatccctgccctgctggtagccggtgcagctaacgctgcagaaatctataacaagaacggcaacaaactggacttctacggtaaagttgtgggcgaacacggcttcaccacttctggcgtacacaaaaacgctgactcctcttacggccagatcggcttcaaaggcgaaactcagatcaacgaccagctgaccggttacggtcagtgggaataccgtgcacgcgccggtgcagctgaaggtgatcagactaacgtaactcgtctggctttcgctggcctgaaaatcgctgacgcgggttctctggactacggtcgtaactacggaatcgtgtatgacgtagaatcctacaccgatatggctccgtccttctctggcgaaacctggggtggcggctatgttgataactacatgaccagccgttctactggcctgctgacctaccgtaacaacaacttcttcggtctggttgatggtctgaactttggcgttcaataccagggtaaaaacgatcgtaaaaacctgaatgaagcaaacggcgacggtgttggcctgtccctgggttacgagttcggtgaaggcttcggtctgatcggtgcgtacagtaccgctaaccgtacgcttgagcagaaaaaagatggtaaaggcgataaagctgaatcctgggctgttggcgcgaaatacgacgcgaacaacatctacctggcgaccgtttatgctgagactcgcaacatgagccgcctgggtaacagcggcgaaaactatgttccgaatgatgatggtaatgtttataacattgctaacaagacccagaactttgaagttatcgctcagtaccagttcgacttcggcctgcgtccttccgtttcttacgttcagtccaaaggtaaagacctgaacggcatcggcgaccgtgacctggcgaaatacatcaccactggtgcgacttactacttcaacaagaacttcaacgtgtacggtgactaccgcttcaacctgctggacgacaaagatgcgtccaccagctgggttggctctgacaaccaggctaccgttggcgtaacctaccagttctaa

SEQ ID NO: 139711 - DNA, 744 bp, Enterobacter cloacae
atgaacactgtaacgatcaataacaaacagctgccggcagtagaatatcgcggtcagcgcgttgtgacgctggcgatgattgatgaagtccaccagcgccctgacggaactgctggacgtaatttccgagaaaacaagtctcgacttattgaaggagaagactacttcgaattaggttccgacgaaattcgtcgacacctgcctgacggtactttctccaagtttgcagcatcaggaattgtactggtcgaatccggttatctgatgttggtgaaatcctttaccgacgatctggcctggcatgttcagcgtgagttggttaacagctattttcgcactcgcgcaccactgactgaaatcgagatgatcgccgcaatggccgccgatgccgttcgccagcaaaagcgcctgaatcatgttgaagagcagatcgaaacagtcacagaagctgtggagaacatcaaacgcgggaccatgcgcgccggatatgtcggttaccgccaggtggtagccaaaagcggaatgagtgacgccaaatgcaggaatttggtcaatgcctaccgcatcccgacagacacgcacgaatttatgactccagacgggctgttgtcacgtagggctatcgtcgaactggagccgtttatggccgcgtttcgccagatgatgtcagaagctgagccgcgcggcacccgctggtatcaccctaaaatgggcctgttccaggcgattgggtgggagggttaa

SEQ ID NO: 139712 - DNA, 870 bp, Enterobacter cloacae
atgattatgaaaaaaacattactcgcagccggcgccgtgctggcactttcttcctctttcactgttaacgcagcggaaaacgataaaccacaatacctctccgactggtggcaccagagcgttaacgtggtcggcagctaccacacgcgcttttctccaaagctgaacaacgacgtctacctggaatacgaagcgtttgctaaaaaagactggtttgatttctacggctacatcgatattcctaagacctttgactggggcaacggcaacgataaaggtatctggtcagacggttccccgatgttcatggaaatcgaaccgcgtttctctatcgataagctgacgggcactgacctgagctttggtccattcaaagaatggtacttcgccaacaactatatctacgatatgggcgataacaaaggcagccgtcagagcacctggtacatgggtctgggtacagacatcgataccggtctgcctatgggactgtctctgaacgtgtacgcgaaataccagtggcagaactatggcgcttccaacgaaaacgagtgggatggctaccgtttcaaagtgaaatactttgtgccaatcactcaggtttggggtggccagctgacctacatcggcttcaccaacttcgactggggctcagatctgggtgatgacaagaaccgtaccagcaactcaatcgcgtccagccacgttctggctctgaactacgatcactggcactactccgtagtcgcgcgttatttccataatggcggccagtggaaaggtggagataccgtgaactggggtgatggtgacttcacgtcaaaatcaaccggttggggtggctacctggttgtaggttataacttctaa

SEQ ID NO: 139713 - DNA, 2634 bp, Enterobacter cloacae
atgaaaaataaaagtgcagtgagcacacaggctaattcaaaggtattgcacgccaaactggcgccgacctgctttgcgaccatgcttgcgctgggcatgattatgccagctcaggctgccatcgtggcaggtaataccgataaaccggccattcatacggatgcaagtggcgcaaccattgttgatatcaacaaggcgagcgcaggtggagtttcccataacgtttattccgaatttaacgtcgacagcaacggcgtgatcctgaataacagcggcacagcaaccaacacccaattagcaggccagatcaatggcaacgctaatatggccggcggcagcgctaaagtgatcctgaacgaagtgcgttcatccgatccgagccagctgaacggcatggtcgaagtggcaggccagtccgcgcaggtgattatcgccaacccatcaggcatcacctgtgacggttgcggctttatcaataccaaccacgctacgctgaccaccggtaccgccacctacgacaacaagggtgatgttagcggtctggatgtgagcaaaggccaggtgaccatcaccggtaaagggatggatactcgttctacgcagtacaccgacattattgcccgttcagtgaaggtcaatgcgaaacttcaggctaacgaactgaatatcgtcacgggtaacaaccacattgataaatatggccgcgtgcagaagaagtatgacagcagcaatgcccctgacgtagcgctggatgtgtctgcgctgagctccatgtacgcgaataaaatctatatggaaggcactgacgccggcgttggcgtgcatatcgatcgtgctgacctgacggcatccgacacgctgtcaatcaacgttgatggtgtggtcgaaaacaacggtggacatatcagcggtaaaaattcagctaccgtgatgggaagtgatgtcctgaaccataacggccagattacctctgagggtatggtgtccgttgccgcagacaatgcgctggacaacgctaacggcgtcattaaagctgcgatggttaacgtttccggcaaaaataccgttaacagccatggttccattcagggcagccagaatacctttattaccgctgactcgctggacaaccgcgacggtgaaattctcagcaatggcgatttgacgatcgaacgcgcctcctggaattacaacgcgcagggcgtgaataatacccatggccgcattgttgctaaaggtgccctcaacgtagatgctgccagcctgaacaactccgctggccgcgtagaaaccaacggtgcgatgagcgtcaatgtcgacacgctgacgaacgacaacggtcttatttccgccgggaacggctggaacatgatcaacgcctccatgctgaataacgacaacggtgtgattcagtctctgggttctgacagccagcttcaggtgagcggcaacaacatgctctctaaccgcaatggttcaatccacagcgacggctctgtttcaatcaatggtgcgctggataatatgtccggcaccatcgcagccgaaaaagacctctttatgtacggcacgtcttactattctgaccttgccagtaagatggaagcaggcggcaatatcgacatgaccgtgaccggtacgttccagaacgccggaaccctcaaggcgggtcaggatatgatgttaaccatcggttctaatggctggaataactatggcggcccggtgcagaacagcggttccatcgcggctggcggtcgcctggcgctgcagatgaacagcagtcagttcgacaacagcggcgacattaccgctaatcagatggatcttcagctggcagacctgtccaacagcggctcgatcgtcagcaagaatgatatcaaccttaacaccactagcctggaaaaccggggtaacggtacgctcgtcgcagaccataacatcaacattaccgcctcttatctgatgaccgatgcaggcagccagatcgctgccggttctgatgccatgctgtttgtcatgaacaacctggacaacagcggtgatatccgtgcggcgcatgacattaatctcaacgtaatgggcagctacggctggtctcagagtaccgcctataactacggcacgatgactgcgggtaataaactcaacgcacagatggaccgtgtcaacctcattaacggcggtacgctgtctgctgataacggtattaccctggtcagcaactacctgaccaacagcggtaacatcaccagtgcaagtgatattacgctgaatactgccagcggtattaacaacgaagccagcggcaatattaccggcgatcgcgtgtacaccacaggctacgttaataatatgggtattattaacgagaccggtgctgcgaccacggataacggtgcaacgaccccggataacggtgcaacaacgcctgacgacagcaataccaacccagactcagatgccacggcggataacagtggaaataccaccgttaagccaaacggcacacctgaaggtaatggcgtttgggaaaacggcgtagtttatcacccgggtgatatctattacggctatgttgttcaggacattatttattatcctggcggctatgtcatcgctaccgcagcgtaa

SEQ ID NO: 139714 - DNA, 1104 bp, Enterobacter cloacae
atgaaaaaacctctcttcatctgcgtggtgttaatcatgattattgcttcagctgcgagtttaccgtttgtactgaatgccggattcggccagccaccgcagggtgagcagctcaccgaagtggaggcctctccccagtatcgcgacgggaaattccacaatacgctgccgacgccgggctataacggcgacaaaaacatgctggtcgcgacgtgggattttctgaccaaaaaaaccgaaaacgcgcgcccggcccagccgctgccgctggtgaaaaccgatcttgcgagcctgccgctggagcaggacaccctggtgtggctcggccactcctcgtggtacctgcagctcgcgggcaaacgcatcctgattgacccggtgctcggcaactacgccgcgccgttctcgttcctgaataaagcctttgccggggagtatccgtggcgcgctgaaagcatgccggaaatcgacctgctgattatctcgcacgatcactacgatcatctggattacgccaccatccgggcgctactgccgaaggtgaagcgcgtggtgacgccgctgggcgtgggctcccacctgcgctactgggggatgaagcctgagattattgacgagcgcaactggaaccagtcggtgcgcatcagcgatgaactgacggtgcatgttctgccggcgcgtcacttctccgggcgcggcatcaagcgcgatcgaaccctgtggggcagctttatgttcgtcacgccagagcagaaggtttattacagcggggactccggctacggcccgcactttaaggccatcggcgagcagtttgatggcgtggatgtcgccatcatggaaaacggccagtacgaccaggactggaagtacatccacatgctgccggaggaaacggcgcaggcctcggtggatctgaacgcgaaagccgtggtgcccgggcataacggacgcttcgtgctggcgaaacatacgtggaacgatccgctgatccagctggctaaagccagcaaggataaaaactatcggctactgacaccggcgctgggcgagcccgtccgggtgaatgacgccgcgcaaacctttcgcgcgtggtgggaataa

SEQ ID NO: 139715 - DNA, 426 bp, Enterobacter cloacae
atgctggcttatatcacaataggtacaaacaactttcagcgctccgtgaatttttatgacgcagtttttaacgttctgggctattcacgtctgccggcatggactgaaagctgggcaatgtggggagatgaaaataatcccggcgaggggttcagcttctgtctttgtcctccttttgaccagcagcccgcgacggcgggaaacgggacaatgttcgcattcagtgcagataatgcggatcttgtcagacggttccatgcagctggcctccttgcgggaggaacggatgaaggcgagcctggtacgcgaagcgcgtacggccccagcttttatgttgcctatcttcgcgatcctgacgggcataagctcgcatgcgtttatcagcattactcttctgaagccgacaagtttgtagacaaggaatag

SEQ ID NO: 139716 - DNA, 594 bp, Enterobacter cloacae
atgcttaacccaggattcgttacccgcaaagcgcttgctcagtggaaggatgttcccgcttttctcccccagttccagtttcatgaaaaacacctgacggtcattcacactagccgccctgaaaatattctgccgatgattgccagctttgacgtccggcaagatgccgtgattcggcggttaatgtcattgcgtcaaataccgcaaaaatttctgcgcaatcagaaggcacagtcgatcggcaactttggtttgcacagttttacccttttgaaaaattcagcttcagaaatctgttacggcttaagaggacaattctggcgttccgatttcggtctggaaaacgtgccggatgccagtgcttttcagaccccagccgagccgggcagcgcgaaactgttgctgcgctacaaggtaacggagctggcgcccggcaaacatgagctctctacggaaacattcatctattgtccggacagacgcactcgactaaaaatgtcggcttactggctgataatacgggcgggaagcggctggatccgtaaaaggactctgaaggctgttaaatcaaatattgaaggacgggagtcataa

SEQ ID NO: 139717 - DNA, 240 bp, Enterobacter cloacae
atgaattatgcagcagccatcaaagcggcaaaggatctgacaaacgcgctccctttcctgggatcacgcccgtcgcggcatgattacgaggatgcgctgacattggtgaagatgctcaccactaaaatcgataaatacgaaaacaagtctccggtgtttgcaaaatttaacgcgcgtgttgccagcattccgtcaggcgttgcgttattgcgaacgctgatggatcagtaccaacgttaa

SEQ ID NO: 139718 - DNA, 648 bp, Enterobacter cloacae
atgaatgacagcgaaaaacgcgatgacatgctggctgcagaatatgccctcggcactctgcgcggaggggcgcggcttcagttccagaaaagacttgccgctgagcccggtctggctgcccgcgtgatgtactggcaggaaatgttctgcacgctcgacagtcatctcgcgcccgttcacccacccgagacggtgtggaagagaatcgccctcgatctgccgcccaagaagcctttgcgccaaagccggccctatctcggctggatggtcgcggccggcctcgccgccgttaccgtcgtgacctggtattccacccgaacgccggaactcgcaccgctgatggtgctcaacgatgcccaacagcacgggcaatggatcgtcagtgcggacagccgccgccagtatctgagcatcacccctctcagaccgaacgctgtcgcggcgcaaaacagcctgcagctttggcttattcctgccgggaaggccccgatatcccttgggcttctgcaaagtgatataccgactcatgttgccctcaggaacaacacccttacccctgacgcgatgatagccataagcctcgaacccgaaggggggtcacccaccggtcaacccaccggccccgtgctgtacagcggcaagatttaa

SEQ ID NO: 139719 - DNA, 1164 bp, Enterobacter cloacae
atgacaactatactcaagaaacgggccgtctgggtttcattggccacggcattgagcctgaccgcaaccagcccgagcagggccgcgactttacttaatgactgcttcggtgcgccgcaagcctacaccacgacgttcgatcatgagttttcgtccagcgaaaatatcgccaatcatgactatgatgtgccaaatcatctggtcggcaatggcccggtgatggtggccaactgcagctgtcccggaaatatattttcttcgagcatggtttatgaaaaaacgtttgccgggagcccgctgaaaccgggaacaaacggatacggctatttgaccgaaaagatcgatgccgatatcaccgcctatgcggatgcaatcaactctccggacggcacttctttgaccccgatagctatcaatgaatacccgacgtccagagctaatatgcgtaacactagcgagaatgcactcgccaaaacggagggaaatgccaacgtttgcagtagtggcacccagccgagcaacgccgctacagtaaagcgtaatttccgctggaacgtcgttgcgatcctgcttcacattaaaaaacccatcctgggtcaagaggtgatcccttcgacgatcgtcgcgcaaaactatgcctgtctttatttcggctcggggggaagctgcgatccagggcaggcagatcaggtttctgatatctggtttagcggcacgctttctgcgccgctaagctgcgttatcaacgaaggcagcaccattgaggttgagttcggcagcatcgtcagcaagcaattcgtcatcaaggggcaaccgccaaaacgttatgccatcaaaaacgttgatatttcctaccactgtgatgataacgcagtgggaaacacggaccggataaagctcacgctgaccgcagatcagggcgtcgcggatagcagtacgccgtacattgcaaaacttctggacagggacgatctcggggtgcgtgtatatgatgaaaacagtcagaacgtcgcgctggacgggacctatgagtttccggtgacgatggacgagcagggaaacggtgtggtcaaaattcaggctgtaccggtcagcacgaccaatacccctccggccccgggccgctttgaaggtaacgtgacggtgaagatggatcttcgctaa

SEQ ID NO: 139720 - DNA, 576 bp, Enterobacter cloacae
atggatttcaaaaagaatattattgcgggcttagcccttgcaacactgtcaatgaatggtttcgccggagaaatgaatgccggcactattcacttcacgggtgaaattatcgaatcaagctgcaccattcagggtgacgacggcacggacagtactatcccactgggtacctatcctacatcattgtttactaccgttgggaaggagaccgcacttaaggagttctccattacgctggcgaactgcccgttaacaagcgccgggcttccggctgttcagctgaccttcaacggcccaacgaccctgaccaagaccaagacgctgctggacgtcagtaaaattaccaccacgggcgaaaccgcggccaccggtatcggcattgccgtcagcccggcgggtaaagatgataaactcatcacgatggacggcgctgaagggcagatctatatcgaactggcgacaaaatccgaagatacgattaaagctgattttaatgcccgctataaatcatttgcagatgcggttaccgccggtccggcagatgctgatatgacggtaaatattctttaccgttaa

SEQ ID NO: 139721 - DNA, 222 bp, Enterobacter cloacae
atgtggcaatcgataaaagcatttttgaaacaatttttaaaaagtttcttacaagacattctggatgattttttttggtatggcactggaatattagccatcattctcggtgctgtcgtagtgagttttatagaaaacgaaaaaattgcactacgaatcgttgggattattgtattagttgtgtacttcattgcatttcgttacaaaacaaaggatgaataa

SEQ ID NO: 139722 - DNA, 705 bp, Enterobacter cloacae
atgtattacagcaaggaaattatagaaagaattggatccgataaagatctcgcagtaaggctcgatcgcgccgtcgcgggggtaaagaatggcgccatagaatatttaaacaatcttggtgatgccaccacgcgattgctttattatacgtcttgcttcactgataattatcaggatgtctgtaaaaaattgggttcggaagatttgaggtttttagcaggagtcgccgagcttgttaagcatagagatgtaatttttagaatggtaaggatttatattgaaacgatgcttcagaacagatctattattcaaagaaaaatcattctcgaaaaattaacaccatttacaacaaactattcagtaaagcaagtatctaagagcggtttgatttatgccgtcacgtcatacatctgttatggtaataaaatgaacgcggccgtaaaaagtgcatttatgagaaaggttggtttgagcacaggaggtgtaattaccgtattaaacctttacgctatagttcagcatgcggcagacagcgcaaatacacttaaaaaatttcagccgttattttaccatgcgctgtatgttgaaaagctggaaatgatgtatttccttattgaaccggtgataataaaagccggttatcttaacttaaacactgcatctgatagcgaaattgctgatgcgctgaatagaatgatgcgataa

SEQ ID NO: 139723 - DNA, 528 bp, Enterobacter cloacae
atgcggcggtacaggcgaaatttacgcccaaaggtgagtaaggcgggcgcggtgcttgtcgcgatattaacgacaggaatggctggagaagatgcgcagataaatgatctttggatgttcatttccaggatgagtgcttcactcaaaacgctatccgtgaggaatctgagtaatgacgcgttgccgtttaagcttatgaaaggaaatgaatatatcaacttctacaatgctgacgatatccagttcgcggatggaacgaacattaccgcaattggattacgtttaagcaaagataacggcggcatggcgcctttactgaatttttcgccgtccggccagtgcatcactctcgataccgttaaaaagcattatccgcagctgacgttaactgattatccacgaggccgctctgagaacgaagtgaccagctatacagcgccaaaagatatgaatggacaaaaggtgagcttcagtttcaccgtgaaaaatcctgactgtctgggttcagtcgtcataagcgccgaataa

SEQ ID NO: 139724 - DNA, 132 bp, Enterobacter cloacae
atgagcatagataactatgtgattggggtgaacgagcgcagccaacgcgcatgcggcttgaagtatgacgggtataagctattactccgaaaggaggcagtcccttttattgatctcgcgcatcctgtatga

SEQ ID NO: 139725 - DNA, 810 bp, Enterobacter cloacae
atgaggtccttagccgatttcgaatttaataaagtgccgctttgcgatggcatgatcctgatttccgagatgattcgcgacgattttacgtcgcagtttgtctacgatgagctggagaatctggtcagcctggcgcgtgaagagattaatcaggctcgcccgcaagactggcaattagagaagctgctggagcttttctacggcgaatggggtttctgcgacacgcggggcgtgtatcgcctgtctgacgcgttatggctggaccaggtcttaaaaaatcgtcagggcagcgccgtggcgctgggctctattttgctgtgggtcgcgcaccgtctggatattccgctggtcccggtcattttcccgacgcagatgatcctgcgcgctgagtggctggacggcgaaatgtggctcattaatcctttcaacggcgacacgctggatgaacatacgctggacgtgtggctgaaaggcaatatcagcccggtggctgaactcttcaacgaagatctcgacgaggcggataacgcagaagtgatccgcaagctgctggatacgctgaagtctgcgttaatggaagagcgtcagatggagctggcgttgcgcgccagcgaagtgctgctgcagttcaacccggaagacccgtacgaaattcgcgatcgcgggctgatctacgcgcagctcgactgtgagcacgtggcgctgaatgatttgaattatttcgttgagcagtgtccggaagatcccattagcgaaatgattcgtgcgcagatcaacgcgatctcgcacaaacaaattacactgcattaa

SEQ ID NO: 139726 - DNA, 324 bp, Enterobacter cloacae
atgaacgcgaatgacggctcttgtgatatccacaaaacaaaagcccaaaatgcggcgcagcacgcaacagctgcgggccacgaccctttgcgtgaagccactttcacatcggatgcggttaacgccacgatttcaaatggcttttttaacgccaccattaacggcaaaaaggccaccgttaagcgtctgaatgctcatttctatgagattcacggtaatggttttgttatatcgctaagccttgatgagaacggcattacggcggcgtcctggaataagaggacggggcataacaacggcattttgcaggtgtcgcagaaataa

SEQ ID NO: 139727 - DNA, 396 bp, Enterobacter cloacae
atggaatttaaagcacatcctttgtcagttgataacttactttccctaagaaaacaatattatgtttcaaggaatcaacgtgagttttcttgggttgaagagcaattacaagaattttggtttgatcttctctctaacattaaatatgaagccgataaatttgatcatcaagaatattttttaggggcaattgttttagcggggaatgaagatggatttaggctcagtatagtagatggacaacaacgcctgacagttataacaatattaatttgtgctatatgtgaacggctcaaagaatttgatagtgctagtattggtcaaagtttttatgataactacatcgaagggataaacatcgatgaaagtgaagaaagtgctgaatctgcaaaataa

SEQ ID NO: 139728 - DNA, 789 bp, Enterobacter cloacae
atgagtggcggtgtagttgagtctgttaaacaggttctagaagaaagaattaaaaatccgttgtggggttttataatattagcatggttctggtttaactggcctaacctagctatgttgtttatgagtgatgctcctgtaaaattcaggattgattatattttatcgcagcactacttctatcttcaattcattgtggccccagtgatttctgggggatgtttagctattgttactccttatgcccaatggttactgtctaaggctcataaatgggcggaggatagacataggtataatgtattcttgagtaaatcaactgattatgaagattccaaaaaattatctaaactcaaagttcaatccgatagagcagttgaggctgaaaacgcaaaaattgatgctgacattaaagcagaaatcgaacgtggtaaacgggaagcgttagtaactgaagaacttgaagcatctaaacaatccttgttagttgagttagatagtttgaagaattctatctctttaatgaaaaaagaaagtgataaagttcaggatttaattattgaatcattatctgtgatggagaagtttttcaaaatcaatgatagtagctctattcagcagttgcggagtgaggtggaaaatctttattcagcaagtcaaattgagatttcaacgattagaaatagtttgaaggatggtcgggagttaaatgaatcccagcacatggttttattagatagggctgcggaagtattgaagaatagacgagcggatggcgtggggttataa

SEQ ID NO: 139729 - DNA, 618 bp, Enterobacter cloacae
atgtttttagatcatgaggctttttctaaggacccatttggttacagtgcattggcttggcataaatggggagtcttggcagcaatgaatggtacctatgtagatattacaagctctccaacagctaaagatcttaaaaatcctattctctggttgagtcatgctcatgctttatctgaagctgctatttgtatggttagtcaatcgccagattttgaaactatgccgtcaggtatcagaagcatatgccatagtcaatttcatgctgtggctttaatgttggtaggttatagcctcgaagtttgtttgaaagcgatgattctaataaatttaggattggatgaatttcttgctcaagaaaaaaaatatttccatcacaatttggataaattagctggttttattcctgatattaatgacaaggaattggcaattttaaaatgtcttagccatttcgttatttgggcggggcgatacccggacccaggtacaaagcgagtgagcgacagtactgatatatttcttctttcagaaaaatatgagattagtgccaaagatgttttcgagttatcggcaaaagttatgggctatgtaaaaaaaataaaaagcgatgggtaa

SEQ ID NO: 139730 - DNA, 1332 bp, Enterobacter cloacae
atgagaatacgtgatgccctgctttccgcgcgcagttatctcactattctgctggggttcctgctcggctttgccattgtggtatgggttgagaaacaaatgccttcgcgcgtggagagcagcggcggcatcgcgctcagtaaagatttccctccgctgcccgcaaaacgcgagctgacctatgacgaggccatctgggcgcgggtagcctggcaatactacgtgaataatacccagccaaacggcctggcgaacgccagcgacggtgagccctggctgagcctctggagcgtgggaagctacctgtttgcggccgctgccgcagagcagctcaatatcatttccaccgatgagtttgacgagagggtcagcgcggccctgtttacgctggggcagctgccgcttaatgagaaaggcctccctgccgcgtattaccatgcggacaccctcaaaattctgggaaaacctgacgcatccgcaataggcctgagccgcctgctgacggcgcttcagactctcctttggcgctatcctcagcacgcggcggccatccgcgatctgtttagcgtctggagcaccggcacgctgatcgaaagcagcactcaaagccaggcggccgtgccgctccatcactggactctgaccaatgacgaacagcgggacagctttggctatcggctctatgccagccatacgctgcgcttaattgacagtgcggcgggactggcggtcaccaatccgcccgaagggcaaaagatgatcgacctggatgggatcatggttcccgatgaagggctgcgcacgccctggggcaagcagacctccctgatcagtctgccctatctgctaaccggactcgaactgggttttgacgcgcagagcgctgaaattgcgtggcggattatgcagatccagcagcggcgccacggcctgcgctcaccaaaacctcctatcagcacggattatgccgaaccggcaccggattacgttaccgatctgccaaacaggcagccggtacaggcgcgcgccctgcgtgacgaagtgccggagaaagtcgcgatcgcctccacccgcaccgcgtttgcctggtatgccctgttccgcaacagctggagcgaggcgctgcgccagcaggttctgccgcttctggtgccgggtaaaggctggcagcgcggtttcaatcttaataacagcgttaatagcgtcgtggacgccgacaccaacgccatcgtactggaaagtctgtcgtatatcgcgcacggccagatgctctgtctggcctgccttcacacggccccccattcatccactcccgcaggagcaacgccatga

SEQ ID NO: 139731 - DNA, 1218 bp, Enterobacter cloacae
atgagccatattgcgccgccgatcgcgcaagcggatatagtaaaatcaagatcatggcggtatgccattgcaggtgcccgggacctgagaattgactttatgcgcgggattgccctcgtcatgatggtcgtggcgcatacggaagtgatgtcggtatttaatatattctcctgggagcgttttgggttaacaaccggcgcagaaggctttgtcattctttcgggatttatgttggggatgttgaatcgcgctcgtctgcaaaaagtcgtattactcacggtttcgtgggggctttatctcagggcatggaaaatatatcgtgtaaatatcattatcatagtgtcgtttattctcctggcctatatcccgcatattaatcttttcgaggtcactcattttaccgaccgcttttcgggtgaaagctggtcgctttatccggtcacgccacaaataaaagagacctggttcaacattattctctatttgcagattggcccccatcagacgcaaattctggggctgtatatctttttactgctactcagcccgctatttttggggatgctacagaagggtaacgtctggtggctgctgggggcgtctctgctggtgtacggcctttggcagcggtggccgctgcggctgacgccgtcggaattcgaatttgcctttccgctgctggcctggcagttcatctttgtgctgggcatggccagcgggtggtataaagccgaactgatctctttcgcacgcacgcctgcaggtaaagtggtggtggttgcgctggtgatagtggcgctcattctggggttcatagcacagaaccataccaacccgtttatgccccccgcgctgctgatgcacgtgattccgcctgacggcttcaacaccttttatcaaacctgggcggcgaaaaatgggctgggcccggtgcgggtattaaacgatatcgccctgatggttaccgtctatctggtgctgacatactgctggacgccgctcaaccgcctgctgggatggtttcttattccgttaggccagcactcgctttataccttcattttgcatgtgtacgtggtgctgctggtgagtcagttcatcaccttcgatttgtggcgtcatgcctggatagaaaatacgttagtgcatgctgcggcactgggcattttgtggctcatggcaaaatacaacgtcgctgcacgctggatacctaactaa

SEQ ID NO: 139732 - DNA, 216 bp, Enterobacter cloacae
atgcgcgaaaaatggctcctggcgggcgtcttactcgccgcaatacccgcggcggatgcggcgcaaagcaatgagaaagagacgttgcgcgataaaaacggcgagcccgttcaggcaggcgtttttaccagccggtgggggcgcctgttctcaggcaatgacaagaaattttcaggcgctctgagctttagttctgggctgaaagacagatggtga

SEQ ID NO: 139733 - DNA, 426 bp, Enterobacter cloacae
atgcagacgccggagcatgcggaatttccggcggagctcggctccctgacgccgcttgctgactggctgggagaccgtctgagcgcgcttgccgttgacgatgagtggcgtttcgcgctcgatctagccgtctgtgaagtagcgacaaatatcatccggcacgcgctgcatgaggatgcctcacgcgcatttagcgtacagttcgacatccgggaccataatgtccgcgttgtctttaccgacgcgggcgatgcattcccgctggagcggcttgaggccgcccgacgagaccgcttctgcgaaatctcgccgttactggagagcggcagggggctgatgctcattttgctgagcgtcgatcgtttctcggtggagagaaaggcagataaaaatattgccacgcttgataagaaaatcagcgtatga

SEQ ID NO: 139734 - DNA, 291 bp, Enterobacter cloacae
atggcaattcatagcgtaaagttaaccaaaagcagtaacgtaaagcatgttgttagcgctttactcctgatttgtagccggatgggtgagggcgataacgtcgcccttcttaccggtgatgaagcctctgatatttccccttctgactatgtccaggcgttgcctgtgcgcactgcaaaaatcctttctgaaatcactcggcgcggtatgtatttccacgttgcgccacacagtcatttcggcggcatcttcattgccaaaaatcacaaatctctgaaaaagaatacgtga

SEQ ID NO: 139735 - DNA, 528 bp, Enterobacter cloacae
atgcgcgattttgcactggtgtttcgtcatgcctgggagctggcaaaaaagggagcagcaacttacggcggttctgcaaggcagtatttccgcgaatctttacgcctcgcttatgacagtctgaaaaggaatgtaacggcgcgtgaccttgtgaaaataatgattaaccgcaagctgtctatgggccaaatacgcgaagaggtcaatgctaagtttcagaagcaaacggctaagaatatcgcccgcagaatctggaatatgtttcgatctccttacgttgagatcgacaaagttaaatgcaaggaaacaggaaaatacatttaccacttaaagaaggtcaaaaagaatttttttgtaagtggggctattacgcgtgcgctgaaatcagccaggccggaaaagaagaaagccattaaaccgcgcccggctatgtctaaggaagaaattaacgcgtgcaggctcgctaatgcgtttcataacgcattgcgtactggtgtttatatcgagcctcaattaattgagaactga

SEQ ID NO: 139736 - DNA, 723 bp, Enterobacter cloacae
atgaaaaaacaacaaaagattgtccagtttcgagctgatgaggaggtctacaaccgcgcccaggagcgcgtgaccaatgagtcaattcagttcccagacgtgatgcgggccgctctcaaggccatcgcggagggtgatgtcaccccgttcgctgacatcattggtgaatctgagcgcagcggagatgaagctaatcaagcatggctctatcacaagtgtcatgagcttttcgaatataaagccgggcaattgctgcgcaaatcaagaaagggtatgggtgagcaaggcacggcggcatatgtgcgtattcgcggcggtgaagagaatattttgattcaggggaattattacccactgaaagacattatctggctgatggctaacggcagtatttccggggaagttatctataagaatccgaaccgggttaatggcaagcacaatatagacaacctcgtattaaacccaattgaggtgcgcgaggtcgtgttaacaaaatatttgtcaggatctgaaaagatcgacatttgcactggtaaacaaagggccgttgttttcgacgctaataatgacgttcaggcaagtggtgctattgagcgattgattaacagagggcaaacaatcccgctacacctgcgcggtgaggatggctggagcacttcacgcacggcaattcacgctttgaagattggcgataaccagtttgttctgagcatttcataa

SEQ ID NO: 139737 - DNA, 282 bp, Enterobacter cloacae
atgaatgaaaacgttaaacaggtaatggcagaaaagcgccgcatgaccattggtcaattaactgaccttttgataagtgggaatctgcgtcgtgaattgcgcatgagcaaggaagatttttcctcgctggtaggtgttatgcgtgccacggttcgccgggtggaaggattcgagggtacgccgagcatgcgcatggtgcttaacaccgctgcagccctgcgtattggaattgagttcccggaatgcgggaaggttgaggtagtgccgagaagggctaaatga

SEQ ID NO: 139738 - DNA, 267 bp, Enterobacter cloacae
atgatgcgcagatacatcataacggatgctgacatattccaggtatttcagcgctggtcgagccctgatttaaagaatcagaagatgcacaccagcttcatccgtgaggcgctgtgccgccaacatccagataaagcgatcctccagtatgacgtgcgccagaagatgaaaagcatggcgacacgcggtctggttacagaggtgcgcctggccccgaacgcaacagcctggatgattacgcaaggtgattcaaatggacaagattaa

SEQ ID NO: 139739 - DNA, 369 bp, Enterobacter cloacae
atggacaagattaaaaccaaacgcaacgagcgccgcctctctaagagcttcattgaagaaggtttgaagctggtagccgatcgcgccgaacgtgagggtgtgagcaaaggcactgccagccgtcacgctgccgctatccgtggtgttaccccggcgctgggtggagttaaaacccgcgtaacgaatccgggcgcgtgggtggctctgtacgcccgcagtgatgctacctctacggtcatcagcaacatgaagtttaccgccgtcatctttgaatgggctggcgaacaggactacgaaaacgcgagcttttacgctcgcattgcaaaggcgatccgcacggcgctggctgtgcgaggcgagacaaattaa

SEQ ID NO: 139740 - DNA, 663 bp, Enterobacter cloacae
atggtcatttggtcgcttttcgatggttcggggattatgggtttgccgtgggctgaggccgggcatgatgtttactgctttaacgcagacgaggggaatcatggtgcgtatcacatcaaaatgcagcatgaaaatttgcactacgtgaattgctggattagcgagaatttcgcatataaaccagaactgacgggaatcccaaaaccgcagatgattttcgccttccctgattgcacggatttagccgtgtcaggtgcaaagcatgaggggcatacatcactggcgtcagtgaagcatgctcagatggtggaaaaaatggctgaggagttcggcgcggcgtggatggtggagaatccagtagggaaaatgtcaacgcactggcggaagcctgattattacttcaatccccacgaatacggagcgcacctgcatcccgacgagggttcctatcaccccaaaatgccagcgtgtgacggctacacaaagaaaacgtgtatctgggctgggggtgggtttgtcatgccaacgaaaaggcctgggccgataaacatcggttgtttttgggggtggaagtcattgggaggcaatagcgccaaaacaaaacaactccgctcactaactccgcgcggctttgcacgtgctgtatttgaggcaaacaaataa

SEQ ID NO: 139741 - DNA, 633 bp, Enterobacter cloacae
atggaattcaccaaagagcagttgatcgagcgcgtgatgcatcataaggcaacggctgagctttttgcagaggatgccgtgaagtcaacgaacgccaaaatggatgtgagaatttttgaagccgcactggcagcgctaacctccggcatggagcaggagccgatttatcaactgcgcgatatggactggtacgacaccgaccagcagacgtacgacgcggttgtgaatgccggtggcgccggccgcattgtctacgcagcaccacagttaccgcagccagcggtggatgaatccgcgatattcgacgccgcaattgatatatgccggaagtctgactccatcgacgaacatgcatggaatcatggtgtacttgctgttatgtctgctttccgccgctgccgcgccgccatgcttcagggtaatcaccgtgacttatcgtatccagtagacccgcaggttgctgagtacgagaaaatcatgcagcaggctgtgcctgatgggtgggtggctgtgccggttgagccgacgcaagagatgcttaacgcatggctttctgaaattgccaactggcgcggccatgtagcggggtacaaggccatgctcgcagcagtaccgcagcaggaggcgaagtga

SEQ ID NO: 139742 - DNA, 162 bp, Enterobacter cloacae
atgattattttagatactttaatttttattactttatttattggctcttctcttgctgcttatgagttgtggaaagttaatcgctgcgtattaagcctgctgttctgtatctgctctttattttcagtgctagatatatttttgataattaacaggtggtga

SEQ ID NO: 139743 - DNA, 885 bp, Enterobacter cloacae
atgttaagcgaccttctaacaatggttgaccgccgcgccagggcagtcagcttgcgcgaaaagaccatcattaacgaacgtcacgccgtgcgcatgcttgagccggttctctcgctgggggttcgcgccgccagcgtgccggatacatggatccgttatgccgaccgctgtatcgatcttggccttgcggcctccacggttcgccagcgcattgactgtgtggctgcagttgtggcttgggtgattcacgctgatataaaattcaaacccgccgcgccgggttcgctggtgcgcatgctggatgcaatgcgcaccgccgcccgttctatcggtaaacgtatcaaacggcaccgcgcactgagcaagccgggccgcgtgagcgtcactgaatacgttgatgtggtacgcgatatcgaatcggtcagagagccttacagatgcgtactgcgtctgatgctgtgctttggtttcagggtgtcagaaacactatcgctcaaacgcaactccatgctggctggcggtcgcctgttcgtgcctgacagacacacgaaaacgcattcggatctgctgctgcccgttccgcttgaatacatacctttggtaactgagtggataggggtgattgaggactcagaaatcaaatacaacacgcttaatacggtggtatctcgtgccgggattaaatggcgcagtcatgacctgagaaaagtatttcgtacagcctcagccgttcgtggagaggattatttagcggtggagttaattcttaaccatgcagttaaagacgtgccagccgcctatttgcagtcgccgccatattcagcgatgcgcaaagcgttaaaaaactctattgatgattacctcagcgttaaggtagaaaaatga

SEQ ID NO: 139744 - DNA, 258 bp, Enterobacter cloacae
atgaaaacagcggccattaaagacaatgacgtaatgtataaaacgaattatccgcgtgggtgtgtatttaaatgtctccagttgcgcactaatttaaaagcagcgccatctatttaccgcgtggaattaatcgaccggaacaacgagaagatattaatgggtggtcgccagcttctggctgacgcaatggcgctctataccgatttatgcacgctcagcgcctcagaggttgaagcggcgttcgccagcatgtgctga

SEQ ID NO: 139745 - DNA, 951 bp, Enterobacter cloacae
atggcttacggctggcagtacgaaataactgttttctgcaccgatggtgagacgatccacattgacagcgttgatgtggatttttcctgtgtgcgcgatgacgagaaagagccgaacgaggccgacttaactatctgggggctgacacctgagacgcataacgcgatcgttcaggctggctctatggtcacgtttgcaggtggctatatagatgaagggatgttcacgctgttccagggtgaacttatcagcgccgtgaatgttaaacccggcgaggtttacggcctgaaaatgaagctgtacgaggccctgataccgttccgcgccagcgtcacatcacgcaagttccgtaaggggcaatccctcaaggaggcgatcgcgcaggtagcctctgatatggggctgggttgtcagttgtcaaaagcggccactgcgttaacgctccccaaaaacatcagcgctgcggcgctttcccgcgacgttctgacgagcctttgccgtccggtaaacgccacgtggtcactccagtatcagtcgatagcggtcactgctggtgactccatctttgatggtgctgccgcgttctctcctgacagcgggttgctgggcgttccgcttctcaaaatccataccccgaaacggaaaaagaaaaagccgtcagagaaagagcagatccaggccaaacacgaaaaaagcatcaaaacatatgcctggcccccgaaaaactcacaggtggattacagcaagggcgcgcgccgccagataggtgtaatcgaggccatcacgtgggaatcactgctgcgcggtggtgtggaaattggtgaaaaggtggtgctgtcttccccgtcgatgggtgagaactgggagattatcgtcaaaaaaatctcgcaccggttcagcaccagagattcccagccccgcacaacttcatgggagggaattatcgcatga

SEQ ID NO: 139746 - DNA, 711 bp, Enterobacter cloacae
atgagggcagcaagccaaatcgcggccatcgttgaccaggcgcttaactctgcgctgttcgcgctggaggcaaagattgtctctgttaaaggtggtcgggcaaccgtcaagccaacgcctaaacgcacctttggtgataacccggatcccatagagtacgccgaggtcgaaaacgtccgtctggtgtctctcgtctgggatggcggcaagtccggcgtttccggtcgggttaagccgggtgatgaatgtctgcttgtcgccttatcccacggtgacgacgacgaaccagaccacaaaacactgtcctcagccgtggcgttctgcggcttttcagacttcgccagccatcagatgccggatggtgctgggctgcgcttgttcagcggcagcgccttcatcgaaatggacaacggcaccatcaaaggcaacaccgggcagggagcaacattcgagttaacgggcaataaagcatccattaacgcgccaggcggcatggatataacagcccccatgaccaccattcacggagatatgaccatttcgggatccatcagccagggcgctggcggtggtggcaatgccgagttcggcggcaacgtaaaagtaaccggaaccagcgaagcggctgaccacattagcggcggaaaatccttcaattctcacacccacctggagaagggcgacggcaagcccaccagcgaacctcaatag

SEQ ID NO: 139747 - DNA, 378 bp, Enterobacter cloacae
atgaaactaaacgaccaggctgcacaaattgctctttctaatcgcggttttctgatggctggcgactacaccacggaaatcaccaaaggcgacattatcaacgtgaccgagcgcaccgggctggtagttgagcgcgtggagtgtctgcccctcattaacgcaccgctggcaatggtgatggcgacctgccgcgactgcaaagaccagtacatgccgttttattgcgatctgcctttcgagctaccgcaccaggcagctatggcccagatgctgaacgatgcgggtgagggctttgacctggatgacctgctggatatcgagtcactggatgctgcggtgacgatcgttaacctggagcaatggcggcacacagaatga

SEQ ID NO: 139748 - DNA, 219 bp, Enterobacter cloacae
atgaacatcacaaccgttcagtatcggcagggtgttaaagggtgcttcatttcgaatgagcgcccggcccctggcgaaccgttaacactggtcatgcctacgtgccggggtaagcgaataatcccggtcgggcatgttgagcgcatagaggcggtgggcacggcccgcagtctcgtttgggtgtcgaagctgacagccgtcgaggggatggattactga

SEQ ID NO: 139749 - DNA, 348 bp, Enterobacter cloacae
atgctggacatgatgcaggatgatgacggggtaatcctcgtcaacggtgattttgtgctggatggcggcattgatggcattgcgcagcaggcggagatccgcgtcgccaccaacaggggtgagtggtggctggatacgtcgcagggtctgccgtggctacccggcatcatggggtcaaaactcccggcctctatcgtctccaacatgattaacgccgaggccaaacgcacgccaggtgttaccgatgccagggcaacaaacatcagcgatgtgaagggcgattatacgatccgctttgctgtttacatcggcaatgaaaccaaagaggtgagcagtggaattagttaa

SEQ ID NO: 139750 - DNA, 1410 bp, Enterobacter cloacae
gtggaattagttaacgacagcggctggcacggtgccagattgcccgagatacgcggtgacaaatacgagaaattaaagggggcgctgggtaacgttaacccggatggtgattcactagtcggccagacaatcgcggtggtggcagaagatgacctgaacatcatcgaggcgatcggctgggtgttctccgggttcttcatctctcaggctgaaaatgcgcagcttgatgcctttggcgagcgcttcaatcttccccgcaacgggttaacgcgatcctctgcttacgtcatctacctgttgcaaccaggacagacagttaacgcgggtgagttcttcacgatttccggcagttcgggcgactggaccacaaccggggatgtaaaagaaaacggcaagacggcagcaggctttgtgttatcggtgaaacaggccgctatcactacaggcaacacgtttaccatctcgatctcaggcaaaccgtactccacacagtaccagaccggtgatacctcagattcaatcatcagccgactgtacgccgatatcgtggcacgtgagccgtcaatggcaacctatgcgacggcttacggcaaattgctgtatgcggctgacggtcgcacgctgattcagttctctttcgctgatgacgtgttccagattgtgcgtacaggcattccggccactgcctggtatcaaagcgatattgagttcccgcaggcgctttttggctacatcgccactgatgacattctggtgctttcgaacggtctgaaaggctatctgattgaagatgacgagatttaccgaccgcgcatacaggcagcggcggcggcccggcgcgcgaacatcagttcgtcacgtcccggcatcaaaaatgcgatcctggccgttgacggcgtgacgtatgcagacgttgaggttaatcgcggattccagaccaatgctgatggcgtgccgggaaaatcaatacacgcctttgtcgctggcggcgcggataacgatatcgcccaggcgatttacaacgcagcggcaggtgagtgcggcttctatggcgatgtttccggtaccgctacagacggaacgacaacggaaaccgtgtatttcagccgtcagagttatcagttggtttacgtatcggtgtccggggcaacgtgggatgcagaaaccacaggcaagcctgctgactacatcagcgtggcgaaaaacaccgtaaccgcgtatttctcgcagttgcaggtggggcgtgatgtgttcgctggtcagatttatgctcgtttgctgtctgcgcttcccacgctgacagatatcaccgtgaaggtcggtaaaacgtctacgccaacagacaaaaccgttgcgatcggcagcggggtgattgccgttaccaataattcatccgtggcggtgtcgtga

SEQ ID NO: 139751 - DNA, 756 bp, Enterobacter cloacae
atggatccggtaattaaaagccctgggcagttggctaaagagcgctttacttcaaaggtgcgcaagcagcgcaatatcgacctggtcgccgggttgaagtccagcagtgcgagtatgacggcggcgatcgagtatctcaaaaaaggctactcgctggatgactctaccgggaaattgctggatgcgcggggcgaggagtacggcgtgcaccgcgaagggcgagacgatgctgaataccgccaggcaatacgccaggaaatgggaagtcagtcggtttctgcgcaatcccggccatctatcggggcatacattcgtcagctttataacctggcctggctcacgctggataaagtcgggttgagcactggcgcagttggcgcagcattcaaccgcgtgccgttccgcatggtgtttgtgcagtgcggcggcatggccccggatatcgaactgcccgaaacgctggtatctgccacctttgcagccgatatctacagcgcggccacgccccctaactcgaaactcataaatcacgcccctatgttccccggcaacgtgttccctgctgtatgggctggcattaagtacgagcgcacacaaaagaccgtgctggcgaccgccacaaaggggatccgcgttaacgcaacccaatcattgctgacgcgcatagagggaaccaaaacgcagaacggtacagaacttgtcgagccgttcaatacactcgttaccgttaaaaaaatgaaggtgcttaatggatag

SEQ ID NO: 139752 - DNA, 234 bp, Enterobacter cloacae
atggatagttgggcagcaacagacaaggtttacgccgggcaaggtggggcggatatcccgaacaaacaggagccatcacaggagaagcaggcgactggctttgcgccaacctatttcgatgcccagggcaacctggtgtttggtgatggcatcagtgcgcaggagatgaactttatcctgaatgacctgtacgccaaatataaagcgctgctggcgcgagcgaatcagccatga

SEQ ID NO: 139753 - DNA, 237 bp, Enterobacter cloacae
atgaatagctttgcgatgattgaccgggtttatccgtttaacggcggcgcgttcgccagcaaaaagcagccatcaaccacagcgcaatccgtggggtttaagccgacctttatcgacaccagcaataagctggtgccaggggatccgattgatgttgctgaactcaattacatctttaacgacctgtacgaacaggccgcaaacattgaccgaattttaacggctaaggggaaataa

SEQ ID NO: 139754 - DNA, 633 bp, Enterobacter cloacae
atggccttaacatctgatgaactggtcgccatatctgacctgaacaaagcggcgatcgcagacgcaagcgtagtgccggattgggtgctgcctgctgaggtcaggggtagcgcagcgccaatcagcggtattccgtacccacagcagacgatagacgtgtttggcggcttactggcgggcacatggtcattgaagtttcagaacccgttacagcgcgttgtgtgcgatctggagatattccacggtgacaactctccgattaatgcggcccctgatttatctgcactgcagttgaccgtttccgggttcgacaaggcggtaatcttctgtccggccaaaactgctaccgatacagcgccagctaattactttgggttaacggtgtccggcgtaacgcctgtctataagctgggtggtaagcgccgttttctggagcagtccgggctggtggtgattccactgaccatgattctgctttctacccgcgccctgaccagccgggaaaccagccgcgcgctgtcaattaccctcaagcgcaaaaacgaaacgcagatgaccaccgcgccggtaatcagcggcatggtctacagcaacccgttaccgtcagcgcgagatatcgctcaggcatcgtga

SEQ ID NO: 139755 - DNA, 1833 bp, Enterobacter cloacae
atgtctgaaaacaattacggcgcactgatgatgaaatcagtattgaccgccagtgatgatatcaatgccatacaatcacctggcatttacgttgtgccttcgggaagtacatcctcaccaaataaagctgcggggattcttattgttctttctggtgctcccgttcgcagaacattcattgcgatcgataccgacgcagtcacggaagttgccaccatccttgctatgcagagtgcaatttctactttgcaaacaacaatcaatgccgcgctgggactcaaggcaccacttgccagcccggctttaaccggtacgcctacagcgccaacagcagcgcaaactgtcaataactcgcagatcgcaactactgcattcgttaaggctgcgattgccaccatagttaactcttcacctgaagcgctggatacgcttaaagagcttgctgatgctctcgggaatgatgcaaattttgccacgacgatgacgaatgcgctggcaggcaaacagcccaaagacacaacgctgacgaacctcagcgggaaagatgttccgggtctgctccagtaccttgggctgggaacggctgccaaaaaaaatactggatcaaatcctggtgatgttgttacggcggccagtgaccagccagtttataactccaccttaccgaccagcggttataccagtacagaaccgagtggttacatgggggcggccactgtcactggcggcgatactctggtgcgtctcattggccttatagctcataacatcgctggtaactggacactggtcaactcctatggctcacactttggcactggcggttcaatccagccagaggatgccgcccacgtctttgtatctaccgatggtgcgggttatacacgccgctggtatctctataacaatggcaatctggtggggccgaaagggttgttcgctgaccaggcgtgggttactggcaaaataggtagtgttagcggtgttacttacactggcgatggtatcgatgtccagaaggtcaaaattccagacctgccaaatatcgggtaccccgcatcatcttcacgcgggattttggctactgcgacggcgcagtcggattcagttaccaaagcacacagcattcagttgaacaaccccggggcaggcggctggggactgaatatgtcctggggtacttatgtcggcgtatcaggcacagttgaagatgtggcgcatttgctttgttccaccgatggggccgcatatgtcaaacgttggtggttttataacaacggcgaagcggtaggtcctgccggaaaactctactctgaaaaaaacaccaccagagcggccgacggcacgctgaaagccgcgtcgccggtagttaagatttttgccgatggccgtgcggaaaccaacgccgaatcagagggctgtactgttacccgactgtcggtcggtaaatacctggttgagggctgtgtcgggctgaacgctgacgcggcgtggggtggtacggacggtgggtttgatgtgccaaccgaccggaacaaacagccgctaatctggctggattatgaagttaacgcggatggctcagtgttggtgaaaacctatcaccgcacccaccctgacgccccggcatttgcgcgcaatgaacgagacggctttaccaatggcgatccgatagacattccgtcagaccagttcgtttctgttcgtgttgagatgccggaagatagcatttatcagcagaaacaggccgccgaacgtcaggcgacgtatgaggcatggcaggcaatgtcaaaacagcaggcggatgaagcggctcagaaatcaaaggaataa

SEQ ID NO: 139756 - DNA, 519 bp, Enterobacter cloacae
atgagaaccgaacaagaaaagttacagcgtcactttgaaaagcagcgtgactatcaggcgcggtccatcgcccgccagcgtgcgaaacaggcagacccggaatggcgtgccgaacagtacgaaaagcagcgggaacgacaaattaagtacgctgaacgggcaaaaaacaagccgattaaatgccgtggattaaaaggcaggacgccgaccgcagccgaacggcgcataatggacaaaatcggatccctgccctgtattgcctgttatgtgcatggcgtgacgaatgagaactccaccattcaccacattgacggcagaacagcagacggcgcacacgcttatgtgctctcgttatgtaactgccaccaccagcacgccgcgccagcagcaatacgcgcggtttatccctggcttgttccagtccacgctgacggagcatgcggcggcaaggcagaatttgaggcgctaaacggaacacaggaacacctctacgcgctttgccttgaaatgatagcctga

SEQ ID NO: 139757 - DNA, 1626 bp, Enterobacter cloacae
atggctacattcttatctatcacagacgctgccgaactgctggcgcaaactctcacctgccttaaagacgctggttacgccagtgctgcgatgattccagccgctaaaaagtcctcaaatcagggtgaaaaacaggaagtgcaaccagctaccgcgccagaggtttatgtcgcgcccggcaagcagtacgccaacgttaacgaagcgctggcgcacatgattcacgaactgaaaaacccactgcgcgatcgctataacgaaacgctggatttcacccatgcaagcctggcgcagatgctggacatgctgcgcgacccgatttatcagcatggcctgatgctcaagcaggagtttgagaaaggcgacgagttgccgctggcgatggtgactaccttcctgcacatcccgaccaacacagaagtttcgttccgcctcccggccttcatgaaagaagataagcgcctggatgagtgccagaaggttggcgcgaccttcacctatttccgccgctatggcctgcgtcaggcgctggatatcactgatggtgatgacgatatcgaccaggccagccgcaagcaggagcgtcggaaagcacgtgcgctcaacaccagccgcgaatggaaaccgaccaccagcgcccgcaccaaaccagaggcgatcctcaacatgctggttgcctctggagagtttaccggggccgctgccattgcccaggcgaaagcgcgtaaccaattcctgcgcactcccgcagaagtcgctgaggacacaatcaccagcctcgatgggctgaaaagtgatgcagagcaggcgcgggatatcgtcctgcgttacgggctcacagatgttcactggcagggcttttatcaggatgccggacagttcagggttgatggtgatagccttatcgacaccagcacaggccagcacgtcagcgctgaaacagcgatggatattgccgaatccctgacaacggtggcgctttctactgctgataacagcagcgtccacgactccagcgaccgaatcgtgccgccgcgcacgttcgttcctgactgttccccactgagcgaagaggaagaggcgttcgttctggctgttgaatcaggtcacgacgatgaaatcatggatattgccatgcgtctgatggagtccaatgttaacgccgggctcaacatgcgtgaggtccagaacgacaccagctaccaccgccgcaactggtataacgcctgccgtgagttctacaccctttctctgatgaacgggaatgtaaatcttgaggcactggcaaagcctgaaatgacaatcgcccgcagcctgtccgacatcgtaggtgccgatggtgacgatgaggtcagcgaatccaccatcagagcagcacaggcccaactcgaccgtgcacagcgcattgatatggcttgcgagatggaccagaaagcggcgatcgccattgagattgcgtgcggcaacgccaacactgacacaaagctccagcagctccacgaaatagccagccgttgtaatgcctacacatccgggtatatcgacacgctaatcctgtgccttgaaactgatgagttaacacgagaatttccggtatacgtttccgaatctgatctgccttactga

SEQ ID NO: 139758 - DNA, 543 bp, Enterobacter cloacae
gtgaccataaagataagtaagcgagatgatgcttttgcaaagctggtagccgaggagcgggaagcgccgggctttagctatgcgaaatcacgcagcagagactacaaggggtttaacgatgatttccaggctgaaaagttgctcaaagacaacgatatccagcaggcggttagcgtttaccgaaagcatattattgccaaagacattgttggccgacaggaagcactgattgacctgtcggcccgtttccgtgcgccggacgcaacggcggtgatgcttgaactgcaggcgctggaaaagcagcggctggagccagaagtatttcgcagtcgcctggcggcgatcgacaccagagccgtcaaaaacataaaacgaaccaaacacggctggcaggtagaggggctggataagtcgaacctggccgcaaggatcctcacgctggcgggtgtcgatatcagtaagccgatttcagacgagggcaagcgtgccgcacgcgaattgctggcagatatttataaggagatggcaacagatgacgaatga

SEQ ID NO: 139759 - DNA, 1389 bp, Enterobacter cloacae
atgacgaatgatatagagcgccgggaagagtggctctgtgatgccaaaaaacaggccaactggatgcgcataatgcgccgcctgaccacaaagccccaccgcgttaaaaatcttcgcggtgggcgcggttcgggtaagtcgtggatggttgccgaggcgcttattcagcttgctgtcaggtatgacctgcgtttcctgtgcttgcggcgggtgcaaaaatctatcgacgcctcagcacaccagttgctgtgtgacacgatccgccgcttggggtacgaatccgaattcaccattaccaataacagcattaaggctaagtctggtgccgctttccggtttctggggttccagtccaacctggattccatcaaatctatcgagggcgttgacatctgctgggtggaagaggcccacgccatttcaccggatgcatgggaagcacttacgccaactatgcgccgccctggcgctgaactgtggattaccttcaaccccaactatgcatgggatgaaacctatgtgcgttttgtcctgaacgccggggaggagtggttcattgaagaggtgaactggtatcacaacccacattttggcgagacgctggataaggagcgcctccactgccttaagcattatcccgatcgctacgacaacatctggaacggggttcccgtcagcgacctgccgggctcagtggtcaaccgtggcaacctcgaaaggcttattgttaagccagattctgacctggcgaaagcctgtcgcaccggagttaaaaccgctgtgctggatgttgccgatgaaggtgacgatgattctgtaatggcattctttgacggtcgttttgtttaccgaatggagcgattgcaggcacgtgaccctgcgcaacttgctgtgcaggcgcttaagctggcagaggaggacggttgttccgtcctgatttatgactcagtgggtgtgggtgcaggtgtgcgcggcgaactgaataagcatgaggactcagagattgagttccgcaagttcgtggcccagggcgaggttttgcggaaagcgtcgagttatcgcggcggtcgcccaaacggtgacaccttccataacctacgcgcccaggcatggtgggcttaccgcgacgcggtgaatgacactgtacgctggctggatggcggcgttaagccaaaggatggcctgttcgctatctccagtgaaatcccgcgccgttatctcgatcgcatcctctctgactccactggcgttatgtgggaaaccacgccagaggacaaaatcaaaatcgaagccaaaccgaaagttaaaaagcgcctgggtgtgtccactgactacgcagacgccatattcccgcatctggtacgcatgaaatcaggaattatccaatga

SEQ ID NO: 139760 - DNA, 1380 bp, Enterobacter cloacae
atgacgagtaaaacaagcctgattcccgtagaggggatcctgaccaaagagggcgtaatgcccccgcagtacaacaatgacggctacgtcagcatgatgaccagtgtcgcagcgggaggtcttgccaaaggtgcggccgggatggggtcgccaacggcaaaccgcatgaaagcccgttctgctgaggggatgattccgctggtggcggcaatggccggggaaacgtccggcattggctggcgcattatcactgagccggttgcagcggcaatgctgaaccagttcacggtggtcactgaaaaccctgatgatgctgagaaaattaaagacctgtttggtgatatgcgggtgtggcagtgcgttgaacgggccgttgtcctgaagcgtcacatggggtggtctgtgctggtcatgggtgaagagtgggtgcgcagccacggcgcgaactggattaccccatctgatgactggttcaccgattacaactcaccgcagttcggcctgccggagggctggcgcatccagttaaaaagccccatcggtggtgaggtattcattgaacaggaggattctatccttttcggggatcctgagtatcagccaatcatcggctgcgcgggcattgagtttggttccccgctcctcagcaagccttacgcctcattgcagcgcctgggcctttcccatgagttgataatcagcatcctgtcgctgtcggtgcaggatatctacaaaaagaaagagcttcatgaggcgctggagaccgcaaaaggcgaggcgcaggttgcccggcgcattggtggcatcgcggcaacgcgccagcttaacgatatgattgccatcgatatggaagaggccattgagcgcctgcaaaccaacatgactggaacggctgacctggtggatatggcgataaagctggtctgcgccgaaacaggtttcccgatcgcaatgctggccgagcgtaagggtgggctgtcgaacagcgataccagcgcagacgcacagtggcagaatctggtttcgcacatcaccaccaatgacattattccggcgctgaaaaagctggcgctacgctacctgggcatccgggccgagttcgtgccgaacaagagccaggggcagattgaccgtgaagttgagcgtgataagaaagtcgctgagacggctcagctttactacgccatgcgtgcaatcaccagtgaagaggcacgggcgacggcgcaggaaaccggggccattaaactgctgtctaccactccgcccgccactggcaccatagatgaccagaatgacgacgattcagaccagaatcagggtaaatcgaaccagggcggcaccaaagagggccaaagcgaggccaataatggcaaagagtga

SEQ ID NO: 139761 - DNA, 1362 bp, Enterobacter cloacae
atggcaaagagtgagccacggtatgacgcaggttatccgctggcgatcgagtcggtctacgctcagcgcctgggtgacagcgcccggcaatacggtaaatgggttcgtgatgcctgtttaaagacataccgcgcgatcggtaaatccggcgcggtcgtgaatactgacgcggcagacggtcgggatatttctgttgatgacctgctgggcgaactggtcacggcggcaacggttaaaaaagtgcgcgtttatattcgtcagcagatggggaaaaacttctccaggctgacacgagcgaagcaggaatccattatccgcgccgttgcgatggaaattgcgccggattcggcgctttttcttcgggccattcccgcgctgctgaaagatggcgagttcggcgcagtaccgacttacgcgatcagcgaggtacgcaggcaatcggctatcagcctggcgaaagccgtatcaaaggccaataacaccacgcctgacgcttttatccgcgccattaacaaaaccgccgatgacgtgcaggcggcgatcgccaacggcaagtttggttttacagacgcttattacgaaacctattaccagcgtttccgtgttgacggcgtgccgcttatcgacctgaaaacgggcgcagcggcaacggcagacacagccggggcggtatcaaaacagcttctttcactcaccgaaaccatgcgcgaggccagcgcggtgccgtcgctggccgcaatggatgccgccagcacgcaggtgctcaactcagccgttgacgatttcaggctgattatccgcgctgctgctaatgtggatctcgcccccggcatcacgttgccgcatgagagcatggctgacctgatatccattgatatctacgacggtgataaaaagctgttgcagcaaacctctgactggctggatgccagcatgggcaggatgcagaacgtcagcgaagaggcattgcagcgcggcatcaagaccatgcagcaggggctgcgcgagggccggggcgttgacgatatcgccagcaaacttgctgacgaaatggagatcccctggagacgcgcccgcaacgtcgcccgcaatgagattggtaatcaggcctggaatctggaggaggccaacgccagcattgccgggatgaaatattaccgctggcgcgggatgttagacgagcgcgagcgaaaactgcatgttgtgcgggaaggacaggcctatacgccgaccagaccgccacgagacggaaaccccggccagccccacggttgccgctgttatcctgaatggttgttctctgcgtcggatgtagcagacgcggagagagaaattgcagcaagaaaccccagtcaacaatga

SEQ ID NO: 139762 - DNA, 1020 bp, Enterobacter cloacae
ttgcagcaagaaaccccagtcaacaatgacgcaatcagacaatggacgataacccccgagggttatctccagattgatatcccgatcgcccgtccgggcgtgctggtttatgaccgcaaacgcggtgatgcattcacggcaaaagagtaccgctcagccgatgaattgtttaaccaggactcaatgaataccttagtcggcaagcctgtgacggtgtcacaacacccgagtagcggtctggttacttcaaaaaattaccgctccgttactgccggggttgtcaccgccgtcatacgccagggcgacgagctttacgcacgcgctctggttcaggacgaaaagtctatccgtctgattcagcaggataagacgttgcggggcgcgtcggcgggttatcagtgtgacgataaacccaaagtaacggggcgatctcctgacgggcaagagtacgacacagagcagaaggggattaattacaaccacctgagcattgtgcgtaacccacgagttaaaacggcaaaattcaatctggatggtgaaccaatggaattagatgaggcgttagccaaaatcactgaactggaggcggaaaaacagacgcttaccagtgacctcagcaaaacgcgcggcgacctgattaaggcaaacacccgcctggtcaatatggactccgccagcaacgaagcatatgagcgcggcgttgcggatggccgtcaggagcatcagcttaaagaagcagcgaagcgcctgagcatcaataccgatagcctgggtgatatcaacctggttaagcaggccatcatccgtaaggcccacccggaagtgaacatggacggatggagcgacgaacagactgatgttgccctgtctatggcgctggttgcctgcggtaagaagtttgaacaaaccccgcgcaacccgcgcacacctaacaacgacgagcagggctcaggcgctaattccgcgcaccagagctatcaggctcgcaccttcggccacaaaaaagaggcaggtaaataa

SEQ ID NO: 139763 - DNA, 792 bp, Enterobacter cloacae
atgcagaccactatcaaaggtgattttgacgcaggtttgccgggcgacctggctgtgctgccgtctttccgttcgtctgcccgcgtgcaatcccaccgcgcaggtggcgagattgcgccgggtgatgccgtcaagctgacctccggcaatgattcgactgtcgttgcactgccgaacggtggcgcggcaaccgatgcgatcggtattgctgttggcgcacattccaacatgccagcaacgccgggctttggcagtaacaccaaacctggtgtggtcacactcaactgtccgattggcatcgttgaggaagggccgatccgcgtccaggttaaatccggtgaagcgccgaaagttggcgatctggctgtgcctaaaggccgcaacacaactaccggatggatggagtggggcgtggccggtgccagcgaaaaaagccgtttccgtttcgagtcgcctgttcagcgtggcggcactgcgatcgtaatggtcactgacggtgactcactggcggctggttatccgcatgacgtacctgtgactggcgtggccgtagcaccgaaaacagcatccaaagctgtaggcggtactcagcagttaacgccaaccattaccccgtccggtgcaaccaataaaggcgttacctaccagtccagcaatgccaacgttgccacggttgatgccagcggtctggttactgttgctgctggcgcaactaccgggcagaccgcaaccatcaccgttaaaaccgatgatggcggctttactgacacttctgtaattaccgtcagctaa

SEQ ID NO: 139764 - DNA, 939 bp, Enterobacter cloacae
atgaacgagaaattaattgctcaaatgatgcagcagctgctggcggaagcgcaggcgggcggctccattccgaacctcaatacggatgagcaggggctgattttcgcccgcgacctgatttccatgtccaatgacgtttacatggaagaaatgccagcacctgtagcgctgaccatgttcgcgcaagagcctggcatcagcgaaggggcgaagtgggcagggtatcgcatgtactccgccgcaggcatggcgaaaatcatggctgcttacggcactgatatgccgatgatgagcgccaaaggccgcgagttcttcgcgctgatgtacgacattggcctgggctacggttacacctactctgacgttctggcggcggctatgtccggcacaccgcttgataacatcctggcgctgaatacccgtgaagcgcatgagcgcaccgtcagcaacctgctgtggcgcggcaacaaggaataccagattgtcggctttatcgagcatccaaacatccctctggtggctgtaacaggtgcctgggcgacgaatgatggcgataaaatctgtgatgacgtttcggccatcatcgcagcggtgaactcaaccaaaatctaccaggtgaatgagttccatatgccgtcgaaagcctggtcacgcattcaggggctgcgcctctccggtacgctgggtactgtgctgtcgttcctgcgtgcgtcatacccggaaatcaccttccgcaaaaactccgatctggatgatgacggtatctgcattgcgctggataacacccgtcgtcacttcgcccaggctacgccgatcctgttccgtcagttaccggttcagcgttccggcctcgacctgtctatcccttgcctgtccaaaactgctggcgtgattgttcgcgctccgctggcggcggctaaatcctcgaaggttatctaa

SEQ ID NO: 139765 - DNA, 255 bp, Enterobacter cloacae
atggctgagaaagaaacggcattcctgaccaacaccaccgaagcgccgatccacatcggtgctaaaaacgacgaaggcacggtaatcactatcaccgttgccccgctggaagcggtggaggttgataaagccacgctgaatatcggcggcgttaagcagttcctggacgagaaaaagctgaaggtcatctcagctgcggaagccaaaaagctcaacaaagagcatgacggcatcattgagtcagaagacgagtaa

SEQ ID NO: 139766 - DNA, 360 bp, Enterobacter cloacae
atgacggtaaaagaatggttagccattctgctaccggggatatcacttgatgagggcgctattagcgccctttcttctcagtgtgagcggctctatgacctgcgggccgctgcggaatacggttacgacacagaccgccttaaagcgctgtacgtggccgctaatcttgccccgatagcagtggaaggtatcagcgccagcgtgcgcggtgttgccagcaggcgtgaaggtaaggtggcaatcacctatacagagtcagcgcaaaaggctggctgggaaggtacgcagtgggggcaggagttcctcgacgcgatgggtaatctgtccggtggctgcattgttatcggtcatgcctcttaa

SEQ ID NO: 139767 - DNA, 471 bp, Enterobacter cloacae
atgcgaggtggggctaagttcgaaacccgcggcgctgaccgtgttatccgccagcgtatccagtcgctggcgggtgtaaccctcacggtcggcatacatcgcggcaagaccaacaaaggcgttgacgttgcgatgtacggtgcctggaacaacttcggcactaagaacgcgatggggtgggaattgatacccgagcgcccattcatgaagtttgcctccgatcgcattgctgactggatgcgctcagacgcttacaaagaggtgttgcgtgatgtagcgcgtggacgtattaccccgcagcaggccattgccagaatcggcgctcaggccgtcgctatcacccgtaagaccattaccgactctgcgctataccgtcctaactccgacattaccattgcacgcaagggcagcacaaagccgctcatacacagcggcgtgctaatccagaccgttaactttaaggcgtcctga

SEQ ID NO: 139768 - DNA, 354 bp, Enterobacter cloacae
atgaggcgattaattcaatactggcaacctctaccagctgagaacgtgggaggcattacccgccaggaatacacagaccagcaaaccgcgtttctcagcatgcagccggttgatggtaatggctcgttccggcagtacctggctggccgtaagccccatgactatctggaggccatcggcgaagcggatctcctggtaactgaggagggcgagcataacggggcgatcgtgctctgtggtggcagatattacgaagtggtgcagcgccaggagtggcttaacggcgtgattaaccactatgagtatctgctgtttgtcatgaaagaacaggacgcgctggcgctggtgggataa

SEQ ID NO: 139769 - DNA, 786 bp, Enterobacter cloacae
atggctggctatacggtcaaattaatgaccgttagcggggaggttgcgtacccggattaccgggcggaaaaggcaacgttcaacgctaacggcaatatcaaagatattctctttacaccttacaacggcagcgacattgctttcatcacggcaatcgaactctctgacggcagcgccccggcgattacgatccccgcagatttcgcgctgtcggtcggcagtgtggtgaagtttcccactggcacgctaaagaccactgacacccaggccagggcgttaatcatgacgggtgcgccatacgtcgcgctggtgcgcctgcgtcaggcgctaatgcagctggtgggtgataaccctctctatgcgatgcagaagctacccgagccaaaggatccgtttaccgcgcttcacctgctcagttctggccgggagccgcagccctttgcgaaaacgtgggatggtgattaccgggtgtatcactacaactgttatgccagcgtgctggttatccgttctgccgacgacgcgcaggagtttctggaaaacttcatgctggaggtggacagcaccgatggtgatttctggcagttcaataacaactgcagcattgaccgctcaggcgatttcgagaatagctcaccgctaattgataacctcgtttaccagcaaatggctcaggtgacactgtcactgcaatttgtttaccagcactacaaacgggagcgctggcttgaaagcgcaacagtggaaaagggcaacaaggtgacgatcgtcatcaaaggtgcataa

SEQ ID NO: 139770 - DNA, 1368 bp, Enterobacter cloacae
atggcagatttaagcaggctttttagcgtgaagattgggcggcaggcgactgcggcccaatatggggttttcggcgtggggattatccttgcgcctgctgcggcgttctttgggctgaaatactcaaattacgatagcgcagatatcagcaaatttactgatttgtaccgcgtttacagtggcgctaacgcggcgaacgacgcggccacggatgggatttccggcgataacctgctggcggttcaggcgtacttctcacagaagcccgcgccggataccctggtcgtcggtgacttgtcggcggtttacaccaaaaatatgattgcgcttaacggcgttccggttgctggtgcgccagcggccacgaaagcgaccattgggtacatcaaaggcaatgattaccgctatgccagctacaacggcacagcctggtcaggaagcactggcgcggcagcggatattgtggcggattctggcggggccgggcgctttactgtggatggacgtattgtctacctggagggcgcggaggttgttcacgcagaatcaacagcatcagctgctgctgttccgacagctattgcggcaatcaaaaaccagtacaacaagtttttcatgtgcatgacaccggttcgtattctgtcggtgcagaaagcgatcgctgactgggtagaagcccaaatcgacaagatgggcgtgtttattgatgattacaccgtttccacctgggctacggacagcatcactaaatatctgcacgataggaacatggccggatcgttcgccattgcctccaagcgacctaaaaacttccttgatgcggccctggccgggcgttgccttgttatgcagccgggttctgagacctgggcgcttaagacacttaatgcagttcaggctgatgacttcaccgaaaccgattaccagaaaatccgtgcgctcaacggcaacacctttgaggattacggttctggcatcacggtgacgtatcccggcctgacgggtgacggtgagtcaatcgaggttatccgcttcgcctactggcaggcagaccgcatgcaaaaagacctcgcaaccctgttcgtgaaccgtaacaaaatcggtcatgaccttccgggttacgaggttgtctgcgcgaaaatggaaagttcccttcaagccggtaaagacgcgggcgggatcctccaggacttcaccgacgaaaacggcgatctggttcgtggctttaccgtaacgcgcccaactatggcgcaggtcagcgcaacacagcgcattaacggtgatatcactgtgcagttcgaattctaccttcgctacgccatcaagcatgttgatgctgttggctcagccatgacctacggagtttaa

SEQ ID NO: 139771 - DNA, 420 bp, Enterobacter cloacae
atgtatttgggcgtaatgtcatccaaagactggctgattaccgtggggatccttccggttatcggcctggcgaaagacagtaacatcacactggaaatggctgatgaccaggtcacggtaacatcggggatcggcggtgactggtcttttgtggacaacccaactgatgagggctcgctgacgttcgttacacagcgtaattccccgtctaacacagccctggcgcttatgcagaaaaccaaagctgttattccggtgacgctgaccaatacccgtaataagtcggttcaccgcttcactcacgccatgtttacgcgccagcctaccgatggtgcgaataacggcgctggcgctcagacgttggagtggaagctggtaacaggcgaggtggattcggttattaatggggtcactgtctga

SEQ ID NO: 139772 - DNA, 486 bp, Enterobacter cloacae
atggataacggaatcaaacacgttgaagtcaacgacaaagcctactgcatcattcgtatgagtgcgtttgatgcgatccactttaacctgcgcgtggcggaaatcctttcgaagcatggtatcagccaggtcgaaagcatcctgacgatgtcatccaagattttcggcgtgcttaaccgggcagaccacgacgaactgctcttcacgctgctggagaaatcccgcgctcaggacgtggaaagcggcaatttcctgaccagttgggatgaagtaaacctccactttacccctgataacatcgctgatgtttacctgctggcgctggagtgcctcaagctctccattctgcccgttaccgcagggttaaaaaaaaatattggtctggacacggcggcaacgatgcagggagccatgcggcaactgttcagcgccttgttgaaaaccttaaccccgccgtccgtacagaactcgtcatctggcgagtga

SEQ ID NO: 139773 - DNA, 1443 bp, Enterobacter cloacae
gtggcggagggcgtagaacgggccacaggcggcggtttccggtttggaatggataacctgcttgcgggtgccggcctcactgccggggtagtggccggggctaatgcgatggctgacagcatggacaccatccagcgccagcaggcgcagattgcacgcctggcacaaacaacaggtgatgctaaagaggcgttctttgcgctgaatgcagcggcaagcgatatgcgaagcgatagcgggtcgtttatctccacctacactaatatggcaacagctacccagaagttgggtttctcccaggaacgaaccatcaaagcaacgcaggggctggtgggggctttgcagttgggcgggggcagcgaggaggcgaaaaacgcagcgctttaccagatgggccaggccttttcttctgaccggttcggcggggatgaatttcgctcattcatggaggcgatcggcacgcaggcacctaaagtagctgaggcgtttggaacagacgttaaagggctcagggcaatgtctgaagccgggaagctcacagctgaaaccatgttcaaggcattcgagaaaatggcggctagcaacgcagagttgcttaaaaaacagggctggacgtgggggcaggtaactaccgtcatggcgaatgactggcaggcgttccttgctaaagccaccatcggcggcgaatggcagcggttcactgactgggcggcaaatacccttattccggtagccagaagcgcggagaaagagatagctgagttctggtctactatggccgacgaaagcaaggcggcgatcctaattggcatcctgggtgcagtgggcgcagcatttacggcgctggctattccagtaatggcggcgctgtggccgttcctcgcgatcggtgctgccgtgtgggttgtctatgaagcgttcgtagagtggaaagcctggatgaatggcgagggcggaacaatattcgaaagcctgttcggtagctttgacgcgtttgaaaaacgctatccgaccatcatgaaaatgctgagggcattaagtggcactgccgacgaagccaccgggaatgtaaataacgacggcggagtttggtcacaacagaaaaatgaaagcacatggggtgagttgtggaaaccgcaaaacctgttcccgaacgctttcgattttctcaagggaagggggaataattttaatcctctggatggtatcgagtcattttttaaccttttcagtggggataataatcaggccgcagccacaggattagccacgccttcaaaaggcggcgttgtggttaacaataccaacagcggcaacaggcaggttgatatccacgtaaatagcgtcaaagaggctgctgaggcagcgaataatttagacaacccaggtacgatctcaggtgatttatctggtaacattgctgaatcgtcaggagctttataa

SEQ ID NO: 139774 - DNA, 258 bp, Enterobacter cloacae
atggctgatagtgagtttaagaagttcgcaacatttacttcactgattacaccgcaattaatcacgatctcttactggttgctcaacctggttattgtcggtgtgggtacattcctttggactatgccaagcatggtgggaatggttatcgcgctggttctggtgcgcattggttttgagctggttatggtgagctttaaaaacaatgaatatctgcgccgtatatgtgaagcagtggaagctagggcgaaagaatag

SEQ ID NO: 139775 - DNA, 621 bp, Enterobacter cloacae
atgtctgacatgggtattgccgcgattgctgcgccgcgtgatgaaagggctgtaatggtctttgagtcaggcgttacagtgtcactaaggctcaaaaagcgcgaagagcttagcgtcaagcgcaccgttgctaaaggcaaggttgaaactggttataagatcgctgacggaacggttgacgatccgaaggtgatttccatagatggcatcattaccggtgccatgctgccgtatacgtttggccttctcagcgccacacaaaacatgattctggcaatgaaccaggcgcagcagattgaagccgcgtatgacatcaaagagttcgtgtccgtttacacttcattcaatgcaatgccgcaggcagtaatcacctcactcagtatttcccgcgaaccgaagcaaaattatctgaccgttaaactgacggctgaaaaggtcgatacggtgtcttttcaacgcagtaggtctattcagtcgaaatcttcaaatatttccagcacggcagggcaggggagaacctcggcagggaaaaagaccgcagcgcctgtagatgctgcgaaagagccgcaaaaggtctttgctcttgaaaagttaaaacgcgctgttggggggttattctga

SEQ ID NO: 139776 - DNA, 339 bp, Enterobacter cloacae
atggctgtagcttactacgaaatcaacataatccctgacatcccagaccaggaatttaccacctctttaaacggcctcattttgaacatgagactgtatttttccgacaccacaaagctgtggtggctggctatttctaattcagatcgtaccgttacgttgtcacatatttgcatgcgtccgggcatctggcatccgttaagtggtcggatgccaggctattccggtgcgggtgcggtgggtgttgcgcgtctgcgtccaaatgttccgttcggcagcgtggatgcctttaatgggtcgtttggcctttatttatacgacgaagtggagagtgattaa

SEQ ID NO: 139777 - DNA, 282 bp, Enterobacter cloacae
gtggggagactgcgcaaaaaggttaatgaattattagaccaaaaacgcctgggtatggcgatcgcgcttgcgctgtgcatcagcgttgcagtcagcgcggtaaagttctgggactggttcaaatatcgaatagggttgattaccgcaatgctggcaatgttttccctgaatgagtgggctgtgattattggtattttatgtaccgtcatcacatgcatggtgaactggtattacgaaaggaaaaaatacctcttacaagctgggggtgaaggtgggaaataa

SEQ ID NO: 139778 - DNA, 531 bp, Enterobacter cloacae
gtgggaaataaatcaaaacttagcgccgctatgctggcgttaattgcagccggggcaagcgccccggttttaatgtctcaattccagcatgaaaaagaaggaaccagcttaatagcgtatcaggacaaaagccggggggtatggactatttgcggcggtgttacttacgttgatggaaagccggtcatcaaaggaatgaaattaacgcaagcgcaatgcgacaaaatagataaagcggaacaggcaaaggcgctggcatgggtggataaaaatgtccgggtgcaattaaccgaaccgcaaaaagttgggatagcttcattttgtccgtggaatatcggccccggtaaatgctttacctcaacgttttaccgaaagttaaacgccggagacagattcggtgcgtgcgcggaaataaagcgctgggtgcatgatgccgggcgcgattgccgtgtgcgggaaaataactgctttggtcaggtaatccggcgtgaccaggagtcggaattaacgtgctggggtttggataaatga

SEQ ID NO: 139779 - DNA, 534 bp, Enterobacter cloacae
atgaaagcaaagtacgctgttgttatttgcctgttcgtaggcgcgtctttgggtggtgttggctgggctatccatcacaacagctatgaggctgggaaaagcgccagcgaccaggaatggaaaacaaaatgggctaaccgggatctggccgataaagccgctcagttagcacaggaaaaagcacagcgcgacgaagaacgccgcaggaaggatgagactgaggagattgtcaggaatgcagaaacagagaaacagaaagcgctggctgaagctgctgccgctaatgatgttgctggccggttgcgcggagcgatcgcagatatccggcgtaaactcgcagccagtgagacaggcaagctttccgcaaatgtcgccagcaggcagacagccgccgaagccatcaatatgcttgccgacctgtacgaagaatctgaccgccgcgcgggagaactcgctcaatatgctgatgcagcagtcagcgccgggaacgtctgcgagcgcacctatgacgcggtaacgcgatctgttgagtga

SEQ ID NO: 139780 - DNA, 909 bp, Enterobacter cloacae
atgaagctaaatatcccgtgggaatggtatcgcacctttttggccgtgatgaaagaagggtctctgtcaggggccgcacgcaggcttgccattacccagccaaccgccggacgacatattgccgcactggaatcagcccttggccttgttttattcacccgttcgcagacaggattgcaggccacggatgcagccgttgagctgaagggccatgcgcaggcgatggaaaatacggccatgatgattgagcggtcggctgcgagtttcagctccggcgctaccgggttgcggggcgtggtgcgcgtcgccgccagtgaaatcatcggcacggaggttctgcctcccgtgattgcacagataaaggatgcatatccgcaaataaccgttgaactggttctgtctaatcgagttcaggatttactgaatcgggaggcggatattgccgtacgcatggccacgccggtgcaggagcaactgattgcccgtcggatgggcagggttgaaataggtctgcatgccgcgccagcctatctgtcacgacgtggtgctccggaaagtattgatgaattattcacccatacgcttgtcggtttcgataatttgacaccctttattttacaggcacttaaacaatacccacagctaaaccgcgatctgtttaccgtacggaccgacagtgatattgcccaattaagccttatacgcgcaggggccggtatcggtatgtgtcaggttcaactggcagatttttctccgccgttgcagaggataatgcctgattactttgcgtttcatctggacacctggctggtgatgcatgaggatttacgccacagtcaggcctgcaaaacggtgtttgattttcttgctgagggtttacaggcttatatcaacagagcaaaacggtaa

SEQ ID NO: 139781 - DNA, 258 bp, Enterobacter cloacae
atgacacaacagctgattttaattgctggcccctatcgcagcggaaccgaaagcgttcaggcacgtattgatgagaatctggttggtgatgaaatcagtgaagcgatgctgtaccccgttgctcaccggctcatagctaaatgtgatgccatttatcgtattgccggtgcgtctaaaggtgccgatatggacattgaggtcgcccgcaaatatggcctgaaggtttataccgcacttgagaacattcctgaggcttaa

SEQ ID NO: 139782 - DNA, 189 bp, Enterobacter cloacae
atgcaaattaaccaattcgagtacgccattatttttatcctcttctttcaaatttttagctcgaagttaggattaatcttaatggttgtttacaagtccttcctgtctatccatatttctcttttaagcgaagcgcaaatttacaaatatttaaaaataacgcaaccgcaaatagcaaaacgcatttga

SEQ ID NO: 139783 - DNA, 219 bp, Enterobacter cloacae
atgcatcacttatgtcttttacaaactatgcgcaaacgcaaacgattacctggttttttcaaccgtaaattatcagccttaatccaaattacctgccagaaaatactaaaaacccatttctttacagctaaagacacctatatcacgggccagtctttcagctcacatgtcgttggtggtagccttcgcgcccgtaaattctctttgatgtttttttaa

SEQ ID NO: 139784 - DNA, 636 bp, Enterobacter cloacae
atgcctcttcctactctggtagatcgtctaagggcgctttacattccatctgagggaatgattcaaatttgtattaaactgttgaaccaaacacgaattaccttacgacaatgcaaccagaaaattgcctccctacaaggtaggattagacaactgaaatataattcacaccagaatgattacgataactccagtttgcccgacatacttgctagtgagcaaatgcagttcgaagattggcaggaaaaactccaacgggctgaaaaggatttctcttttgccattaaagccacaactggagtttgctatgatgctgaaaagacatgggagttatttatatcgataagtcattatgatgcagaacatatttaccgatttgcaattgcatatgaaagcgaaacacgtaagtacatgcttactaaagctttatctatatttgggaaacaacttaccagctcggaaagctggtcattcattaatgataattcctccgcatattggtatgcaaaggcccaaaatgatttatccattgaattgggggggatcctggccgtgcggctggtcagcgaatttcctcattcgagcgtaatctgcgtgaacgagctcaagcgccatttgctagagtacgtaatatag

SEQ ID NO: 139785 - DNA, 543 bp, Enterobacter cloacae
atggacaccgaatcgggagggcgtgttgatgggcttgaggccgacatggcgaccacgctgtggccgctaagtgcaaatagagattgctcgattttagccgtcagcatccgcgccctggcagtgttgcgaaaggtcagctcgctcaacaactgttcaagttcgctaacattgttgctggactgctcgaagattgcttccagatcgaagattgatttttgcgcatactgccttgtcttcatttatttctgcggccccatatcccttcaattaagagatattatgctaattagcttgatttctaaaactattagctttcgcttgaaatataaagtctcattcggcccactactaaagtgggaaacgtcattaattatctgtcaccccgctaaacgcattcctctcattcctccctcaatcagcagccataacaaaatcagccgaccattgcatcataggacgacgttgctaaataaaggtaatcactgcggttgtaagcgcgacgtacctcatttttgtccatatgagccagtgctgcttcaatga

SEQ ID NO: 139786 - DNA, 723 bp, Enterobacter cloacae
atggcaagaaaaaccaagccgttaactgatacggaaatcaaagccgccaaacctaaagataccgattaccagctgtatgatggtgatggggtgaccctgttaataaagtccagcggtagtaagctctggcagttccgttactatcggcctctaaccaaacagcgaaccaaacagagcttcggtgcctaccctgcagtctcactttctgatgcgcgtaaactcagagctgaatctcgagttttattggcgaaagacattgatcctcaggaacatcagaaagaacagatgagaaattctcaagatgccaaaaccaacacttttctgttagttgccgaacgatggtggaatgtgaagaaagccagcgtaacagaggactataccgacgatatcttgcgctcgcttgagagagatgtttttccagcaatcggtgatatcagtatcactgagattaaggctcatactctggttaaagcagtgcagccggttcaggccagaggtgcattagaaacagtccgatgtctttgtcagcgtattaacgaagtcatgatttatgcgcagaacacgggcctgatagatacagttcacagtgtaaatatcggaaaagcgttcgagaaaccgcaaaagaaaaacatgccgagtatccgtccggctcagcttccacagttaatgcaaacaatgcgtacggcaagtgtcagtgtgtcaacgcggcgcttgttcatgtga

SEQ ID NO: 139787 - DNA, 249 bp, Enterobacter cloacae
atgagcactgatatttcaattcgtgtaccaaaagttatagcgactcctgctgagttcgctgaatgggaggggtactcccgtggctcggtttatcagatgattcataacggtaaactggccaactacattgaaaagaaagaaaaaaacaaagggcgcgtattcattctttacctcaaatacaaaaaggaccaagcgagcaaaaacatggacaagtctgcattcaattacaacgttgtagttggttgttaa

SEQ ID NO: 139788 - DNA, 759 bp, Enterobacter cloacae
atggcaaagcatctgatttacatgctttcaaaaattgaatacggacgcatatccaagtcaaaatttatggaggggatggatggcatcatcgaggggcttcggagagattttccgcatgtcttgcctctgcgccaacaaaactccttccgctttgagcttaaggctgaaggggcgcctgaggttttcactgatgtggatcctgtgctcacactcttatctcctaataaaacatgggggattagaatcgctccaaactttgtgatacttcacaccaaaaaatgtgaaggttttgaagattttcggaaacgttttttgaaggttattgaagccgtacattcaaattttgatattacgcacatttcattcattggaatgcgttatttaaatacttttgattatagtcctgaaactgagtttactgattgctttaaacgtatggattttttacagccgaaactgaactcatgggggatggtcggaagtaatatgtctgcaaggtatttgattaacacagaagctgtgaatatttctagtggagtgatgattgatgctcctaagtatatgccagatcttgctgagttggcttcggatattgacgatgtaaataagattaatgaagggcccttagcacatttggacatagattccatgtttgcaacacaggatttagtagattttagtattgacttcatatcgcagaaagtggaaacattgaggaaaaatgctaatgaagctttttttgaaattgtagagcactga

SEQ ID NO: 139789 - DNA, 639 bp, Enterobacter cloacae
atgtatactaaaactccgggttatgcaagttcatcagtctctgcttctgagcgctcatctgcttttttgaatgcaggaagcagaacaaccaaccaaaaaactgaaacaaaaattataaatggtggttttttttcaggtatagcgttggctgcatttttagcatttatgaatgtcggtgcatctacaacccctactcatagtagtcttaacgcaattaagcctgttacttccccgataattaataggagtaacggtggtgatgaagaagactgcgatgaggataatcttgttcattatagtgatgaacttcaggagttattcggttttaatacttctcaatgggcgaagttgctgaaggttgagcgtaagacactgtataattggcgaaatgctcctgatacaaaaataaagtctggtgcattagaacgtttagttgttctgaaaaaatttgctgaggaatttaatcctaaacattccttgttctttagtaaatttctttttggtcgtaatgcggatgctgggttgttacatgcttttttaaaagagcccttgattctcgacgaattgatcagtcattacgatgaaatttatatgaaattagatgggttagttaaaagaaaagcattgcttggcgagtga

SEQ ID NO: 139790 - DNA, 870 bp, Enterobacter cloacae
atggatctaaaagaggatataagagatgcatggcttgcggctggatggaaaagaggagcattcatccgactggactctaatccgcacttagcagatgaactaccaagaaaactgttaagtttgattgatggtaaagaatcggtatgtattgtaccgattctttacgagtgtgctcttatagaggaatgctttgaaaaagaaccatgggcacaggtgcttgtcatctggaaaacagactttaacaatacctttgcttatgcaaagaacccgaggcggttgcacctcaaagcaaaatcaggtgaccaggaaatctgttttgagatagcagctgtaagctttgctcaggtagatcgagaggctttattgaaagcaacaccggacacttcactttcttgggaaacagggtgtctcaatttaatgcttgattgggtagctgaaagataccgccaggctacttttccggatgcatttaacaagcggctagcgccatccagaaaagctcttgaaagattatggaaaagcgatagctttagtctttactcatcaggggtttatataaagttaaatacttttgaagagctacctgataacactctctatgaagtgagcgtatacattgctataccttatcaattcaaaggtgcagaatacaaagatattgaaaaaaaccattcaccaacaatggttacgcagcttaagtcaatatttgatgctatagagaatattcagttagacagtattgatacgttaagtgaacgagagtttactaaagaaatggaaagaggttttaatcgcttttctcttgagtatttttcatacagatctgggttggagaataaaccactccctgctgaatataaaggcgcataa

SEQ ID NO: 139791 - DNA, 1551 bp, Enterobacter cloacae
atgaatcgccatttcaaaagggactttgacgaccgtgtcaaattaccacaaagtgtatttgggcgggtagaccatgtcgttacgtcagggcctccggccaacattgtgctaattgcagttgatgcaattgacgtcaagtggctgaacgaccaggcaaaacaagacccgcgatttgacatcaatagtcctataaaagcagctggggcttggaagagccaaggcttcccaacacccggaactccgagcatctttgaaagcgccccactatttcgcattgaagtagaattagatgccagaacaaatccatttgaactgccattcttgcctgattatgacggactaaatacgaataagggtacgcaggctttagagggcgcatggtttaagttcgaggtgtctgcaacccaccgtaaagggttcacgcctgcgctaatctatccaggcttgttcgccacgccaatttctgcgtttgttcagggaacaatgccgacacctgttcgcgccaatgctctggcaggaatattttcgttgcagcatttcccaaaaatatcagaagattgtcttcaagctactctcaacgaaactcgcgcagacaagctcgctgtctacggtgttggacagggaaacgcaaacgctttactcaatgcgaattcacccatcacttgtcatccgctgccgtcgctatactttgaccttggtgctggggtatatcgtaacaagcacacaacgccgactcccctgcttttctgctttacactctgcccgccaattatactgtcacactgggatgcagatcattgggctggagcgtacgcgactggagtcagtactcctccaacctaccccgcacttctgcgcacatggattgcgccactacaaaccgtcggaccactgcacattgcctttgcaaatgacatcatttcccaaggtggcaaactatacatctacaacccgcccccgggaaagattaataaggtcgcactctctaagaggactgaactccgattggcgctcggaaccgggaatggcagaaacgacactggaattgttgcggtagtggagaacagaaatctaagtcctagtagaacctggcttctaactggcgactgcaactatacgcacatcgagccctcattagcacctaaaaaccctatagctgtggtagtccctcatcatggagcaaacctaaatggaggaaccgctgcaccaaaaccattccgcggtgtaaacgagtactgccgcctgctctattcgttcggccccgacaatgcacacggggcaacaggtgtccgccacccgacgctcaacacggcgacactaaatataggggctgggtgggatcatggagcatggcacttacccgctccggctgataaggaccctaactccgtcgatgacgtcagagcgaccgcacgacatactgttgctggagccgccggcgcaaatcttggtagtatcctggtgggctggaacggccttcccgcattattcaagcccccatgcggtggtggtataagcatccagtgcaccacaacaccagtactgagctag

SEQ ID NO: 139792 - DNA, 909 bp, Enterobacter cloacae
atgaatattggattaactgaaatattatcatttgctgcattaattgtatcggtattcagtatgctgtatgcaaaaaagcaaagtgattttgcaaagagaaatcattttaatgattatcgctctcatttatctcaatctcatctggcatatagaaaagcactaattaaaacacaaaacaaacataaaaatgatcttcttgaattaagtagacttgctggggaaacattagtaaaaatagttaaccatttcgaccgatatgacaccaatcaacatgcagagagatatctaagacatttactgcatgaaagttcagaaatggttttccgtacattccagggggaacttgcctggcaaactgcagaaaacatatcacatagatttcaccaaatatcttttattgaggataatctcaatccagttaaaaatatatttggagattgctctttcagggagaaaatcaatttaaagtatcatttagaaccaaatgcatatctagaggcggatttagtgaatgatacttatttttgcaatctggttctagagatgaaagcaagacttgatgaatctaaactaaaagagttgatgagcaacgttcaaaaagaaattattaacttcaatacattgcacaacaatctaaaagccaatctttccataagtgctaattaccttgacgatttaatccatcagggaaataaagagcacttcaaactgagagaatccccacaactttactctgaaatgaaaagaacaaaaacacaattgagaacattaggttatataaacatgcctgagggcttagataagtctttaagtgggaaggtttatttctcaatatccaaaagtatccatttatgtgctctccttcatgcaatacaatgtttatattcatggggctgggactatgaataa

SEQ ID NO: 139793 - DNA, 360 bp, Enterobacter cloacae
atgagaatgaccagccgcaaaaaagagatactcagctactttgagccggataacctcgaatgggtgacaggtgagattggtgcgccgccgttcgatgtatcgggcgtggcctaccttcttcatggcatggtgtcgttcgataatcgccaccagatagaatcaacccggcgaactcttgaaagtatggttgctggtgggttgcttgagcgggtgacagtgtacgaatcccggcagataaaaagcggcggtgagactagcgcaacggtcgtgcgctacggtttacccggacagtgtgccgttgtgcgcgataatggcggcgctgataaagcgattgatggggaatgctggcgggttggctaa

SEQ ID NO: 139794 - DNA, 240 bp, Enterobacter cloacae
atgagccagttacaactgattgatgccacctgtcagattgaacaggcacaggctgttttatccatgtggctggagagcaccaccaataaaacagatcccgatttaccgcgcctgattggttccattctgacgctgttacacggtgtacccgaagcaatgagcgaggctgaaaaaaagctggctgaccatgtgatgcgtgaatacagagaggggaagcatgagcaacgtactgacctttaa

SEQ ID NO: 139795 - DNA, 198 bp, Enterobacter cloacae
atgagccgtgaactcaccttagagcaggccgcagaacgcgcgcgccagactgaaataattgcccgtctggttgaagacttcccccaccaccttgccgatagcgaagtatccgcaatcgccactctgttaaagcgcctttccggtgatgttgccgcatggctgattgaagaattggcagaacgggaggccaaagcatga

SEQ ID NO: 139796 - DNA, 588 bp, Enterobacter cloacae
atgactatcgaaaaaagccgattcaattcggaggccgccccacaatcctacgttagccagaaaaaaattcctcaagcagtcgagggggatatttccgttatccggtttgagggtatcaaagttcgcatcgtcaatatggatggcgatccgtggtttatcgccaaagatgtttgtgaggcactggaaatagccgatcacaaagtcgcattgaggcgattagatgccgatgaaaagggggtgtgtttaacacccacccccggtggattgcaggttatgcgtactgtctgcgaatcgggcttttacaaattaatcgcccgcagccggaaggccagcaccgccggaacgttcgcacatcgtttcactaactgggtattccgcgaggttatcccgtctattcgtaaaactggctcctatggtgtgccgttcgccttcctgaacgaccacagcaaacgcaaagcagcttacgacaagaaggccagcaagcgcggtaaagacctgcaagcctgtaaaggtgagaagtcccgcctgatcgccgaagaagcggagctatggcgcaaatatcagcctcaattgccggaggttcactaa

SEQ ID NO: 139797 - DNA, 921 bp, Enterobacter cloacae
atgaaaaaaattcctccaaacacttatttccatatcgtcagagcctcagagttactggaaattgaaaccaatgacttattgcttatgggggcatctggagcaattcacttaggtgtgatcttagatggtataccttgcgttttggccggatttatcaataaggaagcctgggcacaagataaagtaatacaagatactaattgcctcaaaaactcacacttttatcttatcgacccagtgctctatgacggtcaagaaaaagaactccacggagttaggtataacactggcttagcatctgggatttggcatcttaacagtggcacaataaatggagtattacgttatggatcttcaaagattggcccgttacttaccgcttcgcatgattgtgttgattacgacaattcagataccgttgagtcaatccttttaggagaagctcacaaatttgatttacctagcgatattttcagcaaccctgaagaaataaagacagaaataatgcgtcaagatgaagaagtgatcactcttgatagtatttacatttcaaggggttggtttctgcgtgttagagattgtatagataattgcacagctataaccccaagatatcattcccctctaaaaaacactgttaatacagtgaatgaaatacaagagcatgggaatactaaaagatttagtcagaatagagagaactgtctgatggctcttatatacacacgcaatacctttcctgatgaatgtaaaaatattaacggtatagacacaaatgatgcttgggctaacgcaacaataaatcattggctatctgttggtgcaggttattccgagccgtctatcgactatctaaaaaaaataatctcagatatgaatcgcaagcccatggatcgcactacagcaggaaagcccaagtag

SEQ ID NO: 139798 - DNA, 318 bp, Enterobacter cloacae
atggctgagcgctattgtgcagagaacatgtcctttcacgccggtcaacggacgctgatcgacgacgtttcgcttaccctgtctcagggtgaactggtcacgctgattggccccaacggtgccggaaaatcgacattattgcgtctgcttaccggctatctcaaaccggcaagcggactgtgcagcctggcgggcacaccgcttgcggcctggcagccgcacaggctctcccgctaccgggcggtgatgcgccagaacacgcagctcggatttgactggccggttgaggcggtcgtcggtatggggcgagcgccctag

SEQ ID NO: 139799 - DNA, 156 bp, Enterobacter cloacae
atgagccataaggaaagcaacagcatccgtgctgcttatacccacacagcccagcatcttgagcagcgccgcctgatgctccagtggtgggctgatttccttgatgctaacagcaacgatatggtcaggccgtttgagtttgctacaaataaataa

SEQ ID NO: 139800 - DNA, 429 bp, Enterobacter cloacae
atggacactgactggagcttttttatgcctgataactataccgttgttgagaccgtccccactgcagaagcgttttgtcggctgcgcgaaatctcgggcctcagccctcgtcctctggaggcagcccggaaagcactgcctggcagctgttacggcatgcatattctttatgagggtaaaccagtgggtatggggcgaatcgtgggggacggtgcgttgaatttcgatattgtcgatgtcgccgttgatcccctttatcaggggaaagggcttggcagagtcattatggaaacgcttgtagcctggctggatacccatgcctgtaaaggggcctacgtttgtttaatggcggatgtgcctgagctttatgcaaaatttggttttacgctcgttcgcccggaaagcgaaggaatggccagaatctggtga

SEQ ID NO: 139801 - DNA, 123 bp, Enterobacter cloacae
atgatgaaaatcgcgatccgtctttttttcctttatctcctgctggcgatcaccatcgtcgcgtggacctctgtcgatgacagcatgagcatgcagctgcattttgaatatcaaaagttctga

SEQ ID NO: 139802 - DNA, 678 bp, Enterobacter cloacae
atggctgccgctgagggccacccccgcgcccttcgcgcgaatcgagccgctggcgaggctgttcctgaccgtcagtttcccgcccgcatccagctgaatgtcgccctggcgcgcggtgaggttgccgaggttcaccccgacgcccgcctcgctggagaccaggcggatacggttcgcatacatcccgccgagcgcgccggtatccaccgccaccacgggcgcggcgccctcgccggcaaccggcctgacgctgccgtcggcacccacgcggttcgcccctgccgttaccgtcaggtcgttcgcatgtatcgcggcgttcacctccgttgcgcgcgcaatcagcgacagcgcgtcgctcttgctggcatccagcccctggccttcaaccgtgatggcgccttttgtcacctccagcgccagcaggttaccgctggcgtcaaactgcggcttgccggtggtcagggtgacgttcggggtgttgataaatccgcacccgttacaggtaatgccgtaggggttggccaccatgacgtttgccgccttaccggcgacttccgtgtagccctgcagctgcgagcggctggcgcccgtgacttcgttgatgatgcctttcgcttcccgcccggcctgcaggttggggttgttctggataagcccgcccagctgggtccgggttaa

SEQ ID NO: 139803 - DNA, 147 bp, Enterobacter cloacae
atggctatcgggaacagacagattcaagaggaatcactcaaagaagagttagatcgcttgctggaagaacttgaaatcacacaggagcaacgggagtttatcgagtccatgcgacaagaggacggggaaaataacaacgggaaataa

SEQ ID NO: 139804 - DNA, 450 bp, Enterobacter cloacae
gtgaaagaagttaaaaacaacgacgtttatttgactttagatgataaaaaaagtgatgaatttatcttaaagcaaaatctcgacgcgctaagaaacacaaaaaatgacgagatgacgcgtattacgcaagacctggtatcgatcccggcgacgctggttcgtctgaaatggcagaatcgccgtgaaatttatccgcttcaggtcaaagaagagatttacggtgccgtgatgaacgccatcatagagcagcgtcccgagctgaaagagaagcttctgggacgtcttgaggccaattatcagtatctgcttgccagagaaatcgccaccctgcgtctgacgcgcaagctgtccgacggtgagtaccgtacctcaaacgtcacctgcgtggcgcttgatgaggacgcgctggcaaccccttctaccgcaccgacggataataaaaacgcttaa

SEQ ID NO: 139805 - DNA, 672 bp, Enterobacter cloacae
atgagtcatcaacttaccttcgccgacagtgaattcagcagtaagcgccgtcagaccagaaaagagattttcttgtcccgcatggagcagattctgccatggcaaaacatggtggaagtcatcgagccgttttaccccaaggctggtaatggccggcgaccttatccgctggaaaccatgctacgcattcactgcatgcagcattggtacaacctgagcgatggcgcgatggaagatgctctgtacgaaatcgcctccatgcgtctgtttgcccggttatccctggatagcgccttgccggaccgcaccaccatcatgaatttccgccacctgctggagcagcatcaactggcccgccaattgttcaagaccatcaatcgctggctggccgaagcaggcgtcatgatgactcaaggcaccttggtcgatgccaccatcattgaggcacccagctcgaccaagaacaaaacggccatcaacatcgaatacatgaaagccagcatccgggccaaggtggagcacccatttcgcatcatcaagcgacagttcggcttcgtgaaagccagatacaaggggttgctgaaaaacgataaccaactggcgatgttattcacgctggccaacctgtttcgggcggaccaaatgatacgtcagtgggagagatctcactaa

SEQ ID NO: 139806 - DNA, 1263 bp, Enterobacter cloacae
atggcgaaactgacagacatacaaatcagagcatggataaaagcgggtgagcattttgctggtcgctctgacggaggcgggctgtatttatgcttccctgagaattactcgatacccttctggcgttttcgctatcgctttgcgggcaaacagcgggcaatggtcataggcacgtattctgaactgtcgctcgctagagcacgcgaaacggctaaagagatgtcagcccgtgttgcgctgggctacgacgtatcgggagagaagcaagaacgcaaggctgatgcgttaaagaaaatggaggaagaaaagcacgcgctgcgtgtttcagagctggccgctgaatactttgagcgccagatcctcaaccggtggaaacacccggacattctgcgccgtcgcatagacaaggacatcaaccccaatattgggcatctcagaatcgaagacgttaaagcctggcatatcgacgacatgctgcaaaaaatcgtccagcgtggtgcgccgacagtcgctaacgatgtgttgaggtggactcgccgtatattcgattacggcataaaacggcatatgctggaaactaatcctacaggcgcatttgaaattgctgatgcgggcggtcaggagcaaagccgggaacgctggctaagccgtgaagaactcatccagttctttcaggccatgcctatgacaaagggattctcacgtcaaaatgaactgacaatgaaactcctgttagtcttttgctgccgcaagatggagctttgcggtgctcgttgggaagagtttgatcttgatgaagccgtctggcacttacccgcagagcgggttaagaatggcgatgcgatcgatatccccattccagcaccggcgcttgaatggctgaaagaactgcaccggatgtcctgcaatagtcagtgggtgcttccggccaggaagatgcagcaccggatgatcccccacattcaggaaagcacattgccagtagcgttagcaaaaataaaagccaacatgcccggcgttcctaacttcaccattcatgatttccgacgcacagcgcgatctcatctggccgcattgggagttgatccagttgttgcagaacgctgcctgaatcacagaattaaaggcgttgaggggatttacaaccgctatcagtatttcgacgagaggaaacaagccttagatttatgggctaacttgctggtttccttagaaagaggtgaggattataacgtgacgccgttgaggaagggcatagggtga

SEQ ID NO: 139807 - DNA, 726 bp, Enterobacter cloacae
atggatatatccagttttaatgaccggacggctgagattgttattctgtcagcggatacctatctaaaagagggaatgatccggatgatagaggaagttgcgaagtcggccagcccgcaatgcgttcatcgcggacaggacatctaccgtatttcgctggccgggcaaacgtcatgcagtccggacaggggaaatatactgctgctggacgagcgggtcttcacagatccgtcccggttctgggagatcctgtcagcccgactgaccgacgaatatcatatggtcattattattaccggcggcaatccgcattattgtggagaccactatctgaacatcagactttcgcttggtgcgcttgagcagagcctgtcagggcttctctgttcaaaggaggcttatcggctgaatatgagtgatattctgagcccgctgaacgcgaatcagaaaatcctgctcggcctgctggttgaaggttacaccctggaagaggcgacgcgcaggatgaactgcagcataaaaacgctttaccatatgcgcaaacaattaggctggcttctgggagtgaatacgttgagcgagatgcagcgttttatgtggctttaccgttttatgatgaatcatgaaagccggtacacggcggtcagaaaaatacagatcgccgggcagcagattattgagggaacagacttcaaaaaaacgtctgagagcatcgttgttctctga

SEQ ID NO: 139808 - DNA, 1155 bp, Enterobacter cloacae
atgaaaataatgacaccggtgaaaagccttctggcacttatcctgctctgggcgggacagagccaggccgcaatatttgattgcaaagaatcgacctcctggccaccaaaagccaatgtatttacgcttaatggcgtgatttcggtgggagatgacattccggtagggtcggtggtctatcgcgcaagattatgggcagctgctatgggggtacgttgcacaactccagatgggagcggaataggtacagaactttacataccctctcgcgttgaagtcattaatactcctgccagcgaggtgccgggggttactgcaccgtcagttggagaaaaagtttacgaaactaatgtccctggaattggagtgtcagtcacggctgaaggaaaaatgccttacgaatgggcgactcaccggttcacgataatcagcagcactcaatctagcagtactgctacttatgcgagacttgaactaaaattaatcaaaacgggaactgtttcacccggtatagttaatgcgttaaatttcccacagttgcaggtaacgtttctcacacccacagccccggcagggagtacttttacagggtttccaatcccttattcgacagtaagttataacggtactattcagatagtgaagagtacctgtcgtgctgaagttgccgataaggttgtggatctgggaagccatgaggtcaaagatataaaaaatgatcctcagagagtgacaacatggacggatgcaagtctgcgtttaacaggatgccaattttcgcctggattgtacaatctaagcaatacaagtatttatcatgtcgggacaaatgacgtaggccagggcactcccaacgctaacaccgtccgattatcgctcagtgcctcaacttccattattgatccactcaacggcattattgctctgaccccggaatcagacagtgcaacgggtataggcatccagattggagtaaaagcaggctctgaaatacagccttatcaatttaatatgggtgacgtgattttcacacctacctcacccgatacacaaagtctggatatacctatttttgcacgatataaggcaacgagtactacaataacaccgggcaaggctaatggcgcggtcgtttatacactcaattactattaa

SEQ ID NO: 139809 - DNA, 2538 bp, Enterobacter cloacae
atgagccgcaccttttgttattctttattgtccatatccgttatggctgctctttcgacctgcgcatttgccggtgccgtggagaacacttcagaagaccgcgtgcgacaggagtcgtttcgttttgaccccattttcctgaataccagcggtggccagcgggttgatttatcccgcttcgaacacggcagcgccatgctgcccggcatctggagcaccgatattgtggtcaatgacgagctggtcgccagtgaaaaactgacgtttatcgagcagcctgaccgccaggtgaccgtctgcattactgccgacgtcctgaaaaaaatcaacctcaattacagtgccttgcccgacagcctgaatcaggctctgcgcaaaggagagccctgctatgacctggtagcgctcattccgggcaccacgctgaactatgatgcgggcgaccaaaagctggagtacaccattccgcaggccatgatgcgcaacaccccgcgagggtacgtcagcccggccctctggaacgcgggcataccggcggcgctgatgagctacacggccagcacctacaccacccgctctcacggtcagaattatagttcctcctatgttgggctgaacgggggcgtcaatctggggccatggcagtaccgacacagcggcaactacagctggcaggaaaacgtagggagcgactaccagtcgctggagaactacgttcagcgggacctgacgcccatcatgggccgcgtacgcctcggcgagacgaccaccagcgggcagctgtttgacaccctgtcatttcgcggtatcgaagtgctgagcgacgaccggatgcagccccagtcgcggcggggctacgcgccggacattcgcggaattgcgcgcaccaatgcaagggtcactatctcccagagcggcaggctcatctatgagaccacggtttcccccggggccttcgtcatcgacgatctctaccccagcggctatggcggcaacctcgacgtcaccgtgaccgaagccgacggctcagttcaaacgtttcaggtgccttacgcctcggtcgcgcagctgctgcgaccgggggcacaccggtacgacgtgctggctggaaagctcaatgacccttcggtctcgtttgacccgacgctctatcaggcaacctaccagcgcgggctgaccaatattttcaccgcctatggcggcattcagggcagcggctcgggctactacgcgctgatgctgggcaccgcagtgagcaccccggtgggagctttttctgccgacgtcacccaggcgcgcacgcacctgaagcaggcaccggatggtgcctccagcgggcagagctaccagctgagctacagcaaatatattccgggtaccgacagtaatctcaccatcgcggcctaccgtttttcgacggcgggatattacgactatcgcacggcgatgcaggcgattgatgaggagaggaagcacgggagtatcagcaacatctggcggccgaagaaccggttcaacatcacccttaaccaggggctgggggacggcatgggccaggtgtacctgacgggttatacccaggattactggtaccagaatcattcggacctgcagtaccagctgggatacagcaattatattggtcgggtgagcttcaacctcagcgccagccgcgtgcgcggcgtgcgcgggcatatggaaacaaacatgctgttcaacatgtcggtcccgctcggaagctacagcagcggtaacgtaccgacgctcaatgcgggattgacgcggaacagcaacggcacggtaggccaacaggcaggcgtctccgggacatacggagacgatcatcagtacagctacggcgtgaccgggagccactacaacaaaaacgtgggcagcagcgtggtgctgaacagcggctggcgttcgccttacagccatctttcaggcagctacggtaccgggaaggactatcagaacctgagccttggcgcgagcgggacggtcattgcctggcagaacgggatagtggctacgccatacaccggggacaccttcgctgtggtggaggcgccgggggcaaaaggggcgaaggttggcggttatccggggattcgggtggacggtttcggccatgcggccatcccgtatctgaacccctatgagatgaacgaaattaacctggatccgaagggaacatcgcaggggctggaattcagcaacacctcggatcgggtcgtgcctctgtcaggtgcggtgagccgggtaaggttcacaacgcgggaaggtattccgctgctcatcacgctgcgcgatgcgcagggtaacccgctgccgtttggcgcggacgtgacggactcgtcaggtgtagtggtggggagcgtgggtcagatggggcaggcgtacgtgcgggtagagaagcgggaggaggttctgacggtgaagtggggagacggtgccggacagcagtgccggttcagctaccgaaccacggaaagcgacacaaccacgttcagcaagctgaacgccacgtgcagataa

SEQ ID NO: 139810 - DNA, 735 bp, Enterobacter cloacae
atgatgcccctgaacagacactcttcctttaaaacgctgctgctctcagccgctgtactgttttctgcacacgccaccgccagcgttaccgtgagtggtacacgggtaatttacaacagtgcggaaaaagagatcagcgtcaggctgaccaacaacggcaaaaaaccggttctcgtacagagctggattgacagcggggatgaaaacgccactcctgaccggatcgacgtcccgttcacgctgacgccacccattaaccgcgtcaacggcggtaaaggccagacgctgcgtattggttacaccggatcccgccctctcccggctgaccgggaatccgtttactggcttaacgtaatggaaattccgtccgtaaacgagacggaaactaaccggctgcagattgccctgcgcacgcgtatcaagcttttttaccgtccggtcgccctcgcggatcgggagaaagcgtcggaggcggcggagaaggtcgtctggtcaggcagcaacggtgttctgcaggcccggaacgactcgccttactttgtatccctcgcctccgttaccgtcagcgcgcagggtaaaacccactctgtcgacgggaagatgatccccccaatgggtcagatttcgttttctgacaacaagctgccagcactcacccagggtgccgtcattcgctatgagtatatcaacgactggggtgcagtcagacaaaaagaaagccgccacggaagctga

SEQ ID NO: 139811 - DNA, 561 bp, Enterobacter cloacae
atgaaaaagacactgatgagcacttcacttattgccgccctggccatctccgcgttttccgttaacgcggcgtcgaccggaacaatcacctttaacggcgaactgaccgactccacctgtgatgttgacatcaacggccagggcgcggatgccaccgtggtactgccaacggtgagcgttaaccagctgaccgccagcggtgacaccaccggtcgcacgtcattcaacatgaacctgtccaactgcgtcgtgggcacccagggcggacactccaaagtggcggcgttcttccagccgggtaccaccgttgatctgagcaccggtcgtcttcgcaacgtcagcggtaccgcaaccaacgttgacctcgaactgctggacgccaccggaaactacgccgccatcaacgtcggtaacaccgaccaggtaaacaacaccgcgtatgtcgacatccaggctgacggttcagcgctgctgccttacgccgttcagtattacgccaacgcgcagaccacgccaggtacggtggtcagcagcgtggtttacaacctgcagtacaaataa

SEQ ID NO: 139812 - DNA, 444 bp, Enterobacter cloacae
atgcggaaatttggatatcttctgggagatgacagtaatggcgtgctggttctgcgggaaaatagagttctgattccactcaacaatcaaaaaatgaatcagaaacctgtttacctgcgacagacgatgttcagattactggagtttctgcttgaacgcggaaactcaggcctcctgcgcgatgaagttattatgaggaccgtctgggaaggccacggacttaaatcttccgctccacgtttatggcaggtcatgagcgaattaaagaaaagattgagcggactcggtgtcgatgaggattttattatgcgcgtggaggggcgaggttatatggtcaataccgcagcctatgaccccgtatatatacgagcatcatacgatcggctaagtcgtttttttatgaaccgattgtccggaattgaaatcgcaaaatccgtgaaataa

SEQ ID NO: 139813 - DNA, 786 bp, Enterobacter cloacae
gtggataaatcttttctaatagatggcaggttggtttttcacagtgggcgaaacgagctggtcagccagaaccgccaggaaatcaaggaaatattgaatgccccctgcgctcgctgtctagaggtattattgagcgcacccggtcaaatcgtcagccagacagaactctataaagcagggtggggcgagggctggaaagaggtgtcgcctaatacgctataccaaaatattctgttggcccgtaaggctctacggaatgtctctgaaagtgacgacgacttcatcattaccgtgcccagaaaaggtttcagatttaatgaaaacataccggtaacggaaagcgcactgtctcctgaggctgaaagccaacaggcggccgctattgccaaagaggattccgtttcagccggacgtcctttgacgtatacgttgtcccgactcctcatccccgctacatgtctcttcgttatactggctgttgcaatattcactttggggatttaccggtttgacaatacgtatcacgacgatttttcggatgattatatctattttgagacgcgttcagaatgtgatattcacctgagtaaacaggtagccctttcctctactgaaattgaaaagctattgaatctgtggccggctatcacgtcagactgcagcgggttccctctaagatacgtgaccccttaccgtaatcgtttgagcgtattttacctctcatgtgacagtaaagataaggctaaaagaatatgcagatcaagctatctacgtttatcaaaatag

SEQ ID NO: 139814 - DNA, 501 bp, Enterobacter cloacae
atgcagatcaagctatctacgtttatcaaaatagcagcgtttactgtcagtgcgctattattgatttattctgtttacgcctttctgggaatgaagaaaaaggcgtccggaaagattattcactgtacgtcggcatttgatagccaggttaataaaagcagcctgcatgcggtcgtgacgctgtatctgtaccggaataaaggcagtgtacaaatcagcggtgattatatttctcctgcaggcgaacatactccggttaaatcggtggccggtatcatatatcagaatgacggtcaggattatcatgtccgttttaccggcaataaaacgtctttcagtggaaaggatctcaaagaagaattcaatcttctggttcccttttcattcacgagtaaaaatattgattatgtttatcagttacagcagcagactgacggaagttatctcgtcagacaatatggtgttcctctggtgatgtgtaaaaaaatcgtacgtcaataa

SEQ ID NO: 139815 - DNA, 1824 bp, Enterobacter cloacae
gtgatcgaaaatttgcgtaacatcgccatcatcgcgcacgtagaccatggtaaaactaccctggttgacaagctgctgcagcaatccggtacgtttgatgcgcgtgccgaaacccaagaacgcgtgatggactccaacgatttggagaaagagcgtgggattaccatcctcgcgaaaaacaccgcgattaaatggaatgactaccgtatcaacatcgttgatacccctgggcacgccgacttcggaggtgaagttgaacgtgtaatgtccatggtagactccgttctgctggtcgttgacgcaatggatggcccaatgccacagacgcgcttcgtgaccaaaaaagcttttgcccatggtctgaagccaatcgttgttatcaacaaagttgaccgccctggcgcgcgtcctgactgggttgttgaccaggtcttcgacctgttcgttaacctcgacgcgaccgacgagcagctggacttccctatcgtttacgcctctgcgctgaacggtatcgcaggtctggaccacgaagacatggctgaagacatgaccccgctgtatcaggcgattgttgaccgtgttcctgcaccaaacgtcgatctcgacggcaccctgcagatgcagatctctcagctcgactacaacaactacgttggcgtaatcggcattggtcgtatcaagcgcggtaaagtgaagcctaaccagcaggttactatcatcgatagcgaaggcaaaacccgtaacggtaaagtcggtaaagtactgactcacctgggtcttgagcgtatcgagagtgacgttgcggaagcgggcgacatcatcgctatcaccggtctgggtgaactgaacatctccgacaccatctgcgatccgcagaacgtcgaagcgctgccagccctgtccgttgatgaaccaaccgtatccatgttcttcaacgtcaacacctctccgttctgtggtaaagaaggtaaattcgttacctctcgtcagatccttgaccgcctgaacaaagagctggtgcacaacgttgcgctgcgcgttgaagaaacccaggatgccgatgcattccgcgtttctggtcgtggtgagctgcacctgtctgttctgatcgaaaacatgcgtcgtgaaggtttcgaaatggcggtttcccgtccgaaagtaatcttccgcgaaatcgacggccgtaaacaagagccgttcgaaaacgtaacgctggacgttgaagagcagcaccagggttctgtgatgcaggctctgggtgagcgtaaaggcgacctgaaaaacatgaatccagatggcaaaggccgcgtacgtctcgactacgtgatcccaagccgtggtctgatcggcttccgttcagagttcatgaccatgacctccggtaccggtctgctgtactccaccttcagccactacgacgacgttcgtccgggcgaagtgggccagcgtaacaacggcgtgctgatctccaacggtcagggtaaagcggttgcgtttgcgctgttcggtctgcaggatcgcggtaagctgttcctgggtcacggtgctgaagtttatgaaggccagatcatcggtattcacagtcgttctaacgacctgaccgtaaactgcctgaccggtaagaaactgaccaacatgcgtgcgtccggtactgacgaagcaacggttctggttccaccgatcaagatgactctggagcaggctctggaattcatcgatgatgacgaactggtagaagtgactccacagtcaattcgtatccgtaaacgtcacctgaccgagaacgatcgtaaacgtgctatgcgcggtgcgaaagaagagtaa

SEQ ID NO: 139816 - DNA, 618 bp, Enterobacter cloacae
atgataacatcgtcgaaaacagttgcccgctgtataagctgtgaattgtcctgtcagttatttccagataacgcagtacgatcacaatattgtggtaatgcctcgttcgcagtttggccggttggtaatcatttcctgcagattgcagttgtaaataaaatattacgcaggaacaagaatcacctctcacgagggtttatttttgtagacttttcgatgtacaacctgcgcgtactggccgatccgcaatggattaaacgcctggcgataactaacatgaacatcgttataatctcggaccgtaaactagaggcattggctaattacttactcactcatcacagtgaaataaagggagttatttattcagacgataatgacgttatattgcaggataaaatcaaccaccttttctccggaagacgggtaaatagcagacgtggaagtaagttgaatgctgtcgaatttactttgcttaacagattcttatcaggagcgtgcctccaggagattataaaaacagacagcattgatcttaaaaaaatttatgttcataaaatacgacttgagaggaagttaggtaccagcattcataaaattctcgtttctattttgtaa

SEQ ID NO: 139817 - DNA, 744 bp, Enterobacter cloacae
ttgtatctcattaacaagttggtcgagtatgacccagaaaacaaaaccctggtaaatcatattaccgggcgaacgatacaattgcagcttcctgccaatctctgttttctttatctcatcacccatccagggaaaataatttcgcaaaataagttaatggtggtgggatggggggagcgcaatgacgtcacaacaccgaataccttttaccaggccattttgacattacgcaatgcgcttgctgaggtggggttgccgcgcgatacggtaaaaacgatttctcgccgcgggcttacgctttccgaagccacccaggttgaagtatttaccccaacctctgagtccgtgatggttaataaagaggcggaaatagctgatggtacggcgatgcagatgccggtctggttgataataaccaccgctgtgcttttgctgatcgcgcttatgaatggggtgatattatataagcatcaccagaacatgccgtttagccactacatgccactttcaacgggcagtacgaacaacgcctgccagcttttttatgcacctaatgaacctgttcaggatcattacttgcgcctgttaaaaaatcatcccggtctgtgcgccgaaaaaagatacgtttttctgatcggctatagtaaaacggagcgaatcgcggcgtttgtctgtaataacgatgcgcgacgggatgcggcagcattatgtaccacgcattatttttgggcgcatgagcaatga

SEQ ID NO: 139818 - DNA, 375 bp, Enterobacter cloacae
gtgccggcagaaaaggtcatggagaacatcgagtccgtctggcgcgatgtggcgggcagttacctggcgaccaacgaccatttatttaagaacttttttaaatacaaactctgggagcagggcttcccgcagaacaatggccgcagcatgttgaataatctttatttaatcgttgcggagttctatttccttaaaacgttacttgccggtcaggcgatcgtggcgggaaaaattgaacaagataatatcattgatgttatttacagcttccactcgatgagccagcataatcaggaagcgggaaagctctttcatcaacatatagatagcgtcaaactgggcgacgatctttcattgttacaactgttaatttag

SEQ ID NO: 139819 - DNA, 927 bp, Enterobacter cloacae
atgttttcacaaaacatactaatcatttggatggtagttctcacgacaataattgcctttatctttaattcaaagtatttttcttttttagatagaaaagatgacttcagtaataaagaaataaatggattaagattctttttatccatcggtgttgcatatcttcatttcattttcagttataattatagcacaggaaagggatggtcaattgctaattatgatattataaccttccttggtaaattctccgttggtatattcttcataatatcaggctaccttttttataatagcgtcacttctaaaactgaatggaaatctttttttataaagagaatccttagaatagtccctatgtgtactttgtcttctatcatttgtcttatcattgcaatacataatggatgggataactttagcatagaccatgaattttacaatatactatattggtttgatggcggcttaacaaattaccgaccagatgtatcatcattcgtcaacgcgggtctcataaacgcaggcgttacatggacgcttgtatgggaatggatgttctatttttccttaccactacttagtctatttattaaagatgagaacaggcttccatttgttatagcattaatagcaatcgcctattatattttacccaaatatgactacaacgctgcaacttatgcggcacttttctctgcaggattccttgcgaaagaattaaaaacacaatggaataacaagataattttaaatgcgttacctttagcgctgttaacaggcatgtttttatctggtagcttgagttttacattaccaatgattccttttatgtttatatttttcataatatcgataaacaaaaatagtttatttggcattttaagaagcaaaggcattgtaaggctaggggaagctagttattaa

SEQ ID NO: 139820 - DNA, 201 bp, Enterobacter cloacae
atgaacaatactattaatgcgtcagatactaacatgacaacatatctaataatttcttcggtgacgttattaataacaatgatcgtgagttctttcacctatacattcatagaaattccatttatgaacttaagtaaacacatcaataaaaatagtttaaaatcaaatagttcattaatgaaaaacaaaataccgcagtaa

SEQ ID NO: 139821 - DNA, 456 bp, Enterobacter cloacae
atggataccttgttagaacgctggtgcgaaagccgtccctggtatcgggtgcttttctggtgtctggggagtctcctggcaggactggccgcgtggggcaccttgctcagaccgctggacaggcagtgtgctgaacgacagcgacagctgattcaggacgcgagggcgaacgcggcgttatggcctgccgtcagaaaggtgccgtttcttacggaaacaacggaaatacgcgagctgacgccgttttccccgctcgattttcagggcgatagcgcgacgctggttcactggaagccgctgcagaacggaggggaactgatgctggaggtggagtggcaggctctcccggcgcttttttcccggctggcgcagcgggatgtgcagatcgccgctttcgcaattgcaccacaaggtacagcgttgcgcctgcggctggagctggaacatgcgaaatag

SEQ ID NO: 139822 - DNA, 483 bp, Enterobacter cloacae
atgaaaccactatccatagtgaaaatggccgtactgtctgtttcgttattcaccgtgttacaggcaaccgccgccatgccaacctgcgaagaggaaataaaggaagccaacgcctttttatcttctcagggtatggtgcgcgtcaataacgtgaccgacctggcgacaacgcttcgtcatataaaaaatttcggacgcctgcccgaccgctatatcacctcggatgaggctaaacgcctcggctggtcgggaagtgaaagcgaatcgctttggggagtgaaacacaccaatcaaaaatggatcggtggcgataaatacagccatcgcgctcttcctgccagtcagccctggcttagcgcggatgtcgatgtcatgaagggatatcgctctcccaagcgtttaatttacagcctgtcagggcaacagcgctttattacgaccgataagtatcagcatattgttgagctggatccctgccaataa

SEQ ID NO: 139823 - DNA, 408 bp, Enterobacter cloacae
atgtctgacatctatctcccgaccctcatcagtgaagccttgctggctttttcaggtttatttggcggcgtcagtatctcgtttttctggcaaccgcagcgattgcaccagcacagccgatttatggcaggcattatttttggtggaatcagcatgggcgcggccgtcgcattaggtggattagcagcccgctggttaaagatagaccttaatcaggccgatatcacgcttggtttagggtatatcctcggggcaatgagtaatggcctgatcgtctggctggcaaacttttttcgccggcatgaacaacgcgatatttttgatgttgcaagcgtcatcaaaagtaaagtcagacatgaatcactttctccgcctgatttaacccacaacaaacccgatggagaataa

SEQ ID NO: 139824 - DNA, 291 bp, Enterobacter cloacae
atgcttaacataatgaatggctgggtgcttccctttattatcttcgtcgacctgataacatcgctgctgattttgtttgccgcctatagccgaagagtccatgccctgccggtaatgtgtaaaattggcttagccgccctcgcctttggtttttttggtgaaagcagcttaaacatgaaatttattcttaccggtgctgatatactgagtgacagctttccattctggctattgcaggacttcggaacgctggtggtggtgatatattatttcaaatctcagtaccgttaa

SEQ ID NO: 139825 - DNA, 606 bp, Enterobacter cloacae
atgaatatattaatgatcgatgaattaccgatcttcattcacggtatgaaaacagagctggaacgcgtaatgccggaatgcactgtttttgcagcgaacaactttgaagatgcacacgcaattttaacctctatgccggtcagcattattttgctggatggtgaaatgaagtgccgtgattttatcactaatttgatgacaaactggcctgagctaccgatcgtggtgatgttacgaaaaacgacggataagatattcaacttctacatccgccaaagcattaagggcatttttaccaaggatctccccgccgagaaaatcagccagatactttgtatggtctcctcgggggtggtctgttttccggagcaagccgtggtccagcgagaacaacccactggcgggttgccgatctactccctgagtcgtcggcagaaggaagttcttaagctgctggcgaatgggggaacaaataagcagatcagccggcaattgaatatcagcgcaggtacggtcaaagtgcatctggaatccatctttcaccgattacaggtcaacaatcggacacaggccgcaatgctctattttaaatatatgtctaattag

SEQ ID NO: 139826 - DNA, 1131 bp, Enterobacter cloacae
atgacaatactaacagtgtatttctgtggtactggatctaataaatttgatgagtctcatgctaattactggaacggcgagctcatctcttctctggcagccaataacaagggtaaagagttcgccgaatgggtcattcttgatggcccagggagcggtaatctacaaagcgatgagctttgggtcaaaagcggagaatattctcagcttcgcgcccagcttctgggcagcggctggaatgagaatgttcagcatgcgatcaatattatcaaaggccacgttgactggcagcgtgagaagctcacaaaagaaaactatgagcagcttaaaaaggcgggcgtaccgattcaggacgttgaggttaccggttccttttggtggcgcaaatatgactatggcgatcgtaaagtgacccagcaggcgctacagcagcaaatcatcaaaaccttccgtcaggggcagatcctgcccactcaggtgaaccttgttgggtggagccggggcggaattagctgccatatgcttgccaatgcaatgcttgccgacccccttttaacgacgattccggtgaatatttttgcggtcgatccggttccgggcatgggcaatttccaggcggacaaagttactctgggcagcaacgtgaaggagtatgtggctttctatgccagacatgagcgatcaaaaggtttctcgtgcgtcattccacagaccgatagcgcgacaaaagtccatatttatcccatgtccggccgccacgctacgttggtggggaatgcttcggccaatgggaatagcggggaaaaagtggtccatgagcccggcacgatcgtgcgtcatttcgccgaagtttgcctgcaaagatggggcgtcacgctggataaaaagctcaatctggatggggtgcagctgctggaactgcatcaggccattcagcgcaacgctccgctattcaccgagatgcagaaaacggtgtacaccatttcggaaaacgatgggggggagcgctatgtctcgctgggcagcaccggaaaacggttctcgtccatccagggttcgcgcttcagtccggagtcagggctcgcgtcggattatttgactaatcaggcgatctataacgtgttgaaataa

SEQ ID NO: 139827 - DNA, 594 bp, Enterobacter cloacae
atgacgatgtgtcgggtactgaatgtcgcccgggccgggttctatgcgtggctgcataaccctgtctcggcgcgtgataaagataaccagcgcctgctgatgcttatccgcgactcatattccctgagcggaggcgtatacggttaccggcgggttcatggcgatctgaacgaaatcggggaaacctgtggtagaaaccgggtgggtcggatcatgcaactggaccggattaaagctgtgcgcggctataaagcgccacgtcgtatcgctggcaggccttcagtcgttgctcctaatcgcgtgcagcggcagttcaccgttgtccgggccacccaggtctgggtcaccgatattacttatatccgcacctggcagggctggctgtatctggcggtggttatcgatctcttcgcccgtaatgtggtcggctggtcgatgaaacccactctctcacgcgaactggcgctcgacgcgctgatgatggcggtctggcgccgaaaaccagacagcgaggttatcgtacatagcgatagtaataatgccgatgtcagtctttaccaccacttagtttgccgtttaaccagattggtgtga

SEQ ID NO: 139828 - DNA, 1266 bp, Enterobacter cloacae
atgcgctataaaatgatatcggcagctgtatttttttctatatatatgcagggagcggttgcggatcctgttgacagtaatgcgtgctcaacaactaatagccagagcctgattcaggctattggttgtggcagtattcacggcagcgcccgactgttttcttactcaacccacaacgcctatttcgcacgtggactcaatcaggactccaccactcttggcggatatatcacgtataccacagcacctttttatggttttcaggctgccgtgggagtagaaggacaaaccaacctgctggcaggctcggactcggtcgctgaactggcccatgacagtgggggcgttgatgaagcttacctcaaatggcgccagggactgttgtcgatcaccgccggtaaccagcatcttaacttgcctttcctcggcgactattccaatgcccgggtactaccttacctttatcgtgcagttgacgtgaagtatggtaatgacactgattttatccgcgtgacacgggttttcagttataaaagttatgctgattcaacattcacccgcacatcacgtctggctcaggacaataccttcagcggaaaaactgatggcctgatcgcgctggggctcgcgaaaaaacgcgatcttggtcaacgctacttcacttctcagctatggggtgagaaatacgccgatattaccaatattgtctgggctgaagtgcattacgtagcccctgatattctgtggaaaccagatctggggatacagggattttatggcaaaaataccggtgacagtgtgctaggaaaaattgagaaccgcacgctcgggatgcaactggtcgtttacccgctgaacactctcagttggcaggtgggctacgataaaatatttcccgaagccgacgcttacaagaatggcgcgttggttacgccttatgcctacaaaacctcttccgacccttattttgcaaaaccctatttcaccagcaccccgatgaccggtgccggaaatgctttttcgacgcaacttacatggtcttattctgataaatggacgctaggatctcgttattcctttctggatgtcaaacccgcgaaagatgccaaaagcatcaaccagtctgaatatctgctatttgcacgttataactttggcaatgagttgaaggggctgagtatttcagattacttcggcatccagacatcgccattatatgagcgcgagtttattcaaaatagagtgcaattagcatatgatttttga

SEQ ID NO: 139829 - DNA, 1257 bp, Enterobacter cloacae
gtggattcaatgaataatgttcgttcgtcggagggatgcggaacggcttcctcagaggaaattaccggttacagctggaaagcgctgcttggctcggcgatcggttatgcaatggatggttttgacctgctgatcctggggttcatgctgcatgctatttcagcagatcttaacctgacccctacacaatcaggttccctggtaacatggacgctgattggcgctgttgcgggaggcattatttttggcgctctgagcgatcgctatggccgcgtccgcgttctgacctggacaattgtgctatttgctacctttaccggattatgcgcttttgccaccggttactgggacctactgatttaccgcaccattgcagggatcggccttggtggcgagttcggcatcgggatggcgctggctgccgaagcatggccagcacgtcaccgctcacgcgtttcgtcatatgttgcgttaggctggcaggccggcgtcctgcttgccgccgtgcttacgccgatgctcctgccgtttatcggttggcgcggcatgttcattgtgggtgtaattccggcattgattgcctggtttatccgccaccgtctgcatgagcctgatgtttttgttaaccagagcgctgcagaaaaaacctccatgcttgagtcgttccgtttactggtaaaagacaaggcaacgaccaaaattagcgcagggattgcgatcctgacctcagtccagaacctgggctattacgggataatgatctggatgccagcctatctcgccaaacagctgggttttggtctgacaaaatcggcaatgtggaccacggtcactatactcgggatgatggcggggatttggttttttggccagcttgccgaccgtatcggaagaaaacctgcttttattcttttccaggccggtgctgcggtatctattgtgttttatgcacagcttaccgatcctttaactatgttatggaccggcgctcttctggggatgtttgttaacggcatgcttggcggatatggggcgttgatttctgaagcatatcctaccgctgcccgtgcaaccgcccaaaacgtattatttaatattggccgaggtgttggtggatttggcccggtgctgatcggtgcgattgccgcaatgtactctttccatctggcgattgcccttctggcatcgatttatgttatcgatattattgccacgatattccttatccctgagttgaaaggtaaggaactggattaa

SEQ ID NO: 139830 - DNA, 849 bp, Enterobacter cloacae
atgggtgacacaagctgtttcaatcgtcatgcccgccaggtagcgtcacatcgctgcctggtgtcagagcatcgctgggttaacaaacgctataaatatttgcgcctctccgcagcggtggatctccatagcgcgaccctgcctgggcagttttatatgcttaaatgccccaatgtgaagtcgttacatcctttcctgctcaggcccatgagcgtttacggtaccgggcctgcgcctggaaccatcgagtttttgtacaatgtcgcaggggcggggacacaagggctggctgagttgcctgaaggtagtgagatggatattgtcgggccgctcggtaataccttcactctaaagcctgaattccgtcgggttatggtggttgcacgtggtgtgggccttgccactatggctcctttgctgcagcaagctgctcgtgccggtatcgttctcaccattgttatgtcggcacgaacgccggaagacctgatgcgtaatgcgttcctgcgcggcatcgatgctgatgttcattgcctttatgacagcgatggcacctcggcaatgagtgcgctggataagttactgcatgatattcttggcaagcatcaccacgacatgatttatacctgcggctcacaccgtatacttcgcctgcttcagtccatcctggaggtgttccctgatactggaggcgaggtcgcgcttgaacaacgcatggcgtgtggaatgggcgtttgtctctcttgcgtgaggccgatccagcagaacggacggattgaatttctgcgtgtctgccgtgaaggccccgtttttcctattcgttctgttgtcggggaggtggagtttgcctga

SEQ ID NO: 139831 - DNA, 942 bp, Enterobacter cloacae
ttgcctgaacttaatgtgagcctcggcgcactggcgctcaaaaatcctgtgatgcctgcttccggctgttttgctattgagtacagtgaagcgctcgattttaaccaactgggtgcaatggtgttgaagagcgtttccccgatatcacgcccgggtaaccctgtacctcgtgtctgtgagactcggggtggcatgatgaatgcgatcggcattcccagtcaggggcttgaatatcaccggtcgcagatcattcctgcctattcggccttttccacaccgctgatcgtgtctatttccgccgacacctcagaatcatttgccagcgcagtcgctgagatggcgctaccttcggttgcggcaattgaagtgaacatctcctgccccaacctcgaagcagacggaatggcctttgccatgtctccagacacaacctttgacgtcatcagcactatccgacggaaaagtgattttccgctttgggccaaactcaccccgaacgccggtaacgtggttgacatcgcgctggccgcagaagctgcaggagccgacgcggtggtgatggggaatacgatgttagctatggcaattgatatccacactcgcagaccccgtcttgggaatgtgatggggggattatcggggccggcgataaagcctgtcgcactgcgcatggttcatcagtgttatcgcgctttgaagatcccggtcattggctgcggggggatcgcctgcgccgacgatgcgattgaattcatgttggctggcgccacggcagtccaggtgggaactgcatcttttatcgatccggggataatgcagaaaatcattcatggcattgaggattattgcaccgaacaccgcatcagccgcgtccgcgacatcatcggtcaggtcaatattgatgaacaactcgcctcccgctggtatgaatttgcgcagtga

SEQ ID NO: 139832 - DNA, 1257 bp, Enterobacter cloacae; identical to SEQ ID NO: 101400

SEQ ID NO: 139833 - DNA, 1077 bp, Enterobacter cloacae
atgaacaaaactcctgtatcagcagagaaaaacggattattgacgttgcgacggcctgacgattttcacctccatctacgtgacggtgaaatactaaaggctgttctgccctttactacaaagcagtttgcccgtgcggtggttatgcctaacctgaatccgcctgtcacaacagtggctgcaatggaagcctatcgcgaaatcatccttgccgcggtgccgcaaggccatgattttacgcctttgatgacgctatatctctgcgatgacactctgccggaagtcatacgtgtcgggcatcagaagggcattctgaccgccgtgaaatggtatcccgcaggggcgacgacccatgcagaatacggtgtcacgtctgttagtagaatacgcggctgtctcgatatacttcaggcgttggggatcccacttctcatccacggtgagagcacttgcccggacgtggacatttttgaccgggaacgcgtttttattgaagatacggtgatggaactacggtgcaattatccacagttaaaaatagtgcttgagcatattaccacccaggatgctgttcgctacatacaagagcaagaggatggcctgactgcggcaactatcacgcctcagcacctgcttttcaaccgcaatgtgctgtttaacggggggattcggccccactattactgtctgccggtcttgaaaagagagtatcaccgtcagtcgttgttgaaggccgcaacctctggtgaccgtcgtttttttgccggcacggattccgcccctcatcctcgtacggccaaactagccgcttgtggttgtgccggtattttcaatgctccatcagcactcgaatgttatgccacggcgtttgaagcggcgggtgcactgccacatctgcaagccttcgtcagtgaatatggggcaaggttttacggactgccgttaaacacggggacggtcaccttagcgcgacaaccgttgattctgcctgaaccgctggtagtgactgagcatgttcagatagacccatttcccggcgaggtctccttaaactggcgtctggtcggcaacgaataa

SEQ ID NO: 139834 - DNA, 897 bp, Enterobacter cloacae; identical to SEQ ID NO: 101398

SEQ ID NO: 139835 - DNA, 327 bp, Enterobacter cloacae
atgacgtttgatgagatcaaagaacgatttgctggagcaggtacgggaactgatgctttccgcgggctgtacaacgagaccttcgagttaatgaacgcagataaggaaaatgccgcggtttatttcttaatcggcgtggcagcacggtcatacgttctcagatatgacgaccaggccgtcgaccccgattttgcggaacaatctaaacaaacgatgagcgctttagtcgacaaaattgcctttgcacttcatcaaccagcggaagacaaaataaaaatcgccagtgaagtcgcgtttgagtatcactggaaagtcaccagtttctga

SEQ ID NO: 139836 - DNA, 129 bp, Enterobacter cloacae
atgaatatttttcattttttcactgcggttcttagcgtcaaaacggggctttttacattctgcgaggaggcttccacggttatgcaaggatttcagtgtgcgcttaaaatccctgaacaggcggcgtaa

SEQ ID NO: 139837 - DNA, 1521 bp, Enterobacter cloacae
atgtcactgtcagttgtttatacgcgtgcggctctcggggtaaaggcaccgcttatttccgtcgaggttcatttgagcaatgggctacccggactcacgcttgtcgggttacctgaaacgacggttaaagaggccagggatcgcgttcgcagcgcaataataaatagcggttataccttccccgcgaagaagatcactatcaaccttgcccccgccgatctgcctaaagaggggggacgatacgatttacctatcgcaattgcccttctcgcggcttctgagcagcttaatacgacacggctaggctcgtatgagttcgttggcgaactcgcgctcacaggcgcgttaagaggcgttcccggtgcgatatcgggagccctggaagccatacgagcagggcggcaaatcattgtcgccaatgaaaacgcatcagaagtgagtcttatcgccgagaaggggtatctcatcgccgggcatttacaggaagtttgtgcctggctggaagggcggcatgaactgtccgagccggaggagtgtgatgatgttatagcggatgcaccagaggatctcagcgagattatgggacaggagcaagggaaacgggcgctggagattacggcggcaggtggacacaatcttcttttaattggcccgccaggtacgggtaaaaccatgctggcaagcaggttgagtgggttacttccaccgctcaataatcatgaagcgctggaaagtgccgccatatatagccttatcagttcgacgtcgttgcaaaaacagtggcgccgtcgtccttttcgttccccgcatcatagcgcttcactgacggcaatggtcggcggcggggcgattccggggccgggagagatctcgctggcacacaatggcattctgtttcttgatgaactgcctgaatttgagcgccgtgtgctggatgcactgagggagcccattgaatccggtgagatacatatctcacgcacgagagccaaaataagctatcccgcacagtttcagctggtcgcggcgatgaatcccagcccgacgggtcactaccagggcaaccataaccgctgtacaccagagcaaacgttgcgctatctgggtaagttatccggcccgttcctcgaccgtttcgatttatccctcgaaattccccttcccccgccgggtctgctcaggcaaacgggcataacgggtgaaagctcagcggaggtacgcgaacgggtgattgcagcccagacacggcagtacgctcgtcagaacaggctgaatgcgcggctggataatgccgggatccggcagttttgttcacttaacgttgaggatgcgggatggctggaagagacgttaacgcggttcgggctttccatacgtgcgtggcagcgtttgctgaaggtggccagaactattgctgacgtagaggggtgcactgacattgagaggaaacatttgcaggaggcgctgagctaccgcgctatcgatcgtttgctgctgcatttgcagaaattgctggcataa

SEQ ID NO: 139838 - DNA, 1008 bp, Enterobacter cloacae
atggcctataaccgtactttcgccctcgatataagctggaaaacgctgctgaaagacgcggagcttgagccagaacgcattctccgcagggcaggattacctgacgatctctttttgcaaaaagcgcgcggactcgatacgaatgaatacatccgcttctggaacgcgctggaggccgaaacgaacgatcccgcctttcccgtaccacttattgaatcgatctctgcggatatctttgatccgccactttttgccgcactctgtagtagcaatatgatgcaggctgtccagcgtctggccagatataaacagcttattgcccccatggttctggagacaatggtcgaccaaaacggcaaccttaccgtttcaccgcgctggctttttgcgacggatcttccggtgtttctgcaggtggcagagttgggtttcctgctcaagcttctgcggctggggagccgcgaacgggttaaccccttacggatctgcgtttctgcgctaccgtcagcggttcagaacagccacttttctcgtttctttggtactgacgtgcaatacggagaacagcccgccatcagcttttccgcagccgatgcgcttcggccctttttaacggtaaatgaggggatgtggcaggtatttgaaccggaactgcagcgtcgtctcggtcaattaaatgacacggcctcgaccgccgagcgcgttcgtgcggtactcctggaacttattcccggtaacgaagcgacaattgaaaaagcggcggagtgcctgggcatgagcaaacgcacgctgcagcgcaggcttgagcaggaaggggataattttcgtaacctcgtcaacgcgtgtcgtgaacacctggcccgtcattatcttctcaatacgcgcctgtccgggtatgagatcgcatttttgctggggttcgaagatcctaactcattctatcgcgcatttatggcctggacgggccagacccctgaagcggccaggatggccatgcgccttaagtaa

SEQ ID NO: 139839 - DNA, 831 bp, Enterobacter cloacae
atgtttactcaggacaagaaaaccgcgctggtcaccggtgcatcgtcaggtatgggcaaagtcatcgcccgtcgtcttatccaggatggctatcaggtatacgccgctgcccgcagcgttgagaaaatgaacgatctcgcccagcttggcgcgcgccctctgcggatagatatctcacgtgatgaagacattttggctgcagtggataccatcgtgtcgcagacgggtggggttgacgtcctggtcaacaatgcgggttttgggctttatggaccggtagaagagatcggtattgatgaagctcgctatcagtttgaggttaacgtgtttggcgcagcccgccttacgcagctgctgctcccggccatgcgcgccagacgcagtggttacattattaacatcacttctataggagggaagatttacacccctctgggagcctggtaccacgcaacgaaacatgcgctcgaaggatggtctgactgtctgcgtcttgaagtggctgaatttggcattaaggttgtgattgttgaaccgggtttaatcgagactggctttggtgatgtggtcagcggcaattttgtcaaacgttcagcaagtggcccttacggtcatctggtagcgaacgtggctaactcggtcaaaaatgcttatggaaatggcagaggcagcgacccgaaagtgattgcggacgtggttgcccgcgcggttaaaagcccgcatccgcgtacacgctatgcagccggcaagtatgccaggatgctcatcggcatgcgcgtctggttgggtgaccgtctgttcgatcgcattattcttagccagacccgatga

SEQ ID NO: 139840 - DNA, 504 bp, Enterobacter cloacae
gtgtcctacagggaaatggcggagtggatcgagagctataaccgctcttcaacgggcagcgacaggccgcctgaaatggctcaaatcctcgcgtaccgcgcgctcacgtttctcagcagccctctcccgcgagccctctcatcgttgaaaacgctggggtgtgaaccgggcttaattgatgaggtttttcgggaagcggaactgccggtatttcgtatccccgggttacggctctcgcctttttactgggtggcgctgtttcgcgttctttggctctgcggcctgtctggcgaggcagagtgcgtaagcatcgctaaaaaacgtgccgctaaggcggctgagatcctcgtgacggcggctaagggctccgatggccccgtcttgctcatggggcatgggatcatcaaccggtttattgcaaaggaactgatcgcatcaggctggaaagaacagactcgtacgggtaaggggtactggggagcgggtgtttacagcgttgtgtag

SEQ ID NO: 139841 - DNA, 363 bp, Enterobacter cloacae
atggatgtgcgtaacaacaatgcaatgatcgaaggaattttcgaaatggttcgtgctcaacatttcccagaaaaaccaactaggttctgctgtatgtttgcgtgcgagagtcttgaggctttaaatagatgtgagcaggccatgcaacaaacttccattaggaatatttactccgttgagtatgcgggtgcagtccatcgcggagacatgtcgcttcttgcaagtgatggatctctttatgaagtacaaagccgagcaatggcttattggatgggtgaaactaaagacttgtaccctgactacgttcctcgctgggaaattttgattccacttcctgtgcaactcggggaactactcttataa

SEQ ID NO: 139842 - DNA, 1074 bp, Enterobacter cloacae
atggctcaactgtccctgaaacacattcagaaaatctatgataaccaggtccacgtggttaaggatttcagtctcgaaatagaagacaaggagttcatcgtcttcgtcgggccttcgggctgcgggaaatccacgacgctgcgcatgattgccggtctggaggagatcagcgcgggtgaactgattattgacggggtgtgcatgaatgacgtgcccgccaagtcacgcgatatcgcgatggtgttccagaactatgcgctttatccgcatatgacggtctacgacaacatggcgttcggcctgaagatgcaaaaaattgcgcctgtggttatcgacgagcgcgttaactgggcggcacagatcctcggattacgcgagtacctcaagcgtaaaccgggcgcgctgtccggcggccagcgacagcgcgtggcgttgggcagggcgatcgtgcgcgaagcgggcgtgttcctgatggatgaaccgctctccaaccttgatgccaagcttcgcgtgcagatgcgggctgaaatcagcaagttgcaccagaagctcaacaccacgatgatttacgtgacccacgaccagacggaagccatgacgatggcgacccgcatcgtgatcttaaaagacggcattattcagcaggtcggcgctccgaagcaggtatacaacgaaccggcaaacatgtttgttgctgggtttattggatcgccagccatgaactttattcgcggcgctatcgacgatcgctatttcgtcacggaaacgctgcgtctggcgatcccggaagacaagctcgcttcactgaatgccgcagggtatcagcgcaaagcggtggtgtttgggatccgcccggaagatattctcactctgcagagcagtggtaaaaatatcgcggcgaaagtcagcgtagccgaactgaccggcgcggaattcatgctttacgccaccgttggcggtcatgagctggtggttcgcgctggcgcggcgaatgattatgccgcaggggataatatcaacatccagttcgatatgaataagtgccatttcttggtaatgactccaacttactga

SEQ ID NO: 139843 - DNA, 555 bp, Enterobacter cloacae
atgattttaataaaaagagcgctgtttggcgttgtatgttcgttattaatggctccactggtacaggcagactgtcaggtatctctttcacagccgacggttagctatggaaaaatcagggtctctgatattgcgaacaaaaataagcagtggaataacctgtcccaacggcaggttacactcactgcatattgccctgatgcgcaaaagatggcgctattttttgatggtaaggcaggggagcagaaattatttaccttcggtgataacagtcgtttgctggtggttgcgagcgatgccacgctggacggaaacccggtgcaactaaaccggatttccgatgcgggggtgtttattcccaacggccaacaggcagataaaatcgccgcccgcgcaggagaaggaattgtacctgtcagttcaggcacagtggtgtcaggaaagcagtttacgatgatgctcaccattgaacctttattgaatcacaatgaccttagcttgcgtgattcccgcgatatcgatagtaatattcaagtccgacttgaaacggaatag

SEQ ID NO: 139844 - DNA, 2430 bp, Enterobacter cloacae
atgctgccagctctgtgcggcatagctgtctgcgcttttcagcccggtatggcgatggcgcaggaaaatgctgcagagtttgatacatccgtactggaaaataatggactggatagttcattgggaacttattttgcccattcagcaaaatttttaccgggtcgtaagccgataagtttaaaaattaacggtaatgaaaaaggaacagtgacagcgctgtttggcaaagaagggcagctgtgcgtagatcgtagctttttgcaaagtgcaggacttcaggtgccagcaaaattagccaaatcgccttcagagcagagcgctaaatccatagatcctgcttgctatgattttcgccaggattatcccactgcagttatcacgccagtaccaggagaggagcgtcttgagctcgttgtgcccgaggaggcgttagccacgggcgaaacggccttgtctgattaccagcaaggaggcacggcggggatttttaactatgacctgtttaccacgcgaaatcagtatggcggcggtaacgatgattacggtcaggcgtcgctggaagagggcatcaatatcagcgactggctgctgcgtagtcgccagatcttcacgaaagatcagggggatttcagcagcaacagcctctatacctatgtacaacatacgtatgtcgatcagaaaacactgatgcaggctggacagatcaatataactaataccttattttctggcgcagccatcagcggtgtgcagtttattccggaagatgcgttaagtacggaaggcaaaagcggcgtcacggtaaatggtcttgcacaaggcgcacaggcccgggtagaagtgcgtcaggcgggcgcattaatctattcaacactcgtcccgatgggaccgttcacgcttgagaatgtgccagttgccagggttaatgccgatctggaggtcaccgtgaaagaaactgacggcacctcccatcgctatattgtccctgcagagtcattacacccgaaccagctgggggggccacagggcttttccatcgccgcaggcaaggtacgtgatattgatatcgacaacggcagggaaaaaccttatctgctgacggcttcagatggctggcgtttgacttcatggttgaatgccagcgctggcgcgatggtcgcaacgaagtatcaggcaattgcctccgggttggatatcgccccgatggccccgttgatgatatcgaccgtactgaaagcctctgacgataagcatgatgacgatcgaggtacaagtgcaacgttgagcgcgaactaccgggccgaatacaatattaatttgtttgcttcggcttcgcgctatagcagtggttatcgtgaacttctcgatacgttacaggatgatttcacgccttacagcggtcagtacacgaccagcgtagggtggagtaatagtcttttaggctcattcaacatgggttacaccctgaatcagggggtaaaaggggatgatgatagccgctatgtctcgctatcctggggaaaaacgtatcgtgagttcaatgtctctgtaagctggcaaaagcaagtcaaccagaacgataacgatagccgttattcaaacggcgatcaggtttatgtcaatgtcggaattcccatcggttcgcatcgggtaaacagctactggcgcaagcaaggtgagtcagagactgccggtcttcagacgggagacaatctgacgcctgagctttcatactcgattgccgccgaacgcgatgtaaaagatcaggaaaacagttttgacggcagtatcgccgacaatctgcattacacccagcttggtctgagcgcaggaatgaacggaagcgacagtaaaaattatagcgccacattaagcggtggcattgtggcgcactctgacggcgtcactttctcgccataccgcatcgatgactcgtttgctgttgcagcattaagtgaaaaggtcagcaatgtgcagatttccacgccatctggcgatgtctggacagaccattgggggcgggcagttatcccatctctccctgcttatcataatgctcacatcgaagtgaatagtgcatcgctgcctaagaatatcgatctgaataacggaatttccaccgtcgcggttggtcatggggctgtcagccatgtgaatttcggtgttcttgatgtccgccggatgatgttaacaatttcgcttccggatggttcaccgttagcgaaaggcagcacaattgtagatgccgataataactacgttgtgacgtctgtagacagtgggcttgttttcctcagcgatgcagataatcagtcggcactgtacgcgacggatgataacggcaagagaaaatgtcagttgcaatacacgatgccgaaagaacgtgatgtgaatgttttctacgaaagtgctgctggagtatgtaaatga

SEQ ID NO: 139845 - DNA, 714 bp, Enterobacter cloacae
atgtattcttcgttaaataaaaaaacatttgcgttaggttttgcatatgctctcttagcattgatgcctactctttcgtttgcatcgggcatggtacctgaaacctcaatgctgtttgtcaatgaggccaatcagggggcaacgatgaacgtgaaaaatacagatgacaatgcccagttgttatataccagcactaattctcttcctgacgagagtaaagacattcgtcttatagtcacgcaacccgtggcgcgcgtcgaagcggggcaaactcagcaggtacgttttgtacttcaaagcgatcggcctttaaagacagaacatatgatgcgcgtaatatttgaaggtattcctcaaaaaacaaaaggcataaacaaggttggttttaatattcgacaggatcttcctgttctcattcatcccgcaggcttacctcaggtacaggatgcatggcgcttattgacctggaagactcaggggaatatggtaacactctccaataccagtccatatgttgttcgttttcaacctgctgtcgaattactgccctctaaagaggtcattaaactatccagggcttatattttgcccggacaaacgatgactatagatgcaggtaaacctgttgccgggaataatcaaattcgtttttctccggtgagtcgctatggcgttgagatagataaatacaccgcacagctgaatgctaattaa

SEQ ID NO: 139846 - DNA, 660 bp, Enterobacter cloacae
atgaaaaaagtatttcttgctactctgttaagtgcatgcgctatcaatgcattcgctgccaacactgtagatttgaaagtggtcggtgtcctgacgaactcagcctgtacaccatcgtttccaaatgggggtaaagctgattttggcaaaactgctatgacgaccttgagcgcgactgatgtcaaccagttggggtatcgcgacatagacctgacgttgacctgtgattcttctacggcgctggcgtttacagcaacggatgcacacaatgatagcgccgttattcaacttgtgggtaccaagccggggattgcagattctgattttgggttaggaaaaacagcggagggtgttaacttaggtgcgtatacaattcttttaaagaccaatcctaccgtagatgacgttgtaactccggcattatattccgctgctggtgcaacgccatcctggaatgtagccggtggtaactcgtttgtccataccaacggtaacatcatattcactccaggtaatgcgacaactaaagtaccaacagcctttaagaaagcagtgttcccactgcgtgtaacggcgtctgtacagaataccgctaccctcgcaattaccgatgatactaatctggatggtttggcaaccttcgcgattatttatctataa

SEQ ID NO: 139847 - DNA, 180 bp, Enterobacter cloacae
atgcactcgcagctcattaacctgatgctggaattgcaggaaaaacaggggatctcgtatatctacgttccccaacatctgcgaatgatgaagcacatgagcgatcaggtgatggtcatgcaccatgggtacagttgggccaggttattccactgcttatttttgttcgcaataaattag

SEQ ID NO: 139848 - DNA, 660 bp, Enterobacter cloacae
atgaaaaaagtattttttgctactctgttaagtgcatgcgcgatcaatgcattcgctgccaacactgtagatttgaaagtggtcggtgtcctgacgaactcagcctgtacaccatcgttcccaaacgggggtaaagttgattttggtaaaaacagcttgagctcaatgagttctaccgccgttaaccaattaggtcaacgtacagttaatctcacgttgacctgtgatgctgccacggcgctggctttcacttcatctgattcgcgtaatgatagcgttaacacgcagcaggtgaacctaatcggagcaaacgcagtcttagactatggcctgggcaaaacggctgggggcgttaaattaggtgcgtatattattacattggatgagaagaatgttactgccgatggtgttgcaggaagcctgttgtacaacacgaacatgacaacaccagcgtgggcagtggccggtactggttcctatctccatgccactccgaatatacagtacacagtgggcagtactgataaggtaccaacggcatttaaaacggcggtattccctcttaagatctgggcttccgtacaggataccactacgctggctataaccgacgataccaacctggacggtctggcgaccttctcaattatttacctctaa

SEQ ID NO: 139849 - DNA, 1302 bp, Enterobacter cloacae
atgaaaaatattaaagtaagtacgcttaatgagttggaagcgttgatagacgaatttggtcaagacgtactgtttagggggcaacttactcactatggtgaacctggagagccatccattatcgcttcatttgatcggcaggattgtattccaacagaaacaatcaaatggtcccgttatgcgagcaaggttcttgaggtgctaattggtgagcatgtgaatgacataggttatgttcaggcccttttgcaacattatggatggagatcattttatatagactgctcttctagtcctgctgtaagtgcatggtttgctagccataagtataccgaatcacccagcatcgacatgtgtgaagattgtgatgaaaactttctatgggaaagaaaaaaatacgttagttatgtctatgaagagggtgaaggtcacctttatgtgattgataaatcgattgctaatgaggtggggctcatagatcttgccactttaacaattaaggcgtctcatcctcgaactgaagcgcaaaaggcgtggctcttgggacctacgatgggaaaagccgttccaaaaaattgcttcattgctcaaataacagcaagtagagctatttttcgtgattatgcagccttacatggtttaacgaaaactgattctcttttcccgcctgtgtcaaaagaccccattctcaaagcacttttagatttgccatggagagaaatagagtcgctacgtgatccggaattccctatgcctgtatttaaacgcgcgcttgaaatacctgagtatcaggatagttttaaaaaaattgcgtcaccagatacagcattttaccaaggcggtaaaattagtgaaattttcatgtcgattgatacggttaaaggtgaattgacagggggaaaggttgtttcagctccgggggtaattatttttggaactgcaccagccgaaactccaatgagatttcctaaaatcgaaaaaatgattgaaggtaaaacttaccttgcattcgaaatcgatgaaattattaagcatcccggcatgggccataacgtcgtataccaaaaaggaataggtataatcaatcatgcgcaggatctttttgaggtttgtgagttggtggtcatgcatcctggattagagatgacaaacgctggtttatgccctggatggtattaccgaagacaaccttctggcttatgggagcgtgaacataacgctaatgaatgtgactgcaaaaacgacagtatccatcaacgacatatttcagctcttattatagctgagcatgaacttcgttaa

SEQ ID NO: 139850 - DNA, 552 bp, Enterobacter cloacae
atgaatgtaatcaagacaaatataccggatgtattaatatttgaaccaactgttttcggtgatgaacgtggttttttcatggaaagctataatcagcagatctttgaaaaggcggtagggcgtaaagttaagtttgtccaagataatcactcaaaatcaagcaaaggtgtgctacgtgggctgcattatcaattgcctccctttgctcaggcaaagttagttcgttgtgttgttggtgaggtttatgatgttgctgttgatattcgacgtgattcaccatcatatgctcaatgggttggagtgaaactttctgcagaaaataaacgacagttatggattccagaaggatttgctcacggctttttagtcttaagtgaagtggctgaatttgtatataaaactaataattattatatgcctgaatatgataatggaatattatggaatgactcccggttaaatataaattggggatgtgatgagggttcggattttaaactttcgaccaaggataaatctttgccgttgttttctgacgcgaatgtcttttaa

SEQ ID NO: 139851 - DNA, 1002 bp, Enterobacter cloacae
atggcgaggctggatttctgtgaacttgcttctgcaagcgcagatactgcagatagcgaccaatttgagaagttcgcaaaaatattcatggaaaaaattttgggagggattgtaactaaaggcccaagccggggggcggatggtggcatagatatacgggttgagtttgatattgccggatgtcgaattgccaaacttgttagctgcaaacactacgctccttctaaaaagtccgttggtcgcagtgatgaagaggacattcaggacagacttgctgaatttgaatgtgatgagtttgttggattttattccaccattgcatcgtccggacttgagcaaaaactggagcgactgaaagctaaaaaagggattttgtaccagatttataattcagaggatattgaaaccttattactggaaaatcatgcgggctttcagttagcaaagcgtttttttcctcgttcagtacaaaatatattaccacaatttattgctctactgcccaccttcacatcctgtgacgcagtgcgtcattcttcaggttggatagtcccggatgtttatagtgactacgagccacgggtctacgcctgtaatgctaatttagctgcacagtatgcaaatgagaaggcgatgaatgatatccatgaacccatgttcttgcaggcatggaaagatgccgtccatatgttttcagattatttcattatccctgctgccggtattaacagtgtaagcaatattaatgaattaccaccggactgggatacttcagacgatataataaatttatccgccgggaaacgatgggcacttttggctatctggagtttttttgatgataaaaaggttaatgctattttgaagaaaatgcataaacatccttctcagcaagatttgaacgttattagcttcgctttcctggcgatgataactggcaccgagcgtcgcgatgtattagcgcgactttttgcttatgctacaccttttcgttcctggtaa

SEQ ID NO: 139852 - DNA, 1680 bp, Enterobacter cloacae
atgatcaatgcatcacccatatctgatatgacatttatgaacagaagaaaccttttaaaggcaatttttggcgtagcatcattaacgccatttacatacgcttttgcaaaggatgccaagaaaagcaggcatcatccagaacgtgtcagggtagtttctttaaccgactacgaaaatttacaagaggcatgtgaggctctaaggtcgtctaacggcggtgttgtagaggttcctgttggacgatttttcgcaggagagtacaacggattaacaaagtatatggatatcccaaatgtttccatagtcggatctaaaatgccgacatgtaatgctgatgcctcggagcttgcaggtggatcagtaattgagggtaagtttaacgttggagctcataacttctccgtttgtgatatcgggtttgatatagggcttaacgtcgtgaacaggcgttggcctggagcagacacaacagcagattatccttatggcggtacgtgggatggttttgccatcgggcagccaagccaggcatctccgcttccacaatggcgtggatttagggcaagaaacgtcataggattacttgagaattcttcgacggttggccatggagtgctgattgaaaacgtcaatggtggatgcacagagggtgacatcattggcgttaacggtgtgcatggtgttgtcattaagtcagaaaatattaactgcgaaaatcttcgtggttatatgaataaaaccgactgcgttatatttaaatcagatacatttgctcctggtggcaatattcaggtgagtaatgttgttgctgatgcaatgcttccaaactgcgatcctcattccaaaccattaatccctgagtcaggtgtttattttaatccagagctacaaaactataccggacctgttcaaatatctaatgccagagttcgtggggcaaaatactctattcttggcggcagcgctactggtactgttggtgcagatatacaaattggtaatttagacattgacggggcacaaggtgttactgaatgggctatatttatggctaaccttggagagtttccaaggttgtcattaggtaatgtaaatataaaaaacgttaaaaatgcagtttacattaactatattgatgaaagcagttcagataacgctataacaacaattgagagcctgaaaattacaaatgcacagtcaattggcgttcttacggatgggcattccagggttaagattggagcggtagatatgctaagcgttaaaactgcatattatcaaggagagaattctattcttgaaataggttctgaatcactcgcccgggtcacaactaagttcggaaacagcacttttatcgttggcgctggatggaccaacgttggagaaggaaactcagcgctcaatgttttctattcaggatatgaggtgaagttgaagggtttgattcaagcaggaccaggagcaaccagcctgataatgacgctaccggcctaccttaggccagcagagagcttgagattcatcgcctataagaaagagggagcagacggaacttgcatgataaatattgcaactaacggacgtgttactctaggagataccggagccaaaccagttacagggtcatacattagcctagacaatattagctggaagcttaaaggtggagtcatgtaa

SEQ ID NO: 139853 - DNA, 1992 bp, Enterobacter cloacae
atggctacgcaaccaaccaatctttctgttccaagtgaatccccccgcgatctgaagtttaacgcgggtaaaatcgatgaattcgttacctctatgggttggactttcaccgatcggttcgggaataagcattatactatcgaaggcatgcgctggctcgctcaacaggcgattgccgcgtacgggtacatcacactcgacagttttgaagatggtaatacgctcactttaccaaaccaggttctccgtctagaggctaccggtgaatactaccgctgggatgggccgttccctaaggacgtgccagagaattcaacccctgaaacatccggcggtattggcgcaggtaaatggctgagtgttggtgacgcagtgctgagaggtgaactaaattcaacttcaggtgcgtccatggtgagggctagtgatggcgatacggttgaggtaaaacttggtcgcttagatggcattgtaaccgtcaatatctcagattatgcagaccttaaagaagccatagcagcacttccatcttcaggtggaacagtattagtcccgcaaggtaacttctatgccggcgtgtgggatgccgcatcgaattacatgaataagcccaacgtccatattaaaggtgtaaaaaaaccatcactgaatgcggacgcatctgcgcttgttggaggatctattattgaggggagatttaatgtcttcgcagataatttttctgtaagtgatattggctttgacatgggaaaaaacgtttgcaccgcgagatatccagggctaaacccggcaacagatttgctgcgtggtgggacatgggacgcttttgcgcatgggcagccaagccaggcatctccattgtctgagcggaaaaacttcaacgcacgaaatgttattggccttatgtataactctgctgccgttggtcatggatttttacttgagggagtgaatggtggttttgttgataacattactgctatttatggcgtacacggcatcgtctttaaatgtcagaatattcgtgccggaagtgttgaggcacatatgacgagtgtcgacggtgttatctttaagtctgatacttatgcacctggaggaagtaatcaggtcggttcaatcatggcgtatcgttatgcgccaaattgcacaccacatacaactccagcagttagtactgcaggagtgtattttaatcctgagacttcaaatttcagtggccctatacaaatagggcaggtttctgtaattggggcgcagtattctcttcttggaggaaacgctaactctggaaaggtagggccagacattaatatcagcgcattgaatgtggatggcggagccggagtaaccaccgattgggctgtattctttgcaaacttcggaacgtttccgcgtatgcatatcggcgcgattaacgttactaacgtaaagaacgtagtttattctaactatgttgattcgtcatctgctggaaacgcgcaactaactattggatcgcttaaagcaacaattgttacaagtatcgttgctctcgcggcagggtatcaaaaattagcaataggaacccttgaagtatttggtgcgcagacggcctactatgtagacaataccgccagaatcgacgttggaaaagaaacgttaaacgggatcactaccaagtgggggcaaaacccaccaatcctcggtactggatggagtaatttcggaggtggcaacgcagttcttgatgtttactatgacggttatagcgtaaatctcaaaggccttatgtctgctggatctggtgctggcgcgcttgtacttactcttcctgcatatcttcgccctaaagaggatcgtcgattcatagcgtataagaacacaggtacacgcaacttctgtcttgttggggtttcagcagcaggactgattacgattgatgatggcacaacacctacttccggaacttatattagtttggatggcattagctgggagtcaaaacaatag

SEQ ID NO: 139854 - DNA, 3495 bp, Enterobacter cloacae
atggctggtactgtcagcgctggaacgattgtttatgaagttgacatggacaccgccgggatccttcagggacgccgggatattgatgccgcgttgaatgggcttaacggtagcatgggtcgtcttgaggcgggattaaaccgcactgagcgatccctgtcttcgattgaaggcactatgtccagcttaactggcgtcgcgaaagcgctcatagcagctctttctgtccagcaggttggcgcatatgcccaggcatggcaggacctgagtaataaactggcaaacgcagtcagggattccgtaccgccgtttgaaacactggctgatgtcacagagcgtgttttcgacatctcgcaaaagacccgctctggtcttgatgccaccgccacgctatatgcacgactggagcgctcaacgaggggctacggcgtaagtgtagaggacatcaccaggctgacaaccattattaaccaaggttttgtggtgtcaggggcaacagccgaggaggcgagcaacgcaatcattcagcttgctcaggggctggcgtccggcgctttaagaggtgatgaatttaactctgtgaacgagcagggtaaccggctcatgattgctcttgctgactctctgaatgtcagcattggtgctctcagaaacatggctgcagagggtaagttaaccactgatgtgatcgtgaatggattgctctcccagggcgataaaattggacaggagttcgctaaaactactgccacgatcagccagtctcttgaaattgccaacaacaacatcacgaagttctttggcgagaatgccactgtaaaaactggtgtcaaaatattcagtgattcagttatttcactcagtgaaaacctggacgttctcagcgctactctgaccattgttgctggcgttatgggcgcgcgatatgtcggtgcgttgaccatggctacctcagcgaaaatcgctgatatcgcagcatcccgtcagcaggttgtcgcagacaatcagacggcacaggctgctctggtagccgctaattctgttcagcgtaaggctcttgctgataaagaggctgctctttcttctctcgcgctggcccaggctgaatataacgtggcaaaaggtagcgctgcagagatgctggcaatggatgcccttgtagccgcaaaaaccagggctactaccgcatctatagctcttgccgatgctgaaactgcccaggctgctgcgtcggcccgtgcagcgacagctgctcgtgcagcgtccattggtatcggaatggctcgtggtgcgcttgctcttataggtggtccagcgggggcggctatgcttgctgccggcgcgatcttctatttctggcagaaagctcagcaggcaaaagaggaggctatcgccttcgccgatggtctggataagctcaacgccgccatgaatgcaatgtcgaacacgcagctgcgtggggctattgcagatgccaataattctattcgagctcagaaagaggctgttgcggatctgcaaagtgaagttgactcgctgagagacagataccagaactttaccccggctgcccagaaggttgctgaatctatggggcaaggtacagacttcgctcgccaacaggcggaagtgtctgatgagctggctcgcaagacgcgagatcttgaggccgcaaaggataaattatcccgaacagaagaaaccgcgtcagaggcgactcgcacactcacgaacaacatgctcacggcgatgggagttcatgatcaactcatcgaaaaatcctggtctcttgagcaggttcagggtgcggtagcgaaagcctttggggagacggctgatgaaataaaccgagccaatcaggccggaaaaagcttcgaccccaaagcgctgcagatatctcccgcgaccaaggagggcgataaagttatctctactctggaagagcagaatgaattacttaaaattcaggacgagagagagcgggcgatagccaaagccaggatgcaggctgccaaggttactggcaatcagaatcaaatctctgcagctggcaggctggctgctgaaaattatgatttagagaagtcagaagaagccaggaaaaaagctcaacaagagagtgagcagcaggggaaaaaatcagcgtcttccgctgaatctgttgctcagaaactggcaaacctgaagcagcaatcagagcttgcggctgactcaacaaacaaactgagccgtgaacaggcgatcctgaatgctcagcagtcccttggtaaaggtgctacgaaagagcagatcgcactggccggacagtatgcggcaaaaaaatgggatacggccaacgctatcaaggcagaggctgcagctcagaagcttcttcctgagtcacgtgagaacgccacttacaagcaggatgttgaggatctgaatactgcactggcggcgaaaaaaatcagtcaggagcagtacaacgctacgtcagaacaacttgagcagcaacatcaggttaatctggcgaagataagggcgcagaaaattgcaaatgtcacgcccgtacaggatgcgcaaggaggaattgacccagttcagcaacttgccaatcagcatgcaaccgaattagccatgattcagcaattcgagtctgataaaggaaagctaacacagcgtgggatagagcttgctaatgcagctaatactcaatacgaacatcaacggatagcagcgcaatgggaaatatggaaaaaccaaaattctgcgaatgagttattggcagccggatttgactctttagctggcaacgcttccaacgctttcactgggatcctaaccggaagcatgtctgctcaggaggcaatgcagtctctcgcaagtaacgcgctgaatagcctcatcaatggctttgtgcagatgggtgtagagtgggttaaatcagcgatcactggcagcactgcccaaatcgctgccaccacggccacaacctcggcagcagtagccggtacagcgacgacaaccgcggcgagcgtttcttctgcagcggctaccactgctgcgtggacgcctgcagcaatcgtcgcatctataggttcgttcggtggtgctgcggccattggtatcggtgcagttattgccgccatggcgatggctggtggtatcgcaggtaagcgtaaaaatggcggtcctgtatcagctggttcgatgtaccaggtaggcgagggcggcatgcctgaaatctaccaggccagcaatggcagtcagtacatgatcccaggcgacaacgggaaagtcatcagcaacaagcagatgaattccggcgccggcggtagttccgtgcctgtcactatcaacattcagaactataccggagcaactgtcgacgcgcaggcgacccagaacggcaatggagtgacgatcgatatgattgttgccgatatcagccagggtgggcgcatcggccaggctatccagcaaaatcaccaggcaccacgcaaagcaaggggataa

SEQ ID NO: 139855 - DNA, 441 bp, Enterobacter cloacae
atggctgcaatgacggtgctttcatcctgttgctacacagatgtcacaccactgatcggtgagctatgtattgccaaaaccaaaggaaagccattcaagctgcggcgtggagcaatggacgagtttgatatgattgtgatcgcccaatcactcataacacacggcattatcggaaaagccagagtaagaaaactccagcgccatgagaatagcggtaccacgtcagaatttaatgcatttgagtatatcagcgcagcaagaaatcatttcagcatgagccgcgatgaggcggagcagcttaccatgacggagtttcagtatttaattgccgccaaataccctgaccaaaaagggtttaccagggaagaatatgactcaatagcagaggattatttagccaaaaaagcaagaagagtgtcgatggctcagcaggcggcatga

SEQ ID NO: 139856 - DNA, 369 bp, Enterobacter cloacae
atgggcatcaaagtgcgcggcgcggcacgtgttgagcgcaatattaaccgcatcatcaacgacattcagggccggaaaatcattcgagcgctccagtcggcgatgattcttggggcagcaagagcggcactctacacaccgatcgacacctcagcacttttaaatagtcagtttcgcgaaatcgtaactgacggagcagtaatcacaggcagggtaggttactcgaccaactatgccgtttatgttcatgacccggccaacccgcagattttccgtcgttcaactgctaaaaaagaattcctcacccttggatttgaagaggaacgctctgctatcgatgatgttgtacgtaaggagctttcactatga

SEQ ID NO: 139857 - DNA, 264 bp, Enterobacter cloacae
atggcactggtaaaggtaattggcaataacctgttcactggtgccaacctccgcaagttggaggttggttcaaaagtagaggttgaccgcagcaccgcttatcgctggaagaaggcgggactggttgagatcatcactgatgaagatcgtgtgcttgaagtcgccacgccgggtgacgatgttgcggagcagccggagcagccggagcagccggagcagccggagcaggtagaggacagcgccagcaagaaaaagggtaaataa

SEQ ID NO: 139858 - DNA, 1083 bp, Enterobacter cloacae
atgcttgtattttcccgttctatcggtgaacgaaccggtaacctcgaagtaaaccaggcgcagttccgcgaactggagatggcgcgcaacatgagcgcccaagccgtggccgatttcatcgcccgggctcgctttggtgagcaaggccagttggatgccgtgaacgcagtcgatgatattcgtcgcatgtatcgtgcgtacgaccagaccgttctggctcagttcgagcctaacaccgagttcacactgtttaacgacctgatgccactgtctcgctcagtacgactggaagaatcggtatacgaatatgcacgtaccggcggtcgtggttgggcacatacctccatgtctggccagattggtgcggcgctggatgctcgtgcctacagcttcgacggtaccatggtgccggtgcatgactccggctttaaattccactggcgtgatccaatcttcaataaaggttcagcactggcatcgctggctgatgcccaacgaggttcggttgacgacgttcgccgcaaaattgtggactacatgttcaacggcttccgtgactctgaaggcaacttcgttaccttcgacggtaaaacgtggaaaggtctgaagaacgatgaccgcgtcggcctggttgatctcggtgcatctggtctgaacatcaacttttcaaccagcaccgaccctgatgctatccgcaaaggtgccattgcactgcgtgacgttctgaaactccagaaccaccaatacggccagcagacctggtacgtatccagcgagattatgtcgaactgggagcagtacttcgatacccagaacaagaccaggaccgtgctggatgaaatcctgaagctgtccggcatcgctgctgtgaaagaagatgccgagctcaaaggtaaccagattctggtggtacctctggctgccggtgtcatcgctcctgttgttggtcaggctgtgggtaccgttgcagaccctcgccagttctacaatagcgactatatctggcgcacctggggcgctgcaggcctgatggttaagcaggatatcaacctgaaacatggcgtgctcttcgcgagcagctaa

SEQ ID NO: 139859 - DNA, 156 bp, Enterobacter cloacae
atgaaggtatgggttgtaatctctggggttccatatgaatcgtctgaagctatagagggtgtttattcttctgaagaaaaggcaaaggaaaagctagccaccctagataatgattcgcttagctatgcttattatgaagagtgtgaagtcgaataa

SEQ ID NO: 139860 - DNA, 624 bp, Enterobacter cloacae
atgaaaccaaaaggaagtcttattttcggagtcggtaagctagatgtgcatcctgtttttgtgggtgggaagaaaataagagcatttagagtttggcatgggatgctcaagagatgctatgggaaaggtagttcttacaggcctagctatgatgggtgcgtggttgatgaagagtggcatctctttagtgcatttaaaaagttctacgacgagaattatcttccaggattcgagcttgataaggaccttcttttcccgggaaacaaagtttattccggtaaaacctgcatctttatcccgcaagcgctcaatagcttcgttacttctggggatgccatgaggggcgattatcctattggtgtttgccttaaaaaaggttctacaaagtttcaggccggtataaaggttaatggtaagaacaagcacctaggtatgtttcatgatccttaccttgcccatctggcttggtttaatgaaaaaatgagtcttgcacgaggctataagagcctatgcgatcagttgcacccatttctctacagcggactcatcaagaagattgagtcactcaaagtgagccagcaggcctgccaaaatcaaaatgcacctcttagaggtaaatattaa

SEQ ID NO: 139861 - DNA, 141 bp, Enterobacter cloacae
atgaagccagaaacgatcgagatactccgagcgcgatggcagcgcctccggatttaccgccgcccgggctccgtgctggtggattaccgcattctccgtaacttcgttcgcacctatcatcctgcaggagccgcacaatga

SEQ ID NO: 139862 - DNA, 450 bp, Enterobacter cloacae
atgagacagcactactgcatcgttaacgacaccgttaaagacaatctcatcgcgtacattcgcaccttgccggtaaaccctcgctcgccgatggttgtcgaggcccgtgaagagacccgcaccgacaagcaaaaccgtctgatgtggccgctgctgaaagacctgtctgaccaggttgtctggcacggagaaaagctgacccgcgaagaatggaaggacctcatcaccgttctggtaaaccagactcaagaccaggaacagaaatctgcgccgggcatcaacggcggccgcgtttatttcggcgtccgcacatccaaatccagcaagcgctacatggtcgacgttatcgaggcgatttactggttcggtaccgaacgcggcgtgaagttctccgaggcatccagtaagcgcatcgcctgggcgcaagagtggagggcttcccgtgggtaa

SEQ ID NO: 139863 - DNA, 255 bp, Enterobacter cloacae
atgggtaagttaactttcgtcattgagtttgaagacggcaaggagccaccagttaattcacgcatggaggctttcggcgggaaggttattgcggtagcgttccgggatgcattgagcgagggtaatcctacgcagacgatcactacccatcctcaggtgcttagtgagatgcggtgctttatctgcaatggtaagcatcctatcggtgtcgcctgcccactaagttcgccatcagtggtatcgcataatgcctga

SEQ ID NO: 139864 - DNA, 708 bp, Enterobacter cloacae
atgagcactattaccaaagaactggcaaagctgttcagaaaaattacgaattctgaaattgatgcggagggaaacgctcatgttgttttatttcctgctgatagcctcctgattaataatgcgcgtatcgcgctggcatcgctcgaagcggagcctgtggcgtggctactgtcaggcggcggcgcaaaaaacaacgtcagcttcgatagtggcaatgcttatgccgacccgctgcgagaagtaacgccgctttacaccgccccgccagcgccggtatcgccgctttacaccgccccgccagcgccggtatccgtgcctgatgaagaccttcttcacatggcagcgtctgcgattgacgacctgctcagcaacaaagacaggtctggtgccggggtgtgggcagacattcctgccaaattgcgccgcgccgccatgcttcagggtgccgaacctgtaacgacggctaacaagttgctggacggctgggtggcttgcagtgagcggatgcctgaggatgatgactttgtctatatctggccgcgaccggactttggagttgaattgcatgtaggccagtactgcgaatgtcatccaaaaggagatggctggtacgctcaagtgtgtgaacaaaactacggtatcgagtggtgcccaataaccgtaacccactggatgcctctgccagcagcaccgcagcaggaggcgtga

SEQ ID NO: 139865 - DNA, 282 bp, Enterobacter cloacae
atggctaaatttacagacgtacacgacctgttaaccgcttatcagaaacaggcacgaaagataccacctaagggcgtttacgcatccaagcagcgacagcaggaagtgcaggctgcgcacacgagaaaggtaatgcgccagcgtaaacgttctattgggaagtctaataaattgggatttcgtcgccgggcagaaactacggctgcgctgatttgcgaaatgaatttttgggcactggtgtgtcgttcaaaccgtaaaaatgccgccaaagtggagggctaa

SEQ ID NO: 139866 - DNA, 261 bp, Enterobacter cloacae
atgagcattctggacattctaaacactggcctcgctctgatggggtggttattcatcatgttcaaaacgggccagtggtttatctccattgcgctaaagcagtgggagaagcgtagaaaactatctcgtagacagaaggcagtaaacgaattttacgatgcgtttgacttgtccagcatcgaaccaggaacaacggtgcgcctggcgactaaaggcgatctgacaatcatgatgtatcgcacagaaggagccgcccaatga

SEQ ID NO: 139867 - DNA, 345 bp, Enterobacter cloacae
atgaccataacaatccgtgagcaggtgctggcagccctgcgtaataacccgggcctgaacagtgggcgtattgccaagatgatcggcatgaccaccaaaaagatgtcaggcacggtcagctcgctcctggcagacggcctgatcacttgtgagggcaagcacggccagcggctttatcggctgaccagttacggcatgaaatacgcaccggaaaccatcccggccatgccgaaggggaattcgaagctggtgcagcgtacagagacgaacgcgatctgccaggagtgccggaacagtccggcgatgagaagggtattgatggtttgggggagggtaggggtatga

SEQ ID NO: 139868 - DNA, 855 bp, Enterobacter cloacae
atggaactgctcgaaaaaatcgacgccatcgaaaaaatgctggaagtcctgggtagacctccagagcaactccctaactgcgagaccgttttcgaaacagtgcattgcgagaaacatggcgagtacgaacagcgtaaacgcgtgcttaccagcagcctgatcaagctgccgtcaccgccgactcgctgccctggctgcctgcgtgatgagttgaccttcctgtatgccgagaaaaagcgctgggaagaccgcacgcgccagcagaacatcgatcgcctgctgcgccagctcgaaatccccgagcgcttcgtgacatgcacactggaaaactaccagccggtgggcaaagagtcagagcgcgcgcttcgggtttgccaggcatatgccgcgaagtggccagagcgcctgaagcagggtggtggcctggtgatgtgcggcaagccgggaaccggtaaaaaccacctcgccctggcgatcgcccgttatgtcatcgagaaccaccagagcccggtaattttcaccaccgcgctgaagattgcccgcgaattcaaatcaacgtggtcgaaaacagcgacgcgctgcgagaacgacgtgattgcgcacttcaccactccggaccttttgatcatcgacgaagttggcgtccagttcggcagcgaggccgagaagctgatcatgttcgaaatcatcaacacccggtacgagcgtatgaagccgaccattctgatcagcaaccagaccaaagaagaactggcggcgttcgtgagtgagcgcgttattgaccgcatgagcgatggcggcgggtgcacgctgtcattcacctgggattcttaccgttccaagggggctgcatga

SEQ ID NO: 139869 - DNA, 219 bp, Enterobacter cloacae
atggaatctctttcagaacgcgtaaaaaaacgtcgtaacgagttaaaccttactcaagcaagcctggccgaactggttggcacaaaacagcaaaccatccagcaggttgagtcaggtcttacaaagcgcccaagaaaattgatcgaactggcgaccgcgctgcagtgcgaaccgcgctggttacttttcggtgagcaatcaaattcaacagccgcctga

SEQ ID NO: 139870 - DNA, 696 bp, Enterobacter cloacae
atgactattgcggagagagttaagttaagaagagctgagttatcacttactcaggctgagttggcggttttggcaaaaacgtctcaacaggccattcagcaacttgaggacggaaagacaaagcgaccgcgatatcttccagagctggcatcagccttaaagtgctctgttaagtggcttcttactggtgagcacgacaaaaacgatgagcttcctccagaagccgaatggggcacaattgatgcctgggataaaaacactccattgcctgtcgacgaggtcgaagtgccgtttcttaaggatattgaattcgcatgcggtaacggccgaattcagagcgaggatcacaacggttttaagttaagattttcaaaggcaacgctcaggcgtgtcggggcaaatagtgatggctctggagttctttgcttcccagcgtctggtgacagcatggaacctgtcatccctgatggaactaccgtagcggtagacacaaacaataaaagaattgtggacgggaaattatatgcgattgctcaacctggagctggagaagaaaaactaaaacgcataaagcaactttaccgaaagccgggcggaatactgataatacgcagctttaaccgtgaggatgaagaagctatggagcaagatgttgaaatcataggccgagtattctggtactcagttttgctatag

SEQ ID NO: 139871 - DNA, 435 bp, Enterobacter cloacae
atggatatcctatcttttcttttaggtttacttgctgcactagcgattatcggtattgcattttattggctgaaaaaaatacacacaaaaagaaaactgaagcaatatcgatcaaatggtcttgattcctcattaaaggatgccaagacgctgctgaatgctgctgatcatctgaacgccattgataacaatgctatcggggcgatttggagggccagacaatgctctgaacacgccagcaaaaatggtgaagtttatgccatcaaaggctcttgggcattaaagaaaaaaatgatgaaagtaggtccgaacggctatctaaacgacaaccctctcccgcgttcctgcggatgctacttaacctacatttacaacctgcgaagccttccagacaatatgctcacggcgaacgccaataaaatcctcaaaaaataa

SEQ ID NO: 139872 - DNA, 195 bp, Enterobacter cloacae; identical to SEQ ID NO: 84469

SEQ ID NO: 139873 - DNA, 243 bp, Enterobacter cloacae
atggagctcgtccagttcatcaagcgagtcagagattattatgacgactgcaatctcggttttcctgaaatcatcgaaatgaagagtgagtcaggattcgaaaaacaagaggacacgatccacgggatgccatatgtgctagttgaacagcacacctcttacccatgtgaagacagctattacggctacctgatattcccgctcaagaagcgtaaatacattcgaatttctttcgacatgtaa

SEQ ID NO: 139874 - DNA, 711 bp, Enterobacter cloacae
atgaaccaaccaatcagctttacctggaaccagcagtcggcagaagcagcactcaaagcaggatcctccgctggcatttctgaaaccggcgcatacgaaggcgtgatcacctccgctgtgtatgagttcggcaaggatggatcacagtcgcaggcacttgttctttcgctcgacgctgacggccagaaagcaaacttcctgcgcatcaacttcctcggacgcgacggcacacagacttttggtatgggcttgatcgccgccatcatgtgggctgcgcaggttaaagacgctcaggcgcaacagcgccaggggcaaagcggccctgaatggtgtctgccggcacttgaaggtaagcgtgtcggcttgttcctgcaaaaaatcctcaccacaaagacagatggcagtgacagctacaaattcgaagtccggcatgttttccagccgggaagtcgtctgacctataaagagttcaccgacaaaacgccagcagaagcgatcgccacactcgagcgcaccatgaaagacaaagacgaccgtaaacctcacgactcttctcgcgggggctggggtgcaccatcacatagcggtggtggatggggtggtaatcagcaggatccgaatgcggtacctgaatcgcgcctgcagcaggccaaccgtcaggtatcgcagagcaatcaacatcctcagttcgacgatgatatccccttctga

SEQ ID NO: 139875 - DNA, 153 bp, Enterobacter cloacae
atgactcacgctcacgacgacataagggttggcacactgtgccttcccttcattggtaacggctggctaatgccatggggtgaagtggtcagcaatccattaaaggcgcagcggctcgctgaggaatatcgggaaaggcaggaggcggcatga

SEQ ID NO: 139876 - DNA, 327 bp, Enterobacter cloacae
gtgaaaccttacgaatcgaagaaatcgcagttcaccagaaacctgatccggcggcgacacgctgaatggtcagaaaaaacctttggcaatgtcggccccgtcggaccgcttaaacacctttcgaaagaggcgctggaagctgctgccaaccctgacgacctcagcgagtgggctgatattcaattcctgctatgggacgcacagcggcgcgcaggcatcaccgatgagcaaataaccgcggcgctggaagaaaagctaaaggtgaatatggcgcgccagtggccggagccgaaaaatggcgagccgcgccttcacatcaaaccatga

SEQ ID NO: 139877 - DNA, 1281 bp, Enterobacter cloacae
atggcagcatacccaacaggcgtagaggttcatggcgaatcgttacgcatatggttcatatatcaggggaagcgtgtcagggaaaatctcggcgttcctgacacgccaaaaaacaggaaaatggcaggcgaacttcgggcttcagtctgctttgcgataaagacaggcacattcaattatgcctcgcaattccctgattcatcgaacgcagagaaattcagcactgtcagaaagcaaatctcactacttgaactgaaatcgaaatggcttgggcttaaagagatggagcttagcctcgggacgttgaggcgttacgattgccacctcacaaccactatcgaaacaattggtgagcacaggtatatcggcagcctgaacactgaagatatccttagtgccaggaaggagctactgaacggctggcagaagaccagacatggcctaaatcatccaccaaaaaagggaagaagcgttcctacagtcaatagctatatggcatgccttggcgggatgctgagctttgctttcaaaagtggctacctgaaaaccgatctgatggcaggtattacccctctcgcaaaagaaagacccattccagatcctcttacttctgatgagtatcagagagtggttgcggcctgcccaacgctacagtttcagaatatggttatctttgcggtaaatacaggcgtcaggcatggcgaactaagcgcgttatcctgggaggatgtggatactgtcaactggactgttacagtgtcacggaactattccatgaagggaaacttcaccctgccaaaaaccaacgccgggattcgaacaatacagctgacccagccagcaattgatgccctcaaggcgcaaatgccactgaccagaatgatggcatcccacaaggtaagcgtaagcctacgggaatacaaaaaaaagagaaccgatgaatgcacctttatattctcgccgtccattacttcaatgaacggtaagaagacgatgtgctacgtccccggatccattaattcagcctggcgcactgccctgcgtcgtgcaggcgtccgacaaagacggtcttatgaaaccaggaacacatatgcgtgctgggcactggtcgccggagcgaacccaaatttcgttgcgcaccagatgggccattcgtcagcgcaaatgctattcacggtttacggtaaatggatgaccgagaataaccatgaccaggtgggcattttgaacgcatcatttactcaaaatgccccaccgatgccccatagaaaaaccgcataa

SEQ ID NO: 139878 - DNA, 972 bp, Enterobacter cloacae
atgagtaaagtcggctcctttgcgtttagcttcctgcccgtgatgttctgtatcgctatcccgctgggcctggcgcgcgagaacaaaggcgtcgcagcgtttgccgggtttgtaggctacgccgtgatgaacctggcggttaacttctggctgaccgcgaaaggcattctgccgaccaccgacgccgccgtgctgaaagccaacaacattcagagcgtgatcggtatccagtctattgataccgggatcctcggggctgtgatcgcgggtgtgattatctggatgctgcacgagcgcttccataatatccggctgccggatgccctggccttcttcggcggtacccgctttgtgccgattgttaccctggtcgtgatgggtctattcggtttaatcattccgctgatctggccggtctttgcgatgggcatcaacggtattggccgcatcatcaacggcgcgggagatttcggtccgatgatcttcggcaccggcgagcgtctgctgctgccgtttggcctgcagcatatcctggtggccctgattcgcttcaccgaagcgggcggtacgatggaggtgtgcggtcacgacgtgagcggcgcgctgaccatcttccaggcgcagctgagctgtccgaccacccacggcttctcggaaagcgccacccgcttcctgtcccagggtaaaatgcctgccttcctcggcggcctgccgggtgccgcgctggcgatgtaccactgcgctcgcccggaaaaccgtcataaaattaaaggcctgctgatttccggcgtgatcgcctgcgtcgtgggcggtaccaccgagccaatcgaattcctgttcctgttcgtcgcaccggtgctgtacctcatccacgccgtgctgaccggtctgggctttaccgtgatggcggtgctgggcgtgaccatcggcaacactaaagtaaaatacacctcattaagaattgaggcgtaa

SEQ ID NO: 139879 - DNA, 507 bp, Enterobacter cloacae
atggacacaaatgcagtaacgacgcctgaaaaacctgtcttgcacttgttatgtggaaaaattgcatcaggaaaatccacattgtcagcaaaattaggatcatcacctgggactgtaattgtcagcgaggatcgctggctggctgccctctttaccaatgaaatgcaatccatatcggattatgtgcagtattcattaagactaagaaatgccatgaagcctcatctggtgtcactactcaaagctggtttatcagtagttcttgatttcccggcaaacacacaaacaaatcgtgaatggatgatgagcattattaaggagtcaggtgccagtaatcagctgcactatctgaaagtttctgatgaagtatgtaaatcccgcttgcgcgcccgtaatgcagaaggcgtgcatgaattttctgcctcagaccaacaatttgacatcataacgcgctatttcgaagagccaacggctgatgaagggtttgatattaccgaatacagctaa

SEQ ID NO: 139880 - DNA, 357 bp, Enterobacter cloacae
atgaagggtttgatattaccgaatacagctaaatttaccttcctgcacaaaagccgccagttggcggcttcattattttccatctcatacggttataaacggtactacagcgaactaaaagtccgctcctggcacaaagcggacatcgggtattccggaagtgcccgactcatggttaattccattcaccaaaactctcacctccccaaagcctccacaatcaccctctccattttctctggcgtggtcatcggcgcaaaacgcttgagtggtttaccgtcgcggccgatcagaaacttagtaaagttccacttgatccgccctcccagcacgccgggcaattcgtttttcagataa

SEQ ID NO: 139881 - DNA, 228 bp, Enterobacter cloacae
atgtctgccagtgaactcaggctctgggctgaatttgataaacacagccccatcggtgatatccggggagacattcaggctgcgcaaattgcaactgctgtgtttaatgctcagggatcgaaagccacgatgagcgacatgctgctgcgctggcagcgtgatcctgatgaagagggtgcagacccgtttgccgggcttgaggcggcgctaactgctgcgacacaataa

SEQ ID NO: 139882 - DNA, 369 bp, Enterobacter cloacae
atgaaatctattaaggagctcgcgctttcgcgtcagtctgcattccgtcacgttactgttgaagtgccggaatgggatagtgtaacgattatgctcagggagccatcagcagaagcatggttgcactggcaggacgtgattaagcctggtgatactgatggtgagctgtccgtgtcagaacgtgcgcaccgaaatctccgcgctgatgtcacattatttattgacgtgttgtttgacgaacagggtgaaccggtgttcagcaaagatgattttgccgatgttgaagcggtatatggccctgttcatgcgcggctgctgcgtcaggctcttaacctgaccactgatccgaaggaggctgagggaaagtag

SEQ ID NO: 139883 - DNA, 444 bp, Enterobacter cloacae
atgtcctcactttatgaaaaatcacagggcacgaagattcagatcacttctgccccggcaacgccagaaacggtcggttcagcaacctatctggatttgcagtgcaccattaaagaggtgcagttcactggcggtcagaaacaggatatcgacgtcacaaccctgtgttcaacagagcaggagaatatcaacggcttgggtgcgcagtcagaaatttcactgtcgggtaacttctactctaacccggcgcaggatgccctgcgtgaagcctatgacaacgacaccacatacggtttcaaaatcattttcccttctgggatcggcttccagtttctggctgaagttcgccagcacacctggtcttccggtacaaacagcgtcgtggccgcaactttctcgctgcgtctaaaaggtaagcctcagaaaattgatccaggctcataa

SEQ ID NO: 139884 - DNA, 450 bp, Enterobacter cloacae
atgattgagacgagcctcgatttttccgggctgaatgacatcgcaaaggatctggaggcgcttagccgcgctgaaaacaacaaggttctgcgagatgctacgcgcgccggcgccgaagtgcttaaggaagaagtgatcgcccgcgcgccggtgcgtaccgggaaactgaaaaaaaacgtggtggtggtgacccaaaaaagccgccgccgcggggaaatttcttccggtattcacatccgtggacgcaacatgcgaaccggtaatagtgacaacaccatgaaagccagcgacccgcgtaatgcgttttactggcgattcgtcgaaatgggtaccgttaacatgccgccgcaccctttcattcgtcccgcgttcgatgtacgccaggaccaggcgacggaggtcgcaatcaggcgcatgaaccaggccattgacgaggcattaagcaaatga

SEQ ID NO: 139885 - DNA, 339 bp, Enterobacter cloacae
atggaacctggacgattcaggcaccgggtaaaaattctcaccttcacgacttcgcgcgatccatctggtcagccggttgaatcgtggactggtggcaacccggtcccggctgaggtaaaggggatcagcggcagagagcagctttcaggcggcgcggaaacggcgcaggcaaccattcgcgtctggatgcgcttcaggtcagagctgaacgcctcttctcgtctggaagtgctcagcggcccgtataaaggtcaggtgctaaatatcatcggtcctcctgtagcaaatgcgactggcactcgcctggaaattctttgcaaaacgggagctgaaaaatga

SEQ ID NO: 139886 - DNA, 327 bp, Enterobacter cloacae
atggcgatagatgttttggatgtaattagcctcccccttttcaaacagcaaattgagtttgaggaggatgacagggacgagctgatcacgctgtacgcacaggcagcctttgactactgctaccggtggtgtgatgaaccggcatggaaagcggcaactgacattcctgcagcagtgaagggcgccgtactgctggtgtttgcggacatgttcgagcacaggaccgcgcagagtgaagttcagctttatgagaacgccgccgcagaacggatgatgttcatccatcgcaactggcgcggtaaatctgaacctgaggagggctcctga

SEQ ID NO: 139887 - DNA, 1158 bp, Enterobacter cloacae
atgtctgaactcgctctcattcaaaaagcaatcgaagaatcccagcagaaaatgacccagctgttcgatgcgcagaaagctgaaatcgaaagcacgggccaggtttccaaacagctgcagtccgacctggcaaaagtacaggaagaactgtccaaatccggtacgcgcctcttcgatctggaacagaaactggcttccggtgctgaaaatcctggtgagaagaaatccttctccgaacgagcggccgaagagcttattaagacatgggacggcaaacagggctctttcgatgccaaaacgtttaacaagtcgcttggcagcgacgcaggttctgctggctcgctgattcagccgatgcagatcccaggcattatcatgccgggcctgcgccgtctgaccattcgtgatcttctggctcagggccgtatgaccagtaatgctctggaatacgttcgtgaagaagtgtttaccaataacgccgacgtggtggcagagaaggcacttaaacctgaatctgatatcactttcagcaagcagaccgcgaacgtgaagaccatcgcccactgggtgcaggcatcgcgtcaggtgatggacgatgcgccaatgctgcagtcctatgtcaacgatcgcctgatgtatggtctggcgctgaaagaagaaggccagctgctgaacggcgacggcaccggggataacctggaaggtctgaacaaagtggcaaccgcctacgacacctcgctgaatgccaccggcgacacccgtgctgacattatcgctcacgctatttatcaggtgaccgaatctgagtttagcgcttccggtatcgtcctgaacccgcgcgactggcacaacattgcgctgctgaaagacaatgaaggccgctatatcttcggcggtcctcaggcgtttaccagcaacatcatgtggggtctgccagtagttccgactaaggcacaggccgccggtacctttacggttggcggtttcgatatggcctctcaggtttgggatcgcatggatgccaccgtggaagtcagccgtgaagaccgcgataacttcgtgaaaaacatgctgaccatcctgtgcgaagagcgcctggcgctggcgcactatcgcccgacggcaatcatcaagggcactttctcttctggctcatga

SEQ ID NO: 139888 - DNA, 678 bp, Enterobacter cloacae
atgcctgaaatcgtaaaaacgctgtctttcgacgagacagaaatcaagttcaccggtgacgggaagcaggggattttcgaaggctatgcctcagttttcaataacaccgattccgatggcgacatcattctgcccggggcgtttaagaacgcactggcgaaccagacccgcaaagtggcgatgtttttcaaccacaagacgtgggagctgccggttggtaaatgggacagcctggccgaagacgaaaaaggcctgtatgtgcgcggtcaacttaccccagggcacagcggcgccgccgacctgaaagctgcaatgcagcacggtacggttgagggtatgtcggttggcttttccgttgcgaaagacgattacaccatcattccaacaggccgcatttttaagaatatccaggctctgcgcgaaatcagcgtctgcactttccccgccaacgaacaggctggcatcgcagccatgaaaagtgtcgatggcattgaaacgattcgtgatgtggagaactggctgagggattcagtcgggctcaccaaatcacaggcagttgggttaatagcccggtttaagtcagcgattcggagcgagtccgagggcgacggaaacgaagcacaaatcaacgctctgcttcagagcattaaatctttcccttccaatttaggtaattaa

SEQ ID NO: 139889 - DNA, 1275 bp, Enterobacter cloacae
atggaagaacctaaatacacgattgacctgcgaaccaataacggctggtgggctaagctgcagtcctggtttgtaggcgggcgtttagtcaccccaaatcagggctcacagacggggcctgtttcggcccacggacatctgggcgattcatccataaacgatgaacggatactgcaaatttctacggtttggcgctgtgtgagcctgatttcaacgctcacggcatgcttaccgcttgatgtcttcgaaacagacgagaatgacaatcgcaaaaaagtgggtttgagcaatccgctggcgcgactgctgcgctactcaccgaatcagtacatgaccgcccaggaattcagggaggccatgacgatgcagctctgtttttacggtaacgcatatgcactggtggaccgcaacagcgcgggtgacgtgatcagccttctcccgcttcagtctgccaatatggatgtgaaactcgtcggaaaaaaagtggtttatcgctatcaacgcgatagcgaatacgccaacttttcgcagagagagatttttcaccttaaaggcttcggattcaccggtctggtcggcctgtcacccattgcttttgcctgtaaatcggcaggtgtggcagttgcgatggaggaccagcagcgagatttctttgccaacggtgccaagtctccgcaaatcctctcaaccggcgaaaaagtgctgactgaacagcagcgctcgcaggtcgaagagaacttcaaagagatagccggcggcccagtgaaaaaacgcctctggattctggaagcgggcttttccacatcggcaattggcgtaacgccacaggatgccgaaataatggcgtcccgaaaatttcaggtcagcgagctggcgcggttctttggcgtaccgcctcaccttgtcggcgacgttgagaagtcaacgagctggggatcgggtatcgagcagcagaatctcggcttcctgcagtacacgctgcagccctatatctcccggtgggaaaacagcattcagcgatggctgatcccgtctaatgacgtcggtcgcctgcatgctgagcacaatcttgatggtctgctgaggggcgattctgcctcccgtgccgcgttcatgaaggcaatgggagagtccggcctccgtaccatcaacgaaatgcgccgaacggacaacatgccgccattacctggtggcgatgtggcgatgcgacaggcgcagtatgtgccaattaccgacttaggaaccaacaaagagccccgtaatgacggggcttaa

SEQ ID NO: 139890 - DNA, 132 bp, Enterobacter cloacae
atgtatgtgctttacgttatcctgatgttgcttactgccatatggatagttttaatcttcgatattaacgaagcgactcattatcttattcgattaatagattattttgaggaattctttacgggccaataa

SEQ ID NO: 139891 - DNA, 126 bp, Enterobacter cloacae
atggaatacgaattaatgcgtctcgcagaatttatttctgaaaactggagtcagtgggaatcgttctgcgaacagcatggcgacaacgcccaggaaatttacgaacaaatcggcggtgaagattaa

SEQ ID NO: 139892 - DNA, 360 bp, Enterobacter cloacae
atgacgaacacacagaacgtcaccgagttacaaccacgcatgaccagagagcagttgatcgcggcggcacgtatcgccgctaagtacctgccagttgcatcagctcagcttatgaatgagcttgctaaccgtctcgatatcaccagcgtagcgctttgcgaagcgatggcgcagcgtaaggtactggccgagcagaacgctacgctgcgtgaggatgttgccagctgggccaaagagtgcgaccgcatagaagagcgccacaccaaaacgcccaccaacatgcacttgctggaagctcagcgagaactccgtgagctgcctcgtgtcgtcatttccatgaataacgaggttgttctctaa

SEQ ID NO: 139893 - DNA, 633 bp, Enterobacter cloacae
atggaaatcaccagagagcagttccgcgaacgtgcgcgagaaaaggttaagagtctggagttttccatcacacagaccgccttcgctgattcacgcgcagagcttgaagaagaactggagctggcgcgtatcgcgctggcatcgctcgaagcggagcctgtggcattacgtgacgagcgttcaggtagtggcggcatcagcaaaaggcctggctttaaagacctaccgcatggcacaccgctattcaccgcccctccagcgccggtatctgtgcctgatgaagacctgcttcacatggcagcgtcagcgattgaagacttgctcagtaacaaggacaggtctggtgccggagtgtgggctgacgtacctgtcaggttacgccgcgccgccatgcttcaaggggccaaaaacgtcaagtcgcgctgcagcaaccctcatgttattcctgattgctcatgtcgcacctgccgcccggtgacaatctccgacatgcgcttcgttgtctgtcctgattgcggaaacaaacgctgccctcatgccaatgaccaccgcaatgcatgcaccggaagtaatgagccaggtcaggagggcagtacgtatccatcagcaccgaagcaggaggtgaagccgtga

SEQ ID NO: 139894 - DNA, 999 bp, Enterobacter cloacae
atgaaaaagctcattgccattgctatcgtttcgacgcttctggtcttcctgtctctttatgcggtcaatgctgtaatcatcggtcagcagaagagtaaacagcgtgaaatatcccgtacccttttacattattcagaagacgtgtcccaaagcgtggcgctgggtctcaaaagcatcacgacgcagggatgtgataaaaccagcctcgatcgctacagacaaattaagcttaataatctttattttgccgatatcggctttattgagaaaggaaaaatagtctgtaccgctttttgggggaaactcgcgacgcccgttgcacttcctgcagaactgcataaaacgccgaggggctttctcctggcccagttttcgagaaaagactttttcacgggcaatgcggcaatttataataatattattatcttcacctcccgctatgcttacgataaattcaccccggtcaccgcaagctattcgctcagtgctaccaccaaagacttcggcagagtctttttttcggccgccacggagctaaatcagcagagctggctgcattcgacattgtttaccctgaccctgacacagtgcagcgccttctgggacctgtgcgtcatcgtgcagcatcacgacgccgggctcgcctcgttacctccgtttatctttgcgcttctcgcggtcattctctgttttatctggattgcgataacgttatttatcttccgtatctatgaagaccgtttttctctggaacgtacgctgataaaagccgtcctcacgaataccataagcgttaactatcagcccattattcgcattcacgatcaaaaaatcgtgggtgtagaagttctgtcgagatggcgtgaccaaaagcacggggacgtctctccggagctgtttatcccattaattaaaaagatcggtctgtataaaaaatattacagtaacattatcgaaaaatccctttccgaaattgcccctctggcgataaaacactag

SEQ ID NO: 139895 - DNA, 432 bp, Enterobacter cloacae
atgagaaatctgcttcagatattcatggtagtgttgtttcagtctattgcttgttatctggctggatggttagttacggaggtggtattcattggtgcaactgtgctcttatggcaaggattgttcatctatttgttttataaaatatctaagaataaaggcagtgttgaaccctacacatacaacagggtagtttggtatgtgataatgcctatatgttcactggctcctcctcttgttactttttttgtattcattgtgggtacattgatggatttatataaggttagcgggtgtataagcatcaaagagtggcttgaaaaaaacaaggtagatggcgcccactctataaataatgactttgaatccgtggactttgataatgttaattataatccggaaagtaattatccaatgggttggaagcgttag

SEQ ID NO: 139896 - DNA, 2823 bp, Enterobacter cloacae
atgcaggaaatctatgtcatcgcgggcggcgactggctgacgcagacgctgaatgccatcgtcacgttcatgtcgacggagaactgggttgttattcggcgtattgcgacggctttctctgtgctggttgtagccatttcgtggatacgacggcacaacatcatggatatgctgggctgggcaggcgtcattgtgctgatgtcgctgctggtcagtgttcgcacctccgtacaaataatcgatatcagtaatcagacaaaggtctataaagtcgataacgtgcccgtcgggctggcactgcctgcatcgctgaccaccaaaatcggatatgcccttgttcaggggtatgaaatggtcttttcacagcccgacagcatcacctacagcaaaaccggcatgatatttggggcgaatctggtttcacgcagtacggactttttatcacagaacccagagataactacgatattcacggactatgtgcagaactgcgtgatgggcgatattttcctgaacggaaaatataccatggaagatctaatgaacagtgcagacccgtatacgctgattttctcaaagccgagtccgctgaggggggtattcaacaacaataatcagtttttaacctgtgaagaagccgctgcggtaattaagccaaagcttgccctggatactcagaccggaggaaaaacatggagttactacgtgcgtcagctttttggcggacgtccgaatcctgacattttgttcagccagatgatcggggacagctataactatttctatggtgctggtcagagcgccgcgtcgattgtccgtcagaatgtgacgatgaacgctttgcgaaatggcatcatgagctatgcagcccgcaacggtgacacctcaagcctgctgaatatcgccactacgtcatcgatggagaagcagcggctggcgcatgcgacggtcggtcaggtggcattacgctcactacctatgtctcagacgttgattgtcggtctgaccatcggaatattccccctgatggtgctgggcgggatgtttaacgccgtcacccttaatgtgctgaaggggtacgtgctggctatcatgtgggtgcagagctggccactgctttacgccatcctcaacagctgcatgaccttctatgcgaaggccaacggttcaccagtggttctctcggagttgtcacaggtgcagataaaatactcagacctcgctaccacggcaggctatctgtcgatgcttatcccgccactggcatggggaatgctgaagggactgggggcggggttctcaaatctctacagccatctggcctcttccgctatcagccctgcagccactgctgcctctggtgctgttgatggtaactactcttacgctaacatgcagacagaaaatgtgagtggttttaactggaataccaatagctcaacagtatttggacaaatgagccaacagttggctaacggagccagttcgacgcaaatgcgtgatggtagtgtagtgacagattccagtggtgctacgtcacgtattcctatgagtatcaacatgactcgtcagattgcaaccgcacagcaggcaatggcccgcgaggcacaaacccagtcagagagtgcattgcatggatataacagtagtttgagtagcgcatggaatacgcttagtcagtttggctcaaaccgtggtagcagtaattcaatgaccagtggcgcagacagcactatgagtgctcaggattctatgatggccagcaggatgcgcagcgcagtagaaagctatgcgaaagggcataatattagtaatgaacaggccactcaagagttagcgtcaaggagcaccagagcgtcactcggattgtatggtgatgcacatgctaaaggaagtatggggctgaatgtgctgggtaccggaggaggggtagggtttcaggcaggagttaaggcgggagttgatttttccgatgacgatatgcaccaagcaacaaatagctctcgagctagccatgatgctcgacatgatatggatgctaaagcaacccaggactttaaggaggcgagtgattactttactagccgtaaagtcagtgaatctgggagccatacggacaataatgcggcttcccgagcagatcaactttcggcatcgttgaactcagcaaaacagagctatgatcagtacaccacaagtcaggctcgtagccatgaatatgctgaaatggcgtctcgtacagaaagtatgagtggtcaaatgagcgaggatctaaatcagcagtttgcccagtatgtccgtaaacatgcacctcaagatgcagatacattgcttactaataccagctcagcagaaatcgcaggaaaacgtcgggaactggcttggggatttgttcaggagcaggtacaaccgagcgttgatgcatcatattcagcagctaaaggaaatgttggccatggtatgggggccatttctggtggcggtggaaatagcgatgttagtgccgatcaccagtctcatcaggctactatcgaacaacgtacacaggacagcggaattcagaataatgtaaaagaccaagttgataatatgctcacaacatcgagagagaatatagccgatactaaaggaggaatacgcgatgaagaaggcagcataaataaacagtattctgatctgcaaaaacatcataattcagagcaatcttcgcaaatgaatacgtataataaggaaaaggagtctcaagaacgagtgccgggggctgacagtcctgaagaactgatgaagaaggcaaaaaaatatcaagataaacataagcagtaa

SEQ ID NO: 139897 - DNA, 429 bp, Enterobacter cloacae
atggctgatcagaacaatgcagaggaacacgacatgatgacctccggaatgcttcagagagctacgacgccagagttaatcgcgctcagggcacggaaagaggacgcacggttcggcgtttatgctgagtgggcgggcattttgctcattgccggcgtgctgtcgcgcgtctttatgacatacgttttcaatgcctgcgtcggcgactggctcagggacggtcacctgcagctgaaagatttgtggaacgtgttgatgtacgccattccactgatatttatcgcgctgagcggcgggcttgccgttgcaggtggcgtttatgcaatcctgaactcgctttatacgaaagggcaaatgttcatactaaaacgaaaaatgggaaaactcgccctgcaggcgagtcgggagggtgccgatgttcgtccgtaa

SEQ ID NO: 139898 - DNA, 555 bp, Enterobacter cloacae
atgaaccttagacataccgtgtttaccgtggcgctcatgtccctctgcctggccacacaggcttccacaatggacgagatcaaatcgttatggcatccacagggggcgcgaacgtcgggatctctgccaacatccccggaagaccctgaagttaagccacttccggcgaagccgccggtctggtaccgcctcagcaacggccgccagatcaatctggccgactggaaggtcgtgctgtttatgcagggacactgcccgtactgccaccagtttgatccggtcctgaagtcgctgtcggcacgggtggggtttggggtgatggcctacaccatcgacggtcagggggatgcgtcctttcccgatgcgttgcccgcgccgccggaggtgatgaaaacctttttccctaacctgcccgtggccacgccaaccacctttctcgtcaacgtaaacacccttgaagccctgcccctgctgcagggcgcgaccgacgaacagggctttatggcccgcatggatacggtccttcagatgcgtggagtgggtaacaatggctga

SEQ ID NO: 139899 - DNA, 249 bp, Enterobacter cloacae
atgcgcaaattccgttttcgcctgcctgagttcgacgtgcccggattatgggtgctgagcctcgggatatggtttcacattgtttcccgcctggtccggcgcgagccggagatggccattcttctggcgcagataatcggcgtatcgatggcgctctgggggggctaccgcatcatcaaccgctggattgatgccgcccgtgaggccgaaaaggcccgtgatgccggaggatgccgacatgaaccttag

SEQ ID NO: 139900 - DNA, 750 bp, Enterobacter cloacae; identical to SEQ ID NO: 96814

SEQ ID NO: 139901 - DNA, 189 bp, Enterobacter cloacae; identical to SEQ ID NO: 96813

SEQ ID NO: 139902 - DNA, 1854 bp, Enterobacter cloacae
atgaaaagagcaatactgatgtcggtgctggccattgccaccacgatggcaagcgtgaatgcatttgccgatgctgacgcgcagtacagggcgggggctgattttgcccgtcaggtacaggggcagggtgagagcagcctgaaaaactttaacccctcagcgtctatccccaactataccgcctcacccggtgagaaaaagtactatggcggtgtgacggcgaccggtgatggtgcgctgaaagcggacggtaccacgggctggactactaatgaggctacaaaagccgtcaccgactcgtttgttaacaacccgaaggagcccatttcgcccgacgcgccgtttattaaggccagccaggatgtccagtcccgcgctgataccatcatcggcaaaacggggcagacgcagtgcgaagcgcagaatatcagccgcagtgagttcaccaactatacctgtgagcgcgacctgctggttgagcaggcctgtacgcgcacggccagcattaccggccactatgaagatacatctgaaacaaaacagattgttatccagtctcagaatatttcgtttgcttcctccgaagcgggatacacaggaacatggactgcgccggtgacagggaaggttgttgctgcaacagccacctattcctggaataaacgtctggcgttcagtaatcctaactggtttatgcgagtaaccacgcctttcgggttgatttccatggataacgataccggtagcctggcgctgagtagcggcatgcagctgaagaaaggcgcagggatggtgttttccattcgtaccaggagaaacaatcccactacagattcaatctggaagcacagcaatatgcgctacagcttcaccgttacgctccagattgaaattcccgccaaaaaatgggtaccagacgtggtctggaacgaatcctgcccgttcagcaagagcgaaggtacgctcaaaaagacggaatgtattgagccggggagcacaaaaacggtggtggttgacggcgtgtcatacccggtcacgcaggcttgctggaagtacaaagacacgtatatgacccaggctgctgacaatggcacctgcaaaacctacatgaacaatccggcctgtacgcttgcctcacgcacctgcgccttcacggcagaagacggcagcggctgcctgcatgaatacgcgacgtactcctgtgaaacacgtacttccggccaggtgatgatatgtggcggcgacaccttctgtctcgatggtgactgtgagcgggcgcagaacggtaaaaacaacgattttgcacctgtcgtttcggcactcgccgcgctggccgctgcgggcaaggacgtggcagccattaacagcgttaacgtacgcgcctttaccggcagcgcgaagttctgcaagaagtttgcggcaggcttcagcagctgctgtaaggacggcggctggggccaggacgtcgggcttgccaggtgcagcagcgaggagaaagcgctgggcaaggccaaagagaataagctcacggtcagtatcggtgagttctgttcaaaaaaagtgctcggcgtctgtctcgagaagaagcgcagctactgtcagtttgactcaaagcttgcccagattgtgcagcagcagggacgtaacggtcagcttcacatcggctttggcaaggccagcagcccggactgtcgcggcatcacccagactgagttgcaacaaatcaagttcgacaaactcgacttctcaaactttttcgacgatctgcaaaagaacaagaaaatcccggataacgacaccctgacgaagcgcgtccgcgaggaaatcgccgcgcaactgaagaacaaacagtaa

SEQ ID NO: 139903 - DNA, 630 bp, Enterobacter cloacae; identical to SEQ ID NO: 96811

SEQ ID NO: 139904 - DNA, 648 bp, Enterobacter cloacae; identical to SEQ ID NO: 96809

SEQ ID NO: 139905 - DNA, 348 bp, Enterobacter cloacae; identical to SEQ ID NO: 96808

SEQ ID NO: 139906 - DNA, 567 bp, Enterobacter cloacae; identical to SEQ ID NO: 96806

SEQ ID NO: 139907 - DNA, 402 bp, Enterobacter cloacae; identical to SEQ ID NO: 96805

SEQ ID NO: 139908 - DNA, 186 bp, Enterobacter cloacae; identical to SEQ ID NO: 96804

SEQ ID NO: 139909 - DNA, 225 bp, Enterobacter cloacae; identical to SEQ ID NO: 96803

SEQ ID NO: 139910 - DNA, 540 bp, Enterobacter cloacae; identical to SEQ ID NO: 96802

SEQ ID NO: 139911 - DNA, 1395 bp, Enterobacter cloacae; identical to SEQ ID NO: 96801

SEQ ID NO: 139912 - DNA, 744 bp, Enterobacter cloacae; identical to SEQ ID NO: 96800

SEQ ID NO: 139913 - DNA, 567 bp, Enterobacter cloacae; identical to SEQ ID NO: 96799

SEQ ID NO: 139914 - DNA, 351 bp, Enterobacter cloacae; identical to SEQ ID NO: 96797

SEQ ID NO: 139915 - DNA, 225 bp, Enterobacter cloacae; identical to SEQ ID NO: 96796

SEQ ID NO: 139916 - DNA, 690 bp, Enterobacter cloacae; identical to SEQ ID NO: 96795

SEQ ID NO: 139917 - DNA, 393 bp, Enterobacter cloacae; identical to SEQ ID NO: 96794

SEQ ID NO: 139918 - DNA, 477 bp, Enterobacter cloacae; identical to SEQ ID NO: 96793

SEQ ID NO: 139919 - DNA, 531 bp, Enterobacter cloacae
atgcacacattaaacgtcaaaaccgccactcgtgaatcagccgaacaatttaagatcgatgaacgccagcgctactctgttacagatggtgatgaacgtctggattttattcctgcgctcttttttacgccttctgctgataacatgattgccagctggttacgtcagcattcagattatgatggcggtttctggaattactggattattccgcagggcaccggaggaaacattgctccgaactgtgtcagattcaccacgacgcaaaccggatatatcgcaccggaaggtgaacagcgctataacatggttattcccggtaattactttgaagcagaggtcagtgccgatgctgccggaattattgcgaccctgatgatcatgaactggttgtcctggcaggttgcagatatggggcctgaatattcgaaagtctgtaaacacctcgtcgctcgtcaggatgcactgaaagactacatcagtatcataaaacaccctgaagcagatttaatttatcgggctattgattga

SEQ ID NO: 139920 - DNA, 831 bp, Enterobacter cloacae
atgtctcaactcagttttgccagcttctttgatcaggcgagagaagccgcacccttaacacccgctaaacccgtattgcccaccgtgaatgcgcagccgatactgcaccggatgatgacaatcgaccaggcccgccgccagtttatcagcgtgttcagggataccgcccgcagcctgcgccgctgggaggtgttcagcgactttatcacgctggccgccagcgagctggatatggcgcggataagaacgccagagaatattgagcagagccgcaaaatctgcgcgaagtacagcgagagtgatatcagcaacctgcatacgcttttctgcctgatggtctgcgcactggaggccaaattccacgacttcctcggcgcgatcttcatggagcttgagcttggcgacgaccgcaacggacagtatttcacgccgtatcacgtccagtcactgctggcgaggctgctgatgccggacgtcgacgaaacgatacgccgtgagggattcgttaccgtcagcgatccggcaagcggtgcggcgggaatgattgtggcgtatgcggaatatctgctggaggcgggctataacccgtctgaacatatgttcggaagctgcatcgatattgattctgttgcggccgatatggcgtttattcagctttccctgctgggtattcctgccgaggtggtcacgggcaatacgctgacgatgaagttaaacagggtgcggtatacgcctgtgtactacatcaacaactttggtaagcggctggacgatcagcgccgtatcagtgccatgcgcgaatttttgcgctgtataaatgacgctgcatag

SEQ ID NO: 139921 - DNA, 264 bp, Enterobacter cloacae; identical to SEQ ID NO: 96792

SEQ ID NO: 139922 - DNA, 345 bp, Enterobacter cloacae
atgcacttaaatctgaccgaatcctgcgctgaagcgggtatttatgcgaccagtgaggccgaacgcgcgtactggctgagccgcgaaaagtcatatctgaccgcgtccgtcgaaatcgacgtacacgccttccatgatgcgctggggctgatgtacccgatgaactggcgcagcagtcagaacggcgagtgtgaaaccttcatgctggcggaaatggtctgcggcaatgtgaccgaaatctacgcgcggatcggtatccgttattaccggatgcgcgactacagcaaccttgaccacgcggagattctggcacgcgttaaggagggagtgcagcgccagaaatga

SEQ ID NO: 139923 - DNA, 288 bp, Enterobacter cloacae; identical to SEQ ID NO: 96791

SEQ ID NO: 139924 - DNA, 375 bp, Enterobacter cloacae; identical to SEQ ID NO: 96790

SEQ ID NO: 139925 - DNA, 360 bp, Enterobacter cloacae; identical to SEQ ID NO: 96789

SEQ ID NO: 139926 - DNA, 324 bp, Enterobacter cloacae
atgaagtggcgttactcgctgcgctggaagcgtcccggtccctgtcccggtgaacctgaactggcgtcagaagtggtggaggccgggaagccagcccctgagtccgtgatgtcactgtgggtggcaggagccggatatgctgtctgcgttgattttctgtatgaacggccgatcaggcgctggagcgatgagcgaaaggcggccacgcggcgacggaatctggcgcgtcgtgttaacaggatcgcgcccctgtttgcagatgaactcattgagcgggaactgacggtgcgaccggattattttcggggaaagtcgcctcactga

SEQ ID NO: 139927 - DNA, 729 bp, Enterobacter cloacae
atgatacctgcaaacctgtcactggttcccttcagccctgagcgacgcgccgcgatggaggccatcgcggaggttgaacgccggcggtcgcgcggcgcggtgtccacgatgtatccgtatgccagcgcctttttccggcggctcacgggcagcacgcgcatcactatcagggaaatccatcattttgcgccggtgctgacggcgcgggagctgcggggcagcagggacagctggctcagtgccatcgatgcgctgattgaaagtcgcgggacgcgttgctggctgccgcttcccgttggtgcgggtcagcgcctctttccggaggtggcctttcagcagaccgagcgggttcgctgtcaggacgccctgcgggatgaaaaatacacccgacagcgtcacaaagaacggtgccagcgtgagcaggcgtaccaggcgctggcggggcaggcggagattgagctggcattccatacgcctgaaacggtcagcagctggagcgcacgctggtcggggactgaactgcgccagtacgacctggaagagatgttctggcgctggagcgagcgtttcccgtcactggagccaatggagcgctggacgatggagagtcagcctttctggacggtgatggctgaaacgaatgcgctggcaagggaaagtccgggatctgtccggcagctggagcgctggatggtacccaacaagctgacagcgcggagtcaggtatga

SEQ ID NO: 139928 - DNA, 231 bp, Enterobacter cloacae
atgagcgaggcgctggcggttttacccgacgacacctttacccgcgaacaggctgaggtcgttgcggcgcagtacaccaacgtggcaattgaggacgatcagggtacacattttcgtctggtcgttcgtcagaacggcgtaatggtctggcgcgcgtggaattttgaagcggatgccgggaaatggctcaaccgttacatcgaacgttacggtattcgtaaacagcagtaa

SEQ ID NO: 139929 - DNA, 507 bp, Enterobacter cloacae
atgcgcactacaaccaccacaccggctgtttacgtgggcacgtatcacaaatacaactgcggcagcattttcggcaaatggtttgatctgacggagtttaacggcagggaagatttttacgaggcctgtcaggcactgcatgccgatgaatgggatgccgagtttatgttccaggactgggagggcattccgtcgcagttcgtctctgaatgctccattgactgggattttatcgccgcttacaaacgcgccgaagaagagggcagggaagccgcttttatcgcctgggcggagtataccggcgaatgtgactatgacgcgtttgatgatgcgtaccgcggcgaggcggaaagcgaggaagactatgcgcgggagatggtggaggacaacggcctgttaaatgaggtgccggagccgttgcgcagctatttcgattttgaagcctgggcgcgtgacctgttcagcagcggttatgtgttccatgacggctatgtcttcagcaactga

SEQ ID NO: 139930 - DNA, 780 bp, Enterobacter cloacae
atgcaggaaatcaccacgttaaccgcccttgttatgcgccgtgcgcgcgatttgattgctgattatggatggcctgaccataccgatgttgatcagcgtgatccggtcaataaaccgggatggataagcatttatgtccgtctggatgcggcaaatattgttcatctgctgcctttgctttgtaccggtgacgtacccgcagagctgcaaagtgccatgacaaaaatagccgggacgccagcgcagattattttatccggcagccgctatgccgacgcgccgcagcttccggaggacggaacacagatagcgttcccctgggccggggaatggctgacggagccggagattcaggctgtaacggattgcctgtcccgcgcggtgcgggatatctcccggcaggtatgggaggatgcgcgccggataaaggcggcgctgaccacgcgcggggaaacgctgttttatcgccagacccgaaacttccgtctggttgtgaaggaaaatgatatgccctgctggctggacgatgatgacaatttgccggtggtgctcgatgccatcctgaacaaaggggcacgctacagcagcgtcgagttctttgttatcagcgacaatgttgatcaaatcctggcatgtggccagatgtgcgatgtgctgcgtattccgggcgagcctccgcgccggtggatggatttaaccctgttacatgaggtcatggcagaagcgcgtgcagaaatcagtcttgtccgcaatgccctgtcagcaatccggccagtgtag

SEQ ID NO: 139931 - DNA, 420 bp, Enterobacter cloacae
atgtacggaacctgtgaaaccctctgccagttgttgcgtgaacagtatcccgcagaaaccccgctgaacctcattgtctggtccccggcggatatcgaagcgctggccgacggaatggaatatgctgtttcggagcaggacacaagggtggtactggcgcgtatggacgccattccggaggaacaacggcttgaatcgggcgtgtctgccggtgcggtgatggatctgattgaacaggtgaaacaggccgcagcggcggtgagtgtgccggctgacctgcttgaaaccctgctgaccactgccgaacaggcgttatggcacagggaatggaccgcccgtgacagcaatcatccggtcccggaaagcgttacccgccgcctggctgatgcggcgaaagttcgcgccttactgaaaaactga

SEQ ID NO: 139932 - DNA, 249 bp, Enterobacter cloacae
atgaactatgccggacacgaaaaactccgcgcagaagtggcggaaatcgccaacagcatgtgtgacctgcgggcgacgctgaacgggatggagcaccgctatcgctttgactccgatgtgctggccgaacgcctgacccgtcagaccctttttcgcatcaatgccctgtttatggcggcatacaacgaaattcttgagttggatgcctgctttaaggacagaggagaaaaatatgtacggaacctgtga

SEQ ID NO: 139933 - DNA, 678 bp, Enterobacter cloacae
atgtcccgatttatccagggtaattgcgtccatatcgtgtccggctttccggataatgctgtcgatttcattctgaccgacccgccatatctcgtcggttttcgtgaccgtcaggggcgtaccatcgccggcgataaaaccgatgaatggctgcaacccgccagccatgagatgtatcgcgtgctgaaaaaagacgcgctgatggtgagcttctacggctggaaccgcgtcgatcgctttatggctgcgtggaaacaggccgggttcagcgttgttggtcatctggttttccctaaaacctacacatcgaaggccgcatatgtgggctaccgccacgaatgcgcctacatccttgcaaaaggtcgtccgtccctgccgcaaaacccgttgaatgacgtgattgcgtggaaatattcaggcaaccggcaccacccgacagaaaaacccgtaaccagcctgcaaccgctgattgagtctttcacacatcccggcgcaattgtgctcgacccctttgccggaagtggctccacctgtgtggccgccctccaggctggccgtcgttacatcggtattgaactgctggagcagtatcaccgggccggacagcaacgtctggccgccgtccggcgcgccatgcagtacccggccgctaacgacgagttcccggaggccgcgtaa

SEQ ID NO: 139934 - DNA, 672 bp, Enterobacter cloacae
atgtgcggtcggtttacgcagtacaactcccgcgaggagtacctggcctttctcggagaagaagcagaacgggacatcccgtatgatccggagcccgtcggccgctacaacgttgcgcccggaacccgggtattactgctgagtgaacgccgctcgcagctgcatcttgatcctgttcactggggttatgcgccggagtggtggaacaagcccgctctaatcaacgccagaagtgaaactgcggctggcagccggatgttcaggccactctgggagcacggacgggccattatttttgctgacggctggtttgagtggaaacagcaaaacggcgtgaaacagccgtttttcatttaccgcaaggacggaaatccactcctgctcgctgccatcgggaaaccaccttttgagaatggtaatgacctggaaggattcctgatcgtcacggcagctgcggatgagggactgctggatattcacgatcggcgaccgttcgtgtactcaccggatgccgcacgtaaatggctcagtgaaaacacaaccggtaaagaggcggaagacattgcccgtgagggcagtctttccgccgaagatttcacatggcaccccgtcagccgggctgttggcaatcccgggaaccagggcagggaacttatagagccactggcttag

SEQ ID NO: 139935 - DNA, 390 bp, Enterobacter cloacae
atgggattcccaagtccagcgcaagactacgttgaagatcgcatatcgttagacaagcgtcttatcgctcacccggcagccacatacatgatgatagccggcacgacatacctgcgcgctggaatcatgaagggcgccatgctcatcgtcgattcatcgctgacaccgaaagatggttctctgcttgtctgtgctgttgatggtgagttcaggatcatgcgctacaggacgctgccgcatccttgcctggagaatcctgaaaatggaagaagggagccgttaccattaagggatgaggccagcgattcttcacggccagtgttcggggtgatcacctacatcatcaatgatgcgcgttctggtgagtttgatgattttccggtgatgtga

SEQ ID NO: 139936 - DNA, 261 bp, Enterobacter cloacae
atgtatagctacagtcaggtagaggccatcaaaaccaatcttgaatggattgttaatcaggctgcgcttagccattcctccccctcacgcgccgatcaaaaagcgctctttgatatccttgagctcatccagacttacgaaatacttctggatttaattaacgaattcggtaccgatgtgattgatatgcacattgcggaaggactggccgtaacggaaagactcatcgccaaggtaaaaaacagcgcaattgccatgtaa

SEQ ID NO: 139937 - DNA, 3078 bp, Enterobacter cloacae
atgaacacaggaccggaagccaaatttaacctctccgcctgggcgctgaagaaccagcagatggtcagctttttcatgctgctggtgattgcgatgggcgtgttctgctatgagaagctgccgcgtaacgaagatccggcttttaccattaaaacggccgtcgtctccgcgcagtggccgggagcctccgtggcggataccacccgcctgctgaccgatacgcttgaaaaaaagctgcaggaaacgccctggctggactatctcgaaagtgaaacccgggccggacgcaccgttatccacgtcaacctccgtgacgatacgcccccgcaacgcgtgccggatatctggtatcaggttcgcaaaaaaatgcaggacatcgcgccgtccctgcccgaaggggtgcagggtcctgccgtggacgacgagtttgacgacacgttcggcacaatttacgcctttattcccgaaggttttaccctgcgggaggtgcgggatcgcgcagaaacaattcgtcgagagctgatgtccctgccggatataggcaaaaccaccctgctgggcgaacagcaggagcagtgggttctcgccttttctccggcgcgcctggccgggatggggctcgatattcaggaggttgccgacgccctccggtcgcaaaacgccgttgtcccggcaggaacgatgcgtaccgaaaaagagaacatggcgatcaaggtcagcggggcactcacgaccgaagagagcttacgcgccgtcacgctgcacgtgaacaatcgctatattccgctgaccgacattgccaccgtcacccgagaaatcgccgagccaccggccccggcctaccgggtgaacggcaaaccggctatcgggctggcggtgtcgatggcgccaacgggcaacatgctgcgtttcggtgctgcgctgaacgccagaatggcggccctcagcgccgggctgccgcacggtatcgagatggtgaaagttgccgatcagtcggcggtggtcagtgacgcggtaagcgggtttatccgggtgcttatcgaagccgttgttatcgtgctggcggtttcatttgtctcgctggggttacgggccggactggtggtggcgacggccattccgctggtgctcgccatgacgtttgccggcatgatgctcgccggtattggccttcagcgtatctcgctcggggcgctgatcattgccctgggcctgctggtggatgacgccatgatcgccgtcgaaacgatggtctcccggctggaagcgggggattcccgtcggcacgcggccacgcatgcgttcaaaacgacggccttcccgatgctcaccggtactctggtgatgattgccggctttattcccgttggttttgcggcctccagcgccggtgaatactgtttttccctgtttgcggtggtgctcattgccctgctctgctcctgggctgtcgcgatcctgttttcgccgctgacgggcacgtggctgctgccggaaaaagtcagacatcacgcggcaggccccggcaggatcgcgcgcgggtacggacggcttttacgcctggcactgcgccaccggctcgctaccgtgctgattgcgcttgccgcgctggggctgtcagcgtacggcacgacgtttatgcagggcgagtttttccccgcctcggaccggcctgagctgctggtcagcctgacgcttccggccaacgcgtcgcagccggaaacgctaagagaggtggaaaagctggaaaaggcgctggccggaaacagcaatatcaatcgctattcgacgtacgtcgggtccggcgccatccgtttttacctgccgatggacgtgctgctggaaaatgaaaatatcgcccagatggtcgtggtggctaaagatcttgaagcgcgggatcgtctgcatgctcagctgaacaggatcctggcgacgcagtttagcgacatcatcacgcgcgtgtcgccccttgagctggggccgcccgtcggctggcccatcaaataccgggtgagcgggccagattatctgcaggttcgggcgttggcgaaccgtctcacggaagcgattggccggtctccgttctcacgcgacgttaaccagacggccggagagccggagagggtcatcacccttaaggtgaatcagacggcggccagggcgacgggaatatcgtcagaaagcctcgcccgcacgctgaacaccgtctggtccggcagcgttgtcacgtccatcagggataacgaccgccttgtcgacgtggtgctgcgggccacggacgatgcacgtcacagcaccgccactctctcctcgctcacgattcaggggaatgagggtaaaaaaattccgctcagcgccgtcgcgacgccggtctggggcgtggacgatccggtcgtctggcgtcggcagcgcgtgccctttatcacggtgcaaacggatcttgccccggggctgaaggctgaagcggtatccgcggcgctgcgtccggcggtcgacaggctgcgcgcgagcctgcccgcaggttacagcattgaagaaggcggcgcggttgccgaatcggacaaggggaacagctccgtctttaccgttcttccggtaacgctggtcatcatgctgttgctgctgatgcttcagctgcggcgatattcccggatgctgctggccctcctgatggccccgtttggcttgccggggatcgtgctggctatgctgcccggcggtacgccgatggggtttgtcgcgctgctgggcgtcatcgctctggcggggatgatcgtgcgcaacgcggtgatactgattagcgaggttgacagcaatcttgctcaggggatggcaaacgatgccgcgattatggcggccgcggagcaccgggccaggcccatctgcctgaccgcctgcgccgccatcctgggcatgatcccgatctctcatcaggtcttctgggggccaatggcctatgccattatcggcgggctgctggtcgcgacgctggtgacgctgaccgtgttacccgcgtcgtttagcctgctgttacagtggggaactcagcgcaacgccgcagaagacggactgcgctga

SEQ ID NO: 139938 - DNA, 786 bp, Enterobacter cloacae
atgatagcgataaaaaaagtcctgtatatgtccgtcccgcttctgatggccgtgagttccggcgcgcaggcggatgatggcaccgcgtccgattccctcaccgtcgggcttggggggcagtatgccccgcgttactcaggctcagacaagcaggtgtggcaggtggttccggtgctgcagggtcgtaaaggcgctttctttattgatgcgcaaaaaggggggggatatgacctgcaaaacgacagcggctggtatttcgaacacacgctgggctacgacttcggaagggctgataaaaattctggctggcgtgagggcgcaaacaatctgaaagggatgggggacattgataccaccctgaataccggccttgccgtcggctggcaggccgcgccatggctgagtatggaaggcaaagcgacgctgccgttaacggacagccagggggcaagctatcaggcttccgttacgctaattccggtacaaaataatcaggacacggtcgcctttcagtctgcggccctgtttggcgacagccgttatctgaatacctggtatggggtcagcgagcagcagagccgccgcaccggctatcgccgctatgctgcgccgggtggattctatggcgtcgacaccagactgacctggagccatcagttcgatgcccactgggggacggtcctgagcgcggactatacctggcttggcgatcgtgcgaataacagcccgatcgtgatgcggcgtaatgaagggtctgcagccgccgctatcacctggacattttaa

SEQ ID NO: 139939 - DNA, 477 bp, Enterobacter cloacae
atgaaaataaaacttctttttggcgtgggcggtgtactggttggttgttcgctggcatttttttactattccggcagcgtgggtaaaaaggatgtgctggcctgcagcactgaatttaatttcacgcgcaatgagggaaaagccagtgaagtgaaggtcaataccgttgcccagttctattttcatcgggacggtaccgggttgaccacctataaaggcgcggcaagggctggcgggcaatgtttgatcgttgacagggatgtggattttacctggcagcagcgggacgatgataacgtcatcgtattgagctccaccaaaacctggcgtcggcacaatgacaatacgcctgatgctcagtggggtagcttcgccaatccgaccgcacgctactacctgacgatctctgaactctcgccttccgtgtggctgattcaggaccggcgctatcccacctatatttgccggggtgagtag

SEQ ID NO: 139940 - DNA, 1203 bp, Enterobacter cloacae
atgaaaaagcaaattttaattgtgggtagcggcttttccggtatgtgggctgcggtcagtgccgctcgcctgtcggcgctggaaggaaaatacaatcttaagattgccgtgctggcgcccgttcctgagctgcgcgttcgcccacgcttctatgaagaaaaggtatcaacgctagtcgcgccgctgacagaactgttcgctgagctggatattgaattcattgccggaagcgcagaacatattgatcctgatgcaaaaacggtgatatggcgtgataatcaggggataacatccccggtgacttacgaacgtttagtgctggcgacgggtagccaaaccaaacgccctcccattgccgggcttgccgaatacgcatttgatatcgaccagctggaatcggcgcaggtatttgagcagcacctgaattcactggcttcacggcctgcctccccggaacgtaacaccgttgtggtctgcggcggcggtttcaccggcattgagctggcgaccgagctccctgcccggcttcgttccagattaggtgaggataccaggattaaaataatcgtagttgagcgcagtacagctatcggtggacgttacagcgaagccttgcgcaagaccattgaagacgcaagccacgagctgggcgttgaatggcgtcttaacagtgaggtggaagccatcgatgcaaacggcgttacattaaaaaatggcgaacgtattgccgcctctaccgtagtctggacggcaggcgtcgaggccaacccccttagccagcagattgacggtgaacgtgacagccaggggcgacttatcgttaccgagtcgctgcaggttccagcccatccggacatctatgcaacgggcgacatggcgcacgccaaaacagacgatgcgggcaacacggcgctgatgacctgccagcacgcgatccagcttggaaaatttgccggacacaacgcggcagccagcctgctaaaaatcgcgccatatccttatcgtcaggtgaactatgttacctgcctggatttaggcgcgtggggcgcggtctataccgagggctgggaacaggccgttaaatccgtccgcgacgaggcgaagaagatcaaaatcgccatcacgaacgagctgatctatccgccagcagcagacaaaacggtcgcatttgccgccgccgacccgctggcgaaattcgtttag

SEQ ID NO: 139941 - DNA, 189 bp, Enterobacter cloacae
atgacatacccagcagagcacaccccctcccaacgcataaaatcggcaaaaccgtcgagcaacaccgcaccagactccgctgacccgcgtcagccatcagaagcggatcgttcatttattcgctcaatgaatgagtttgtcgaaaaacatggaaccattaccgatgatgagtttttcagggtgctttaa

SEQ ID NO: 139942 - DNA, 720 bp, Enterobacter cloacae
atgtctgaattactgaaggtggaacgtctggacgtgcattacggcggtattcaggccgtacgcgatgtctcttttaccctgcacgatggcgaacaggctacgctgatcggcgctaacggcgcggggaaaagctccacggtgcgcgccattaccgggctggaaagctttagcggccgtattgaattcaacggtaaagcggtgcgtgagaacaggcccgaaatcctgctccgtgacggtctggtgatggtcccggaaggccgggggatcttctcccgaatgacggtgctggaaaacctgcagatgggcgcctggctcaggcgtgacactgtcaccgttaagcgcgagatgaacgagatcttcgagcgcttcccgcgcctgggagaacgccagcatcagctcgccggcctgctgtccggcggtgagcaacagctgctggcccttaaccgcgccctgctcagccgcccgcgcctgctgatcctcgacgaaccctcgatgggccttgccccgaagatggtcgagaacatttttgccgtcattgccggcctgcgcgagcgcggcgttgccctgctgctcatcgaacaaaacgcccgtctcgcgctggaagtcaccaacagcgcgtgggtgatggacagcggcagcattgttcatcatggcgaatcgaaagcgctgctcaatgacgaccagattgcacagatttatttgggcgaaatgcccgtttaa

SEQ ID NO: 139943 - DNA, 228 bp, Enterobacter cloacae
atgccttcattactattacagtcactgtttccgctcgtctttataatgttacttggatggctaagtggaaagctgggatattcccggcgtgaagatgcaaacgtcatggcaaccgtggtgattcgtttcgcccttcctttccatctttttatcggtgcattgcataccgatcccaataaaattaagaacctgacctttatggccgttttagttgtcggtttaaggtaa

SEQ ID NO: 139944 - DNA, 651 bp, Enterobacter cloacae
atgcacacaacccacaccacgttcattattgccggccacaccgtccaccacgtcaccttcgaccccaccaccttcaccgacgccgaccttctctggctcccccactacgctgagcttgcaaacgccggacgcaaacgcaaagccgagcatcttgccgggcgcatcgccgccgcacatgcgctcggcgcgatacatgaacgcgcgatccccggcatcggccccagcggcgaaccgctctggccggaaggggtttcggggagcattacccacagcggcgcgcaggcgatggcggttgtcgtccgtcatcaagatgcgctcgtaggtattgattgcgaagccattcttccagaccgggaagcccgagaaatccaagacggcatcattgatgcgcaggaagcgatatgcctgacgcactcgggctacccttttgcgctggcgctgacgctggcatttagcgcaaaagagagtttgtttaaggcgctctttccgcaggtgaaaacttatataggttttgactgtgcccgcataacaagactcaatgagaaaacagtcacgctggccctgacccgcccacaggctgagtttaaagaaaatacgctatttacagttcactggttacttgatggtaatcaagtcatcactttgctgtaa

SEQ ID NO: 139945 - DNA, 357 bp, Enterobacter cloacae
atgaaaaaaataattaccttgcttagtttatgcattttactgacgggctgtccaggaggcaaacgtgcaccacatcccagagccacgtacatcaatggagattatctttgttttagcgtaaataaaaaagacaaacttaattactatacaatttactctagtgaagatagcgatataactatcgtgacgggctccggaagagaacatttgaatcttaactaccctgataattgcatacatatcaattggaaatatggatatacctacgtaattaactatggactgaatggtgaagattatgaacatgagttttttatcgataacgacgggcaactaactaatctgggaggattataa

SEQ ID NO: 139946 - DNA, 456 bp, Enterobacter cloacae
atggctgcgaagaattctatgccagagcgggctattgcccaaacagaaaatgcagatctagagattcagcaagaaaatcgcgagaagctacgcaaaaaacgcatccgggcgttgcatgatgagccggttcactctgcgtatcttcatgaaagaggagaggcgggttctgcctgtgttgaactttatacccgaatggagcgcaactatctgccgttaaccggcgcgtggttaacccgcgcagggtttaaagcaggaatagccgtgaagatccgcgtgatgccagattgtattgtgattacgccgcaaaattcccgtgagctgtgggggtgcctggaaggcgtcagcgcaacgtatacaaataagctgaaaatgatgaagtggctggagacgtttccgggagcgttaattgatacgggggatttgccagtgaacgaaagtggaaaaggggagcggtaa

SEQ ID NO: 139947 - DNA, 228 bp, Enterobacter cloacae
atgccagcttattctaataaaggtggtgattctggcgtggttttttatgaaacaacccatgattcaattatagttcgattcagcgatggaatgaattacgtttacgattctgtcaaaccgggcgctgcaggtgtaagcaagttgaaagaactcgcctcagcagggcagggactgaacagttacatcaatacagtaatcaaaacaaattactctcgtaagtatcgttag

SEQ ID NO: 139948 - DNA, 822 bp, Enterobacter cloacae; identical to SEQ ID NO: 127004

SEQ ID NO: 139949 - DNA, 123 bp, Enterobacter cloacae
atgagccatcaactcaccttcgccgatagtgaattcagcactaagcgccgtcagacccgaaaagagattttcctctcccgcatggagcagattctgggtaatgctgccaacttactgatttag

SEQ ID NO: 139950 - DNA, 435 bp, Enterobacter cloacae
atgagtcatcaacttaccttcgccgacagtgaattcagcagtaagcgccgtcagaccagaaaagagattttcttgtcccgcatggagcagattctgccatggcaaaacatggtggaagtcatcgagccgttttaccccaaggctggtaatggccggcgaccttatccgctggaaaccatgctacgcattcactgcatgcagcattggtacaacctgagcgatggcgcgatggaagatgctctgtacgaaatcgcctccatgcgtctgtttgcccagttatccctggatagcgccttgccggaccgcaccaccatcatgaatttccgccacctgctggagcagcatcaactggcccgccaattgttcaagaccatcaatcgctggctggccgaagcaggcgtcatgatgactcaaggggcactgttgcaaagttag

SEQ ID NO: 139951 - DNA, 1644 bp, Enterobacter cloacae
atgaacatcaccaaacggttattactcgctttttctctacttatcattagcttgattggcacgaatatcattgcaatgatttctttatcaaaaattagtgaggacactaattatttccaggaaaatattcttcccagcctgacgacaatgaataaggaaatgattcaggctacaggcattcgttcgcaactttatttgcatggtttaatcgaagacccggcgcaaatggatgtcattaaacaaagtgccaataaaatttatgatgagctccttgtaaaacatcaatactatcttaaagaattagcttctgacccgcgcgaagtagaactgagcaataaaacactggcggatttacaggcgttccgcggagcaatggaccaatattttaaaatatcagaatcgaatgacaacaaagcgcttatccaaagcatgcaaaaaggcggattaatcgcagaaaaaattgctgcattacttgctgattttaatgaccagattgactacaacacctctttagttgtacaggcgaatgcggccaataaatcgcttattagcaaagcactgattttatcagtgagcgcaacgctggctgcaaccattcttcttgggctgtttggtctgcttacggttttaaatattcgtcgccgtttaaatgccatgagagatggcatggtgcagatcagtgaagaccttgatctgagcaaaaatctgccggccggccgccaggatgaaattggccatgccatcacggcatttaaccatctcgttgagcgggtggcggaatccctcagtatggtgaggaatgcttctgcttcggtaaatactgcggcaaacgaaatttctttaggcaatgatgagctgtcagcgcgtactgaacaacaatctgccgccgttgttgaaactgctgccagtatggaagagctgagctcgacggtaaaacagaacgcgcaaaacgcccaacaggcgagtttgctggctgttaccgcgtccgatacggcgagtcaggggggtattgttgtaggtaatgccgtgagtcggatgaaagatattatcgaaagctcacgccgcatctctgaaattaccaccgttattaacggtatcgcgttccagaccaatattctggcgctcaatgccgccgttgaggctgcgcgtgcgggcgaccaggggcgcgggtttgccgttgttgccggagaggtacgttcattagctcagcgcagctcacaggctgcaaaagagattgaagcgctcatcggcgagtcagttcattttgtagaagaaggcgcaaaacaggtcgatctggcgggtgaaagtatgagtgggattgttcactccgttacccaggttaaagatttgatgcaggaaattgccgcagcgtctgacgagcaaaatcggggtattgcgcagattgctcaggccatgtctgaaatggacacgacaacacagcagaacgccgctctggttcaggaatcgtctgctgctgcgggaagtctggaagatcaggcggtcaagctgcaacaactggttgatgtattccgtttacctggggtacaaacggcggcggctgcggccaaagcccctaaacgtcctcttaaaatgtcccctgtgtctgcggctgcaggccatgatgcaggttgggagacgttctaa

SEQ ID NO: 139952 - DNA, 348 bp, Enterobacter cloacae
atgatctacgatacctatacccagccagagtggaaaacggcattgtttgatcactatttaattcttctgtaccactatgccgagacaaagaaaaaatccactttctgcggtacggtgatcaaaaccagaagccttcccgatactcctgaaacccaggcgatcgccaaaagactgttggctttcagcccacggctgggaaaactcgccagtaaagcctgtcaggtacacattcaggctattaacgtgcaagagggtgaaccgcttaatctggatagatgcatgcatacgctgaaccagatacgtcatcaggtcacggtgaaaccatcggtaaaaaaagccaaaaaataa

SEQ ID NO: 139953 - DNA, 294 bp, Enterobacter cloacae
gtggcgcacgtcttcggtgaacgcactctggccacactggagcgtcttctgagcctgctgtcggcctgtgaggtcgtggtatggatgacggatggctggccgctgtatgaaccccgcctgaagggaaagctgcacgttatcagcaagcgttacactcagcgcattgagcgacataacctgaatctgagacaacatctggcaaggctgggacggaagtcactgtcgttctcaaaatcggtggagctgcatgacaaggtcatcgggcattatctgaacataaaacactatcagtaa

SEQ ID NO: 139954 - DNA, 516 bp, Enterobacter cloacae
atggcgaaagtggaaaagcgtctgaaaggggacgaactggcggtccgacgtcagaagaacattgagtatcaaaatatacgtaaagaacgactggaagaattaggggagcataaaatctcaatcaggcttaatagcgctgactatgagaaattggctgatttgtgtgaaagtttggggcatagacgaccacagcctcaaatgcgcaacctcatagaaaactattcttcggccttagtttatttgcttcgtatagaaaagttgaggcagttatatgatccccaatcacaagcggccaaagagctatatcatttgtataaagttgttgatcatcttaaaaatgataaaggactttctgattctcaaatagctgaacatttcagagggaaaaaaatccgtactcctttttcgatatttgtagataatgaatggactaactggaaaaagagacatattaagcaattgttaaatgaaaaaactcttcttaaccggctatctatcttagatgaagatgaatga

SEQ ID NO: 139955 - DNA, 1080 bp, Enterobacter cloacae
atgttactgaacaaacgcaatatagatttttgttattcactcgatgttggcaaaactaccaaagataaacagttaaaaatgagaactgataaactctgtgttgtaagtcgatttgataatgacgcagaaatgaacgaaacatatgtcagtctggaaagtatgaatcatgctaaatccaaaaaatatcgtgttcaatatatccgaaccgatgaggaaaaaccttaccgtaaggcattactgatcaggggaaagaagaaaaactcaccagtattgttgcgtattgattactcccccataaatcgtaacacaggcggaatacgtttagattttcgtccacaacatatgacgcctcaaaaaatagatcatttattatcgtggataaaccgccaattaggagaaatatgttatcaactgctggcgcgagcctggattacgcaaattgatgtcgctctcgatgtctacaactgcaagttagatgattacatatggggtttggaacgttcaggaaagacagcatattttaataaagaagatggtttgccgggtatcaggataggtagttatcgctctcttttacattttctttgctacggaaaaatagacgctaacagcggtagaaaactggtatttcaggaaagagccaaattcattaacatcaattttgatgagtatcagcaattcctgcgtattgaagcgaggtacaggccaaatgcaacacccacaagcaaaaacggtaatgtgttgatgctggcccatattttagagatgagaaatcctttcgagcggctccgggtctattcgaaagatttaggggatgcgctattggacagacggtatctttacgcgctcccaaacgctcccagcatcgctgaaatgaagcgctacatgatggatgctatgcaatgctcacgcttgcctcgcaaagtcgatagactcattgcagagtacgagatagagctgttcgataaacatacagtctggatgcagtggtcacgctgcgttgctcaattaagcggcattttcagtatagcgtctgttttctgtgtacataagagtgtacatactgaaaatatggagtag

SEQ ID NO: 139956 - DNA, 1215 bp, Enterobacter cloacae
atggcgctgaccgatgttaaagtgaaaactgcgaagccaaaagaaaagccctataagctggctgatggcggcggtatgtatctgctgattaacgctaatggttccaaatactggcgaatgaagtaccgcttcgccggtaaagaaaagatgctgtctattggcgtctaccccgatgtttcactggccgacgcgcgcgagaaacgcagcgaagccagaaaaattctcactgctggaggcgatccgggtgaagtaaagaaagaagagaaagtggcccagcaaatgagtttgaaaaacactttcgaggccgttgctcgcgagtggcatcagactaaagccgatcgctggtcattacgctatcgtgatgaaatcatcgacacctttgagaaagatatcttcccctatatcggtaaacgtcctatagccgaaatcaaaccaatggagctactggaagcactgcgtaagatggagaaacgtggagcgctggagaaaatgcgcaaagtccgccagcgctgtggcgaggtatatcgatatgcaattgtcactggtagggctgactacaaccccgcccccgatcttgccagcgctttagctacgccgaaaaaagtacacttccccttccttactgccaatgaacttcctcacttcctcaacgatctggcgggttataccggcagtatcatcacgaagacagccactcaaatcattatgttaaccggtgtacgcacgcaagaactgcgtttcgcacgctgggatgatatcgattttgagacaaaattgtgggagatcccggcggaagtaatgaaaatgaagcggccccatattgtaccgctatcagagcaagtcattgcgctatttaagcaacttgagccgatatcaaaacatcaccccctggtgtttattggcaggaatgatcctcgcaagccgatcagtaaagaaagcattaaccaagtcattgagttgctggggtataaaggcagactgacggggcatggtttccgccacacaatgagtactattctgcatgagcagggctttaactcagcgtggattgaaacgcagcttgcgcatgttgataagaacgccattcgcggaacatacaaccatgcacaatatcttgatggccgtagggagatgatgcagtggtatgcagattatataggtgagttgcataaaagccgggaagtaatcaaagagtcgattaggcaaacagcatag

SEQ ID NO: 139957 - DNA, 2673 bp, Enterobacter cloacae
atggcagttaatcaggcgaagatttttgaacagctcgaacaacttgttgaaaatcctgagcaaggcgaatttatttacggctttttaactgcctttgagttccctaaagctacgctgagtcagattcggcaaggtggggcacgtaatgttgcgaaagagccagcacacgttgcattaaaaaataaactctactaccagccagtggcggatactgatgatcttgaatctgcttttgagcaacgtgttgccgacgcggctgttgcaaaaaataagatccgctttgttctagtaacaaattttgttcgctttttagcctgggacacactgacacaggaacgtctcgatattgagtttgaagagttaccacgtaactacggttttttcttaccgctggtagggttggagaaggctattctcaatagtgaaaacccggccgatgtgaaagccgctgagaagatgggaaagctgtttgatcttatcaaggagcgtaatgatttaagtaaagcagaagatattcacgcgcttaatgttttcctcactcgtttgttgttttgcttttttgccgaagacacaggcatctttgaaaaaggtcagtttacttccgcagttaagagctacaccgccgaagatggcagtgatttagatcagtttctgacagacctgtttgccgtgatgaacagcaaaccgaatagtaaattacgcctgtcacttccgattcatttaaccgcattcccgtatgttaatggtggcttattcgccagtgatgagcctgttccagagttggggttgaaaggtagacgtatcttacttgaatgcagtgcaatggactggagcgagattaaccctgacattttcggcagcatgttccaagctgtgatagatgtggagcagcgtagccgcttaggacagcattacacttcatacagcaatatcatgaaggttatacaaccattatttctggagccattgcgttcagagcttgaaaaacaacgcacaaacacgaatggtctcaaacggttgcttctccgtctggggaaaatgaaagtttttgatcctgcgtgtggttcagggaacttcttgattgtcgcctataaagaactgcgtcttttggagatggatgttattcaagcacttttagaaagtgatccgcaatcgatctttatgagtagtatccatcttgatcagttctatggtattgaaattgatgattttgcctgtgagatagcacgtctatctctctggcttgcggagcatcagttaaataaacaatgggaagaacacattggttcagcaccaccagcattaccgttgcgttcatcaggtaaaatttggagcggtaacagtctgcaaaaagactggcaggaagtatgtccaaaaaaggttgatgatgaagtttatgtgattggtaatcctccctttttagggacggttggtcgttcggagctacagcgttctgatatgcagaaagtgtttagcaatttcaaaacaataggtggtttggattttgttgcatgttggttctggaagggtgcgcaatatatccaaaatagccacgctgaactagctttagtagccactaattctctttgtcaaggggagcaagttgcaactctatggccaccgattttcgcgctagggttacatattcatattgcgtatcagacatttacttgggcgaacaatgcacgtgataaggccgcagtgcacgtagttgttattggtttatcaggaaaaagtaaaacgcgccaactttaccaattagtggatgctaattggcacagtaaactggtcggtaatataagcccttatcttgttgaaggaagcaatatcgttgtggagccgaaatccaaaccaataataaaagatgttcctaaattattatttggaaataaacctactgacggtggtcatttgctgatgaatagtcacgaacgggataagcttcttgaagtggagccacaagctgcccgttggataaagaaggttctgggagctgatgaatttctaaatgcgaaagagcgttggtgcttatggctagcagacataacggatgctgagcttagagctatgccgcacgttttcaaccgggttcaaaaggtggctgaagctcgacggaaaagccctgataaaggagctcaaaaaatggctgagcgtcctcatcaattcagggatttaaacaatcctgatgattatatattgattccaagtgtttcatcggagagaagaacatatatacctataggtttttatgatgcaaatgtgatttcaactaatgcaaactacattattcctaatggtacattgtacgaattttccatcctcacctctttaatacacaacgactggatgcggttagtcgccgggcgtctaaaaagtgactaccgctactcagcgaaagtggtttacaactcgttcccatggcctgacgtgactgatgcgcagcgtaaatctcttatcgatctagccaaatcggtgttactaatacgtgagaattatccagaaagcactctggctgagttatatgatccgcttaaaatgccagctgaccttttagaagcccatcaggcactggataagtttgttgatcgtctctatcgtgacaaaccattcaaggacgccactgagcgtttaagctgcttgctacagcgttatgaatcattgactaaagcataa

SEQ ID NO: 139958 - DNA, 351 bp, Enterobacter cloacae
atgcgcattagaacctttcatcagggcatcaatcagattgcccagacggttgttttcatccgcagagacatgatggaactcatcaatagcaaccaggcagtcattaaacgatttaacattcagcttatcgaaagcaaaacgcagggtggcatgagtacagaccagaatgtcgtcagggctcgccataaatcgtttaaaggcttcaaccttcccagcctctccaccgccaatgcacagattattttcaggttttaccttccagtcagcaaagaaaccatactccgtgagcgcagtatctttaaacgaaccaccgatggacatttcagggaccgcgacaatagctttgcgtaa

SEQ ID NO: 139959 - DNA, 519 bp, Enterobacter cloacae
atgggattttttaaaacgtttgagaaagtagatggtgcggttaaccggggttatgcccggtgggggaaatggatctggggggcgctgttgctgccggtggttatctatcttggctggtcggtatggtctgctgtctggggaccgccgtccgggccggtaacgctgattattcacaatgagctcgacaggcctgttttaggctttagcgtgaatggcgtggcgggtgcgaatgcatcagcttatggaggcggaaaagcaacgtgctgtggcagcctcagtggtgatacagctgagataatatggactttgagtacaaccagagcccagtatgattccggaatcagaagagaaacccgtaagttaacaataccgatgccaaaacgggagtggggtgaaaattatctccatacctattttatgccgggtgacaaagtttatttatggtggagcacaggatttaatcaccccgaccctgaagacattaaagaacaaaccgcaaaaatgaaacaggataaataa

SEQ ID NO: 139960 - DNA, 528 bp, Enterobacter cloacae
atgggattttttaaaacgtttgagaaagtagatggtgcggttaaccggggttatgcccagtgggggaaatggatttggggtgcgctgttactgccggtggtgatttatcttggctggtcggtatgggctgcggtctggggaccaccgtcagggccggtaacgctaattattcacaatgagctcgacaggccaattttaggatttagcgtgaatggcgtggcgggtgcgaatgcatttgcttatggtgggggaaaatcaacctgctgcggtagcattagtggagataaggcagatatcacctggacgctggatattactcatgagcaatatcttaaaggtatgaggttagaaacacgccgcacggtaatggctatgcctgtacgccagtggggtgaaaactatctgcacgtttattttttatctggcgatagggtctatttatggtggagcacaggttttaacagccccacggccgaagatattgcagcgaaagtggaacaaaagcgccagcagaatatgcagcgctga

SEQ ID NO: 139961 - DNA, 528 bp, Enterobacter cloacae
atgggctttttcaacacgtataaaaaaatagacggtgcggttaaccggtattatgcccggtgggggaaatggatctggggggcgctgttgctgccagtggttatctatcttggctggtcggtatgggcagcagtctggggacctccgtccgggccggtaacgctgattattcacaatgagctcgacagacctgttttaggctttagcgtgaatggcgtggcgggtgcgaatgcatttgcttatggtgggggaaaatcaacctgctgcggtagcattagtggagataaggcagatatcacctggacgctggatattactcatgagcaatatcttaaaggtatgaggttagaaacacgccgcacggtaatggctatgcctgtacgccagtggggtgaaaactatctgcacgtttattttttatctggcgatagggtctatttatggtggagcacaggttttaacagccccacggccgaagatattgcagcgaaagtggaacaaaagcgccagcagaatatgcagcgctga

SEQ ID NO: 139962 - DNA, 129 bp, Enterobacter cloacae
atggagaggcgggggtgtaaatggctgaaacaggagtcaaattctgaaaataaagggcaattctcaaattaccataaccttgcgcagcgcctgcgccagctgcacccgcgtaaacggcttacgcagtag

SEQ ID NO: 139963 - DNA, 1101 bp, Enterobacter cloacae
gtgaatttcacctctgatctcacgaacctgaacagtaaaacgccgggtttcagcatcattattgaaggaaaggatgtcacaaccgtactggattcgcgcctgatgagtctgacgcttacggataacaggggctttgaagctgaccagcttgatctggagctggacgactcggacgggcaaatcgttctgccgcgtcgtggggccattattcagtttgcgctggggtggaaaggtcagccgcttttcccgaaagggggctttattgtcgatgagattgagcacagcggcgcgcctgaccgtctagcaattcgcgcacgtagcgcagatttccgtgaaaccctgaacacgcggcgcgaaaaatcatggcaccagacaacggtgggtgaagtggtgagggaaatagctgccaggcataaattaaagatggcgctggggcaggacctgatggacaagcctgtggatcatcttgaccaaaccaacgagagcgatgcgagtttcctgatgaagctggcgcggcagtatggtgcgatagcctccgttaaggacggcaatctgttgtttatccgtcagggacggggcagaacggcaagcggcaagccgctgccggttatcaccataacccgccaggccggtgacggtcatcgttttaccctggccgatcgcgatgcctatacgggggtgattgccagctggcttcatacccgtgagccaaagaaaaaagagacagcaaaggttaagcgccgtcgaaagaaaaccacaacggcaaaggagccggaagcaaaacagggcgattacctggttgggacggatgaaaacgtgctggtactcaacagaacttatgcaaaccgcagcaatgcagagcgagcggcaaagatgcagtgggagcgcctgcagcgcggggttgcaacgttctccctgcagctcgcagagggaagggctgatctgtataccgaaatgccggtgaaggtgagcggctttaaacagcccattgatgaggccgaatggaccattaccacgctgacacacagtgtcagtgcagatagcggtttcacgaccactctagagcttgaggtgaggattgatgatttagaaatggaatga

SEQ ID NO: 139964 - DNA, 876 bp, Enterobacter cloacae
atggaacattccgctcaattttatcaattaaatgaagtaattaataaatataaactacatctaagtgatgtgataaatttctggataggccatgagattcctctttatattaagatggagggtgtgtcatgtaaattatcatgtgttattcgtgatgataatgatctgttcttaaaagatgaaaagagaagcatttataggtatcgtgattttttatttggtgaaaatccattggatagtattgatccacaaaaacttattattgaaaatagcaagctagatgtgattcatggtaatgatatatatcaaagtgaattgagctgccagttcacggaaagacagtttcgtcacgaaagaggttccgaggtttcatatattaaaattggacgtgagcagttgttctacaacggatttgcatatggttattggcgggttaaagccgggccttcaacacgttttgtaacagggaagtataaaattgcaaatacaaacccattaatgtctgattgcgacacctctgcctttttgaatgtctatggaatggatgaatttgattacttaatatttaataatgaagttgaaatagatgggcttgaactatatataagttcaagtgatattgaaatgataaaagctggttgctctgttgatataaatatcaatttgggaaaagtaataaaaccacgaacatctaaacaagaacgaagggccctctatattttgttgcatgagatatgcaaaaagaaaaatctacaatctaacgcttcatcaatggcaaatattctaactgttatagcaaataatgactatggtaaagattgggagttcgatgaagaaactattagaaattggttaatagaatcgaaacttaaatga

SEQ ID NO: 139965 - DNA, 237 bp, Enterobacter cloacae
atgaaaacaacattcaactatccaacaccagaacaacgcctgcaggttctacgtaactatggagaaccacatgatcgcttagtgcgtgaaaaagaacgtcagtacatcacatcgatatctcgttccacggcttggaagctagaacaagtcggccattttcccttgcgtaaatccattgggttgaagtcttgcggatggttgcttagtgacctgctttgctggatcaacgagcgctaa

SEQ ID NO: 139966 - DNA, 1401 bp, Enterobacter cloacae
atgtcgtttggtcgctcttttcctgtggatgtttttccatcaataattagaaatgcgatttatgaagcagaacaacatacgcaagcaccgctatcattaatagcggcgtcagcgcttggtgccatttcattagtatgccaaaacggaattgatgtctgtaggttgaacaacttgcgtagcccagtatcgctctttttactcacactggctgaatctggagaacggaaaagtacggttgataaggttttaatgagaccgttgtatcagcttgaggaaaagtggtttgagcaatacaaccaagatctaaaagcttggttgaacggcgaggttgcttttaatatagaaaaaaaagcattggcatcaaaattgaaagccgatatgtgtcgcaataaagattatggcgcaacgaatgaacgattgaaagcgttactgcaaaccaaacccgcagaacctgttagatataggctaatgcttaatgacgcaacaccatctgcgataaaaaattatctctgtagagactggaggtcagtgggtatcatgtcagatgaagcaggcacaatattcaacggacatacattgaatgagctgcctttcatcaataagatgtgggatggttcaacttattctgtcgataggagaaattcgcctgaacttttaatccatgatgccagaatgacattatctttgatggtacagcctgcagtatttcagaagtatattgaacgaaaaggtgatatagcaaaaggaattggtttttttgctcgttgcttgatttgccagccagattcaaagcaaggataccgacagattactaatccggtaatctccagcgaatatctgccagtgttccacagtcggcttatagatatagtcaacgatagcattgctataaatggcaaaggcgaacgactcagcctgcgtttctctcctcaggcagaacaagaatggatctcattttataacaaaacagaatcggaaatgagtgagcttggctatttatctaacatgaaagattatgcctcaaaaatggcagagaatatggcgaggattgctgcactgctccattattttgaaggctatgatggggatgtatctattcaggctgtcgaagctgcagcgcagataagcggctggtatgtaggtgagtacaaacgtttgttctttaagtcccaggaattcactcttgtcgataaagaaagtgacgagctatattcatggataaaaaattattgtgctagtacttttccatcacatataagtaaaacgatgattcttcaatatggccctcatcggttcagaaataagcttaaaatgaatgaattacttggcaccttattcactcaacgaaaaataatggtaacaagagagggtaaaactatttatatccagccagtacattag

SEQ ID NO: 139967 - DNA, 321 bp, Enterobacter cloacae
atgacaaaacataaccgatttccctctgaagttcgtcaacgcgccgttggaatagttctggtgaaccagaatatctacaactcaaaatgggctgctatctgcgccattgccccaaagattggctgcactcccgatgcattacgtatctggctcagccagcaggaacccgaggatgatggacaggatatggcaggcattgcacgatatgataacccgtattcatcaatgccgatcgatgtggcaactgctaaaaagagttcgccactttatggaaacagccagtcctttcccgaaagaaaacatggtcaggcaaaagtgtag

SEQ ID NO: 139968 - DNA, 2625 bp, Enterobacter cloacae
atgagccagaacaagcgatacatccccctcaatgcaggcgaatccgccgtcttgcccgacgctaacaccctgctgccacgcggtgaagtgtacgaaccgctggcgcggatgattattgaagcagtggacaaggcaaaagccgccgcaggcaggtcgctgaatgagctgcgcgaacataatgccatctcgatagatggcgcacgcgggactggtaaaactgctgtattggtcaatttgaaaagctatctaaaagattgggacgtcttgaaagatgtccacattcttgacccggtagatccgactctgctggaaaatggcgactcgttattcctacacatcatcgtcgccgccgtgcttcacgataatgatgtcaaagaacagcagcggattacaccgaataaggcccgtagcctgaaccagacgctggagaaactcgcccagtcgctggaatcggtcgagacacaacaagaacgtcacggcatggacaaggtacgtgccatgtacagcaacaagcagctagccgactgcgtgcaagattttttccgcgaagtgttgagcttgctggacaaacagctgttgatcctgccgatcgacgatgtcgatacctcgttgaatcgtgcctttgaaaacctcgaaatcgtacgccgttatctagctacacctcatgtgttgcccatcgtctgtggcgatcgatcgctttacgatgaggtaacctggcgcgattttcatggccgcctgaccaaggattccagctaccgtcgcaaagtagcctatgaaaaggccgtagaattggcagcagagtatcaacgcaagatcctgcctttcactcgccgtttgaccatgccggaagtcagcagttattggcagtgggggccagttggagaagaggcggctgacactagagttactctcggcaatgcaaatgatgcaatgcctttggctaacttcatttcttggctggagatctttttgactggcccggttaatggatttgaaagtagtcgtccctcgttgccaatcccttctatccgtgcattgtcgcagttaatcaggcattgccatgatcttattctggaattgccagctgaaattcgtactgctaaggatgagctgaatgtgcggattagttggcaaatgcctcctaagcttcaggatgaagctgataaaacaacggagcttcaggatgaagctgataaagcagcgaagcagaaaagaaatgagtttgcacataatctggtgaattacttctgctttgaacctaaagccggtgcagcctatctgatattgcttgccaaactgcattggcaagagtggtacgaatcctcatcctcacagcatcgcagccttcttgacacacccttgttccagccccttacacatgctactgccaactttgagcttttcgacaaggcggatgacctttctgcttggccgattgtattgaatggacggttgcctgaagagtggctggccggtatcaaatcgcagaaaactattctgccgtatccagtggcagaagttggggtaaattcaagcaaagggtgggattacatcaaggagattcagagcctttcaatacaaggtttgcaagtcgatcaaaggaaaaaggcaagctttttgatttccttgctggcacagaataatttttacaccaacgccaagaaaaccatgctgctgaatataggccgggtgtttgagttgttaatttccagcattgtcggtccgctatcggtcgaagaaatacatgcaatcatggggcgggctcctttcttttctacggcagcactagcacctactaaaacaatcacttttaacgaaaaagaaaataagtccaatggtggtggtgatgaagggttggaagagcctcaaaacgcagagtacgatataaatttgatagcagagcaactatatcaagaaatagaaatgtggcggcagacctgtcatgttaatcaaattgatcttgcgccatggttggtttacaaggtgttcaataaagtttatagccaggtggcgagtgatgagtatgtgccaaatggcatgaaacgtatcagaacggcattaaatatggtggctcacagtttctacgcaacctggtttgcctttggtagttttgaaaagggtgagctgtttggcttgcctaatgtgatagcaacgaccaacattaatcctgaaaatctaaaaaattacaaaagcaatgaccagtttaatgtcaacatcaagccaatactggaagcttttgataaaaataattctttgagggcagtcagcattgtgcttgcagagcacccgttgaagaagtggattgatgaggtaatcaacttggattggcctaagtctgaggaaaatcttgaggctaaagctgaaaaatatttgagagaagagcttggcatcaccgccaggaatacaaataaaacgacagtaaaaacacaagccagaaaacaaatagaaaaattaggttcgatatatgatcatatggcagctaatttcggaggtgatagcaagtacacaaaacttctaaaagaggttattgatgaattatctaaagatccagcgccaaattcgtcaaatcatccgcaacctaatgtacagccgtcaggacaaggtcaggacaaggaaccagagtaa

SEQ ID NO: 139969 - DNA, 2754 bp, Enterobacter cloacae
atgctccagcgcaccttgactgaacacgccgccgagtgtttttttggcgataaaagattagccgcacgattgtggcagcacttgctaaagtcagctgacggtctggagtctgaccattggcatcgactgcaggatgatttctatcatttgctggtagagggcgtggaggcgcaccatcctcgcgagcaccggctgaccgatgtgcgccagttgatggggcgcatgcttgatggtgatttgttgctgacgccaaaactgccgtggctggacgagctacaacagaggctattgcagcgcaatggcgacttgttgtgctaccttgagagtgaggtgcaggcgtatgtgcgccttgcaacagggctggaccctacgttattggccggctggcatttagcacagtggcttaatgacatgcctctgccactgatacacgacatccgccgcgtggtgtccgcgcagactgcatttttcgccccatctggaaacccatcactaccgtttgccgagggacatgtgcatttctggggcatcacaaccgatagcgcgattctcgacgattatctgctggcgggtgatgaattaagactcgacgacaatgcgattcagtggcagagagaacagcacgacaacttggagcctctgttgcagcgcgcgcggcaactgctggtgttgttgctggaatccgacgagcagaccaagcgcccccaaaatactaaggacaatcagccatatcgttcggaaggttggccgcagcatctggcgcggctcaatctagccatgcactcccctaccctcaagccagactgggatttgcttgccgctagtctacatgcttccaacgttggtagtgcggattggctactgaacgagtttgcattggcaatgaagcgtggcgatgccaatcgctggttgtggctgtatgtctatctttgtcgccgctattgccaacctgatacccatccactgcaacgcgcggccatcttgtgtttctggcagaccgtgaaccagctgcgtagtaatctgataatggatgggcaagggctcacacgctttgccgagcgctactatcaatcagcgctcggtcggggtggcgactatcaagggaatatgcgccgattgtgggcaggtcgtgctgatgtggcagagatcaagtcagggccgttggcatttaagccggcgtttgtcggcaagatcgctcgcggcctgcttgctaatgccagtttgtccttgccaagccccccctacatttttggtgaatctgatatcctgcttgatatgcaagctttggccgccatgcaggcgctggaacgctggcaattctgtggccacttttttcgttcacaaactcacaagcaaaatcagcgctccaggccggatgttaggaagttgtggaaagaggctgaaaagctgatacgcaatctgcaaagtgcttccggctggaacgcacccgagtttttaggcggcaaacagaatcaaaatttccatttccaaccagctagatggtttcgtggattggatgtggcgggggatgaaaacgcgctgaagatcgagtggtttgcgccggtgctgcgttggctgcgtagcggcttcaagccactgccggatggcgaacgtgccagcaccggctttcacctgagtattcatgccggcgaggattatgcccatccggcatcgggcatgcgccatatcgacgagacggtacgtttttgtgaaatgcgtgagggcgaccggctcgggcatgcacttgcactgggtatagtgccgaaacagtgggctgcacggcagggcgagatgatgctgccgctggacgaacatttggataatctggtgtggctgtggcatcacgctagtatgttgagcggtttactgccactggcacaacaggttttgccgctgttcgagcgacgaattgcccgtttctggcgtctgtcacgttggtggcaagtaccggattttatggctggtgatgactgcagctacaatggcgaagtctatgtagatccggttgctgattacaaggatgcgcatttgcgtcatgcgacaccggacgatctgtatcaggcatggtggctgcggcgtaattgtcattatcggctgggaatggttggcgatggctggcaagttacttcgcaagagcaatgcgctttgcctgaccatcaagaattgagcaaacaacatacgttggcaagccagctgtatcaggctcggcatgattggctggcttcgctgacagaagcgccgctagtgattgtgcgcatgagggacgaagcggggacgcatggagagtttcaccccaagcttagccgcaaggctgatgaaaatattctggaagacgtcgataccccggccgaactggatttcatgcacgcgctgcaagactggctgctaaccgaatatgacaagttggggttgatcatcgaagctaacccgacatccaatgtctatatcgcgcgcatgaaatcacatgccgaacatccaattttccgttggtatccgcctgacgaatcggtgctggagagcggcgcttcggctaacctttacggattgcgccgaggaccggtgcgtgtgctagtgaacaccgatgaccccggcatcatgccgaccacattacgcaccgagttcttgctgctgcgtgaggctgcgtttgagcttaaggtaggccgcacagtggtcgaacgctggttggagaccttgcgccagtatggcgtcgagcaatttcatcgcaatcatgttccggtgttcgagccagtttaa

SEQ ID NO: 139970 - DNA, 1434 bp, Enterobacter cloacae
atgtctgaatttgaattactggcacaggatctgcttgagaaagcagggaaggaagaaaagctgcgacaggaaaatgataaaaagctgatcgagcaggtactggaaatctatgatcagaagtacgtggctgagttacttagaaaagtcgggaaaaacgagtggagtcgcgaaacccttaaccgctgggttaatggtaagtgcccaccaaaatcactgacgtcagttgaagaagcacttctccggaaaatgctgccagaaccgcctgcataccacccggactattctttccggttcattgacctatttgcaggtattggaggtatacgaaaaggctttgaggccattggtggccagtgcgtttttactagcgaatggaataaagaggcagtacgcacttataaagccaactggtttaatgatgagcacgtacacaaattcaatctcgatatccgggaagtcactctcagtgacaaacctgaagtgtcagaaaccgatgcctatgcctacattgatgagcacgtgcctgatcatgatgtgcttctcgcaggtttcccctgccagccatttagtcttgctggtgtgagcaagaaaaactcattaggtcgtgcgcatggttttgaatgtgaggcgcagggaacgcttttctttgacgtggcgcgcattatacgggcaaaaaaaccggccatctttgtgctggagaatgtcaaaaacctgaagagtcatgataagggtaaaacctttaaagtcatcatggagacccttgacgagctgggttatgaagttgcggatgctgctgatgtgggaaaaagcgatcctaaagtcatcgatggaaaatatttcctgcctcagcaccgtgaacgtatcgtcttagtcggattccgccgcgacttgaatattcacaaggggtttaccctgcgcgacgtcagccaattttatccggaacaacgtccgtcatttggcgagctattggaacccgtggttgacagtaaatatatcctgactccgaagctctgggagtacctctacaactatgctaaaaagcatgcggcgaaggggaatggtttcggttttggtctcgtcaatcctaaaaataaggaaagtgttgccagaacgctttctgcccgctatcacaaagacgggtctgaaattctgatagaccgcggctgggatatggatataggtgaagcagactttatgaacgaagaaaatcaagcgcgtcgaccgcgcaggctgactccccgcgagtgtgcccgcctcatgggctttgaaaagccagacggcaagtctttccgtattccggtttctgatacgcagtcataccgacagttcggtaactctgttgtggtaccggtatttgaagctgttgccagactgctgcaaccttatatcctcaaagctgtttctgccgatgttgataacgctgaacaggtctga

SEQ ID NO: 139971 - DNA, 1209 bp, Enterobacter cloacae
atgtcggtttttcataactggctgcttgagatcgctggcggaaattatcttgtctatatcaaacgcctttccgccaacgatacaggcgcaacaggtggtcatcaggtcggactttatatcccttccggcatcgtagaaaagctgtttccgtccattaaccatacccgcgagatgaatccttcagtctttctcactgcgcatgtgtcatcacatgattgtcccgacagcgaagcccgggctatttattataacagccgtcattttggtaaaacccggaatgaaaaaaggatcacgcgctggggaagaggcagcccacttcaggatcctgaaaatacaggtgctctgacgcttctggccttcaggcttgatgagcaaggcggggactgtaagacagtgaacatctgggtatgcgccagccctgatgaagaggacgttatcgagaccgctatcggcgaagttattccgggaacacttatctctgggcccgcttcgcaaatcctagggggcctgtctcttcagcatgcacctgtaaatcataaatacgttattcctgaagactggaagcatcgctttccgtctggaaatgaaattattcagtatgccgccggtcattatgcgaaaaactcccatgacccagatgtgcagctgattgaccgccggcgcgttgagtacgacatctttctgctggttgaggaattacatgttcttgacatcatccagagaggatttgaatctgtggatgagtttattgcgttggccaactctgtcagtaatcgacgtaaatcaagagccggaaagtcacttgagctgcacctagagcatcttttcattgagcacgagctgcggcacttcgccacacaggcagtcactgaaggcaataaaaaaccagatttcctattcccctccgcagaggcataccacaatgttgagtttcccagagaaaatttacgcatgctggcggtcaagaccacctgtaaagatcgctggcgccaaatactgaatgaagcagataaaatccatcaagtgcatctgtttacactgcaagagggggtgtctcaggcacagtacagggaaatgcgtgaagcaggtgtcaggctcgttgtgccgtcatcgctacacaaaaaatacccggaagtggtcagagaggaattaatgacgttaggtgcgttcattgcagagcttacaggcctttacgctaaacttccttaa

SEQ ID NO: 139972 - DNA, 672 bp, Enterobacter cloacae
atgaccatgccttattgtatcctacataccgaagctgattcagatcttgtacttaacgaactgggtttttcagaaaacgatattcatgccgctttgacgtctgctttgtacgagcgccgcaaatctagcaagcttcaccccgcagtagatgcagggttccgtttctggagtgagatggtcgccgcgacccgccgtgtgctgattggtaagggtaacggctggtctcctgaagtggtcaagcgaatggaaatggtcgttaactcagccaaaggggttaatctgattatcacctcgggcgataggcacaccggacgtcctgatggattgccgaaaaccaaaaatgccaagggcgaggcaacgcgctcgattgttcacaacaatcccggcacagctgatatgttccagacggatgcgttgtattcaggcaaatctgagatcacgccgatagacagcacccgtacttatatcgtcctgtattattatgatgcggctaacaaagaggttcgctgcgaggtgtcatatccggtaggaatggtgaatcaggacggatttgcccgtgtaagcgcatggagtgagcgtatcatcttgggtcctctgccgtttgaaggtgctgatattttccctgatgaggattttgatgatgacatatctattactgttgaaagcaaatga

SEQ ID NO: 139973 - DNA, 1107 bp, Enterobacter cloacae
atgagtaaccctgttgatgacggcaaacgcctttttaatccgtcccggctcaagctggcgcggattagacgcaaactgaccctgaaggaattagcagagaaaatggggctatctagtcgtattgtaattgagtacgaaaaaccctattgcttgtatgaacccacgccagagacagtccaggcgtacgccagcgctctaaaatatccagagtcctttttctttggggatgacgttgaagcaatcgatccactgacggtttcatttcgttctttgcgtacgacaaaagccgtcgaccagcatgcggcaattggagctggtgggttgggggttatgctgagcgagtatttcagtacgcgcttcactttgcctcagcctgaactgccgaatcttcgtggaagtgagtctgaggtcgccgctcaggcggtgcgcgaagcttggggaataggtaagaagagtatcaccaacgttgttcatcttctggagaagcacggcgttaaggtgttctggctctcagaggaaacggcgagtatcgacgctttttccttctggaaagatgatgttccttacattttcctcaacacacgtaagtcaggtgaacgcagccgtttcgatgcagcacatgaactggctcatctggtacttcaccgtcatggtgatgtcaaggggcaggatgctgagcgtgaagcggatgcttttgcgtcagcatttctgatgcccccggaaaacgtgatggccgttaagatggcattcccgacgtttgacaaaatcgtgcaactgaagtcgctctggaaagtttcggcgatggctctgattgtcagaatgcgcaatctgaacgtgctgacggaatggcaatataacagcctgatgcgcgatgcgacggcaaagggatatcgaaccggtgagccgggaggaattgagcgtgaaagatcgctcattattgaaaaaatgatggccgctttagcagataacggcattcatctgactcaactgagtgatgcgcttaacgtgcctgttgatgaactgagcagtctactttacggtgtggcggcaatcagcggtggcaatggtggaacctcactatcaagggcctcgctccgtctggtgtga

SEQ ID NO: 139974 - DNA, 1905 bp, Enterobacter cloacae
atgaagcttgaagtaattcggatatctggtttccaatcttttggcccagaaccgacagaggtaagccttgaaaatatcacttacttaatcggtcctaatggctcgggtaaaaccgcggcacttcaggctttatgcaaactatttgcctttgatcctgcattgcgtcggattcatcgttctgatttccatgtcccttatgatgaagaagaagttccggaagagcgccaattgtggatagaagctgactttttatttcctgaacttgatgaggaagatgataacagtaccgtagcacctcattttagtcatatgcgacttgatgatccgggaggcctcccacgtgtgcgttttcgcctcacggctactatgggactggatggtgatatcgacgaaaacttagtgtatgtactggatgtcaatgctgatggttcacctcaaaacacagctcaagtaccacgagcagagcgtaatcacatccaggttcattatttaccagccagacgtgaccctgctgatcacattacttacggtgcgaatgcattactaggccgtttgctccgtgccgtacgttgggatgctgagcgcgatacgatcaaaggtctgaccgatcaaataagcgacagccttgcagccaacccttcagtgaaagcatttagtaagagtttgaaaacaacctgggccactctacacaagggcaaatttttcgctgatccaaaaatcacatttgtggcttcggagattgaagcactgttgcgacatttgtcggtttcttttacccccgggcacgacggttcacttgtcgatttctcgcggttgagtgatggccaaaagtcaatgctttatctttccctagtattatcatctcaagcgattgggagagctgtgctcgccgaggaagatgtatcttttgatcccgataagttacgtccaccggtctttacgctggtcgccttggaggagccagaaaatagtctttctccacattacctgggacgtatcgtcagtgctttgtataccatgacgaaaaatgtggatgcacaagctctcattgctactcatgcccctacaatgttacgtcgcgttgctcctgagttaatacgttatctacggttaactgaggctcgaaaaacacgggtcacctgtatcaaattgccagagaaagctgatgatgcacacaagtttgtccgtgaagccgtccaagcatttcctgagatttatttctcacgtctcgtcgtgctaggtgaaggtgatagtgaagagattgtgttgccacgtctacttcaggccaaaggcgcgccagttgatgagtcagcaatcacgattgcgccgttgggcggtaggcatgtcaatcatttttggcggttgctttcagcgttgcagattccctatctgacattgcttgatcttgatgtagctcgctatgcggcaggatggggacgaatcaagtatgttaatgatcagttttctgcatatgagccgtataagaaactccccaaagatcacggaattccaagttggaaagataaagctcaaaaagttcgggactttgataattatttcgaacttctcgaagaacgtggcgtttttttttcttccccaatggatttggacttttcaatgttactggcttatcccgaagcttatgatgttgataaagaaaaacctgatgagtcaactatcaaggctgtcctcgggaaaagccatcacgattcatctcaatacagtgaagacgaattaatgttgttcagcacctatcatcagcgctttaagcttggcagcaaaccagcagcacacattgaggcgttaactcagctaagggatactgaattacttgacaacatgcctgagtcgctaaacaggctggcagatgcaattattgccaaacttgaagagctgccagaatga
